United States Patent Application Publication US 2023/0340073 A1 - sequence listing, part 3

SEQ ID NO: 1622 - protein, 1457 aa, synthetic construct
  REGION 1..1457: note = Variant of human B-domain deleted Factor VIII
MQIELSTCFFLCLLRFCFSATRRYYLGAVELSWDYMQSDLGELPVDARFPPRVPKSFPFNTSQVYKKTLFVEFTDHLFNIAKPRPPWMGLLGPTIQAEVYDTVVITLKNMASHPVSLHAVGVSYWKASEGAEYDDQTSQREKEDDKVFPGGSHTYVWQVLKENGPMASDPPCLTYSYLSHVDLVKDLNSGLIGALLVCREGSLAKEKTQTLAKFILLFAVFDEGKSWHSETKNSLMQDRDAASARAWPKMHTVNGYVNRTLPGLIGCHRKSVYWHVIGMGTTPEVHSIFLEGHTFLVRNHRQASLGISPITFLTAQTLLRDLGQFLLFCHIPSHQHDGMEAYVKVDSCPEEPQLRMKNNEEAEDYDDDLTDSEMDVVRFDDDNSPSIIQARSGAKKHPKTWVHYIAAEEEDWDYAPLVLAPDDRSYKSQYLNNGPQRIGRKYKKVRFMAYTDETFKTREAIQHESGILGPLLYGEVGDTLLIIFKNQASRPYNIYPHGITDVRPLYSRRLPKGVKHLKDFPILPGEIFKYKWTITVEDGPTKSDPRCLTRYYSSFVNWERDLASGLIGPLLICYKESVDQRGNQIMSDKRNVILFSVFDENRSWYLTENIQRFLPNPAGVQLEDPEFQASNIMHSINGYVFDSLQLSVCLHEVAYWYILSIGAQTDFLSVFFSGYTFKHKGVYEDTLTLFPFSGETVFMSMENPGLWILGCHNSDFRNRGMTALLKVSSCDWNTGDYYEDSYEDISAYFDSKNNAIEPRSFSQNPPVLKRHQREGTRTTLQSDQEEIDYDDTISVEMKKEDFDIYDEDENQSPRSFQKKTRHYFIAAVERLWDYGMSSSPHVLRNRAQSGSVPQFKKVVFQEFTDGSFTQPLYRGELNEHLGLLGPYIRAEVEDNIMVTFRNQASRPYSFYSSLISYEEDQRQGAEPRKNFVKPNETKTYFWKVQHHMAPTKDEFDCKAWAYFSDVDLEKDVHSGLIGPLLVCHTNTLNPAHGRQVTVQEFALFFTIFDETKSWYFTENMERNCRAPCNIQMEDPTFKENYRFHAINGYIMDTLPGLVMAQDQRIRWYLLSMGSNENIHSIHFSGHVFTVRKKEEYKMALYNLYPGVFETVEMLPSKAGIWRVECLIGEHLHAGMSTLFLVYSNKCQNPLGMASGHIRDFQITASGQYGQWAPKLARLHYSGSINAWSTKEPFSWIKVDLLAPMIIHGIKTQGARQKFSSLYISQFIIMYSLDGKKWQTYRGNSTGTDMVFFGNVDSSGIKHNIFNPPIIARYIRLHPTHKSIRSTLRMELMGCDLNSCSMPLGMESKAISDAQITASSYFTNMFATWSPSKARLHLQGRSNAWRPQVNNPKEWLQVDFQKTMKVTGVTTQGVKSLDTSMYVKEFLISSSQDGHQWTLFFQNGKVKVFQGNQDSFTPVVNSLDPPLLTRYLRIHPQSWEHQIALRMEVLGCEAQDLY

SEQ ID NO: 1623 - DNA, 4371 bp, synthetic construct
  misc_feature 1..4371: note = Variant of human B-domain deleted Factor VIII
  source 1..4371: mol_type = other DNA
atgcagattgaactgtctacctgcttcttcctctgtttgctgaggttctgctttagcgccactagacggtactaccttggcgctgtggagctgtcctgggactatatgcagagtgatttgggagagcttcccgtcgacgcacgatttcctcctcgcgttccaaagtcatttccctttaacacaagccaggtgtacaagaagacgctcttcgtcgaattcaccgatcacctgttcaatatcgccaaacccagaccaccatggatgggtcttttggggcctaccatacaagcggaggtgtatgacacagttgttatcactctcaagaacatggcttctcatccggtaagtcttcacgcagtgggcgtgtcctactggaaagcttcagaaggagccgagtatgatgatcagacatcccagagggagaaagaagacgacaaggtatttccaggtgggtctcatacctatgtgtggcaagtgctcaaagagaatggccctatggcaagcgatccgccgtgtttgacttacagctacctttcacacgttgacctcgtcaaggacctcaactccgggttgattggagccttgttggtatgcagggaaggatctcttgccaaagagaagacacagaccctggccaagtttatccttctctttgctgtgttcgatgagggcaaaagttggcatagcgaaacgaagaattccctcatgcaggatcgcgacgcagccagcgccagagcttggcccaagatgcacactgtgaacggatatgtcaataggacgcttcctggcttgattgggtgtcatcggaaaagtgtctactggcacgtgatcggaatggggacaacaccagaggtccactccatatttctcgaaggccataccttccttgttcgaaaccacagacaggcatccttggggatctctcccattacctttctcactgcccaaacgctccttcgtgacttgggtcagttccttctcttttgccatatcccgtcacaccagcatgatggtatggaagcttatgtgaaagtcgacagttgtcctgaggagccacagttgcgcatgaagaataatgaagaagccgaggattacgacgacgatctcaccgattctgagatggacgtggtgaggtttgatgacgacaactctccctccatcattcaagctcggagcggggcgaagaaacaccccaagacttgggtccactatatagcggcggaagaggaggattgggattacgctcctcttgtattggcaccagatgaccgctcatacaaaagccagtacctcaacaacggaccgcagagaattggccggaagtataagaaagtgcgatttatggcctatacagacgaaacctttaagacaagggaggccatccagcatgagagtgggattttgggacctcttctttacggcgaagttggtgataccctcctcatcatcttcaagaatcaagcttctcgcccctataacatttacccacacgggatcactgacgttaggcctttgtatagcagaagacttcccaaaggcgtgaagcatctcaaagacttccccattttgccaggcgagatctttaagtacaaatggaccattacagtggaagatggaccgactaaatcagaccctcgatgccttacgcggtactattcctccttcgtgaattgggagagagatttggcaagcggactcataggaccactcctcatctgttacaaggaatctgtagaccagaggggtaaccagattatgagtgataaacgcaatgtgatcctttttagcgtcttcgacgagaaccggtcctggtacttgaccgagaatatacaaaggttccttcccaaccccgcaggcgttcagttggaagaccctgagtttcaggccagcaatattatgcactcaatcaacggctatgtgtttgatagtctccagctttctgtttgcctccatgaagtagcctattggtacatcttgtcaattggtgctcaaacagacttcctctccgtcttcttctccggctacacctttaagcacaagggcgtgtatgaggacactctcacactctttccattttctggagaaaccgtgttcatgagcatggagaatccaggcctttggatcttgggttgccacaacagtgattttcgcaatcggggaatgactgctctcctcaaagtcagcagctgtgattggaacacaggcgactattacgaagattcttacgaggacataagtgcctactttgactccaagaataacgccattgagcccagatcattctcccagaatcctcccgtgcttaaaaggcatcagcgcgaaggtaccagaactactcttcagtctgatcaagaggagattgactatgacgacaccattagcgtggaaatgaagaaggaggatttcgatatctatgacgaagatgagaaccagtctccgcggagctttcagaagaagacgcgacactacttcattgcagcagtcgaaaggctttgggactacggtatgtcatcatcccctcatgtgttgcgcaatagagctcagagtggaagtgttccacagttcaagaaagtcgtctttcaagagtttacagatggcagcttcacacagcctctctatcggggcgagcttaacgaacatttgggactccttggtccctatatccgagccgaagtggaggacaacattatggttacctttaggaatcaagcctctcgcccctacagcttctactcctccctcatcagttatgaggaggatcagagacaaggcgctgaaccacggaagaactttgtgaaaccgaatgagacgaagacctacttctggaaagtacagcaccacatggcccccacaaaagacgaattcgattgcaaagcatgggcgtatttttcagacgttgacttggagaaagatgtacattcaggacttattggtcctttgttggtgtgtcacactaacactctcaatccagcccatggcaggcaggtgacagtccaggaattcgctcttttctttaccatctttgatgagaccaagtcctggtacttcacggaaaacatggagcgcaattgcagagccccctgtaacatacagatggaggaccctacctttaaggaaaattatgccttccacgcaatcaacggatacattatggatacactccctggccttgtgatggctcaggaccaacgaatcaggtggtacctcctcagcatgggttctaatgagaacatacactccattcacttttcaggacatgtgttcactgtccggaagaaagaagagtataagatggccctctacaatttgtatccaggcgtgtttgagaccgttgaaatgcttccctctaaagctggcatctggagagtagagtgcttgatcggagaacatcttcacgcaggtatgagcaccttgttcctcgtgtacagcaacaaatgtcagaatccacttggcatggccagtggacacattcgcgactttcagatcacagcatctggccagtatggacaatgggccccaaagttggctcgcctccattactccggtagcataaatgcgtggtccactaaagaacctttcagctggattaaggtcgatcttcttgcccccatgatcatccacggcattaagacacagggagcgaggcagaaattctcctccctctacatctcacagttcattattatgtatagtttggacggcaagaagtggcaaacttatagaggtaacagtactggaacagacatggtgttcttcggcaacgttgatagctctggcatcaaacacaacatctttaatcctcccataatagctcggtacatcagattgcatccgacccactacagcattaggagtacactccgaatggagcttatgggttgcgacttgaattcctgttcaatgccactcggaatggagtctaaagccatctctgatgcacagataaccgccagtagctactttacgaacatgtttgctacgtggtcaccctctaaggcaaggcttcatttgcaaggccggtctaatgcctggagacctcaggtgaacaacccgaaagaatggctccaggtggactttcagaagaccatgaaagtaacaggtgtcactactcagggagttaagtccttggatactagcatgtatgtgaaggagttccttatttcctcatcacaagatggccaccagtggaccctcttctttcagaatggtaaggtcaaagtgtttcagggcaatcaagacagcttcacacccgtggtgaacagtcttgatcctccactcttgacacgataccttcgaatccatccacagtcttgggagcaccagattgcattgcgcatggaagtacttggatgcgaggctcaggacctctac

SEQ ID NO: 1624 - protein, 1457 aa, synthetic construct
  REGION 1..1457: note = Variant of human B-domain deleted Factor VIII
MQIELSTCFFLCLLRFCFSATRRYYLGAVELSWDYMQSDLGELPVDARFPPRVPKSFPFNTSQVYKKTLFVEFTDHLFNIAKPRPPWMGLLGPTIQAEVYDTVVITLKNMASHPVSLHAVGVSYWKASEGAEYDDQTSQREKEDDKVFPGGSHTYVWQVLKENGPMASDPPCLTYSYLSHVDLVKDLNSGLIGALLVCREGSLAKEKTQTLAKFILLFAVFDEGKSWHSETKNSLMQDRDAASARAWPKMHTVNGYVNRTLPGLIGCHRKSVYWHVIGMGTTPEVHSIFLEGHTFLVRNHRQASLGISPITFLTAQTLLRDLGQFLLFCHIPSHQHDGMEAYVKVDSCPEEPQLRMKNNEEAEDYDDDLTDSEMDVVRFDDDNSPSIIQARSGAKKHPKTWVHYIAAEEEDWDYAPLVLAPDDRSYKSQYLNNGPQRIGRKYKKVRFMAYTDETFKTREAIQHESGILGPLLYGEVGDTLLIIFKNQASRPYNIYPHGITDVRPLYSRRLPKGVKHLKDFPILPGEIFKYKWTITVEDGPTKSDPRCLTRYYSSFVNWERDLASGLIGPLLICYKESVDQRGNQIMSDKRNVILFSVFDENRSWYLTENIQRFLPNPAGVQLEDPEFQASNIMHSINGYVFDSLQLSVCLHEVAYWYILSIGAQTDFLSVFFSGYTFKHKGVYEDTLTLFPFSGETVFMSMENPGLWILGCHNSDFRNRGMTALLKVSSCDWNTGDYYEDSYEDISAYFDSKNNAIEPRSFSQNPPVLKRHQREGTRTTLQSDQEEIDYDDTISVEMKKEDFDIYDEDENQSPRSFQKKTRHYFIAAVERLWDYGMSSSPHVLRNRAQSGSVPQFKKVVFQEFTDGSFTQPLYRGELNEHLGLLGPYIRAEVEDNIMVTFRNQASRPYSFYSSLISYEEDQRQGAEPRKNFVKPNETKTYFWKVQHHMAPTKDEFDCKAWAYFSDVDLEKDVHSGLIGPLLVCHTNTLNPAHGRQVTVQEFALFFTIFDETKSWYFTENMERNCRAPCNIQMEDPTFKENYAFHAINGYIMDTLPGLVMAQDQRIRWYLLSMGSNENIHSIHFSGHVFTVRKKEEYKMALYNLYPGVFETVEMLPSKAGIWRVECLIGEHLHAGMSTLFLVYSNKCQNPLGMASGHIRDFQITASGQYGQWAPKLARLHYSGSINAWSTKEPFSWIKVDLLAPMIIHGIKTQGARQKFSSLYISQFIIMYSLDGKKWQTYRGNSTGTDMVFFGNVDSSGIKHNIFNPPIIARYIRLHPTHYSIRSTLRMELMGCDLNSCSMPLGMESKAISDAQITASSYFTNMFATWSPSKARLHLQGRSNAWRPQVNNPKEWLQVDFQKTMKVTGVTTQGVKSLDTSMYVKEFLISSSQDGHQWTLFFQNGKVKVFQGNQDSFTPVVNSLDPPLLTRYLRIHPQSWEHQIALRMEVLGCEAQDLY

SEQ ID NO: 1625 - DNA, 4371 bp, synthetic construct
  misc_feature 1..4371: note = Variant of human B-domain deleted Factor VIII
  source 1..4371: mol_type = other DNA
atgcagattgaactgtctacctgcttcttcctctgtttgctgaggttctgctttagcgccactagacggtactaccttggcgctgtggagctgtcctgggactatatgcagagtgatttgggagagcttcccgtcgacgcacgatttcctcctcgcgttccaaagtcatttccctttaacacaagccaggtgtacaagaagacgctcttcgtcgaattcaccgatcacctgttcaatatcgccaaacccagaccaccatggatgggtcttttggggcctaccatacaagcggaggtgtatgacacagttagtatcactctcaagaacatggcttctcatccggtaagtcttcacgcagtgggcgtgtcctactggaaagcttcagaaggagccgagtatgatgatcagacatcccagagggagaaagaagacgacaaggtatttccaggtgggtctcatacctatgtgtggcaagtgctcaaagagaatggccctatggcaagcgatccgccgtgtttgacttacagctacctttcacacgttgacctcgtcaaggacctcaactccgggttgattggagccttgttggtatgcagggaaggatctcttgccaaagagaagacacagaccctggccaagtttatccttctctttgctgtgttcgatgagggcaaaagttggcatagcgaaacgaagaattccctcatgcaggatcgcgacgcagccagcgccagagcttggcccaagatgcacactgtgaacggatatgtcaataggacgcttcctggcttgattgggtgtcatcggaaaagtgtctactggcacgtgatcggaatggggacaacaccagaggtccactccatatttctcgaaggccataccttccttgttcgaaaccacagacaggcatccttggggatctctcccattacctttctcactgcccaaacgctccttcgtgacttgggtcagttccttctcttttgccatatcccgtcacaccagcatgatggtatggaagcttatgtgaaagtcgacagttgtcctgaggagccacagttgcgcatgaagaataatgaagaagccgaggattacgacgacgatctcaccgattctgagatggacgtggtgaggtttgatgacgacaactctccctccatcattcaagctcggagcggggcgaagaaacaccccaagacttgggtccactatatagcggcggaagaggaggattgggattacgctcctcttgtattggcaccagatgaccgctcatacaaaagccagtacctcaacaacggaccgcagagaattggccggaagtataagaaagtgcgatttatggcctatacagacgaaacctttaagacaagggaggccatccagcatgagagtgggattttgggacctcttctttacggcgaagttggtgataccctcctcatcatcttcaagaatcaagcttctcgcccctataacatttacccacacgggatcactgacgttaggcctttgtatagcagaagacttcccaaaggcgtgaagcatctcaaagacttccccattttgccaggcgagatctttaagtacaaatggaccattacagtggaagatggaccgactaaatcagaccctcgatgccttacgcggtactattcctccttcgtgaattgggagagagatttggcaagcggactcataggaccactcctcatctgttacaaggaatctgtagaccagaggggtaaccagattatgagtgataaacgcaatgtgatcctttttagcgtcttcgacgagaaccggtcctggtacttgaccgagaatatacaaaggttccttcccaaccccgcaggcgttcagttggaagaccctgagtttcaggccagcaatattatgcactcaatcaacggctatgtgtttgatagtctccagctttctgtttgcctccatgaagtagcctattggtacatcttgtcaattggtgctcaaacagacttcctctccgtcttcttctccggctacacctttaagcacaagggcgtgtatgaggacactctcacactctttccattttctggagaaaccgtgttcatgagcatggagaatccaggcctttggatcttgggttgccacaacagtgattttcgcaatcggggaatgactgctctcctcaaagtcagcagctgtgattggaacacaggcgactattacgaagattcttacgaggacataagtgcctactttgactccaagaataacgccattgagcccagatcattctcccagaatcctcccgtgcttaaaaggcatcagcgcgaaggtaccagaactactcttcagtctgatcaagaggagattgactatgacgacaccattagcgtggaaatgaagaaggaggatttcgatatctatgacgaagatgagaaccagtctccgcggagctttcagaagaagacgcgacactacttcattgcagcagtcgaaaggctttgggactacggtatgtcatcatcccctcatgtgttgcgcaatagagctcagagtggaagtgttccacagttcaagaaagtcgtctttcaagagtttacagatggcagcttcacacagcctctctatcggggcgagcttaacgaacatttgggactccttggtccctatatccgagccgaagtggaggacaacattatggttacctttaggaatcaagcctctcgcccctacagcttctactcctccctcatcagttatgaggaggatcagagacaaggcgctgaaccacggaagaactttgtgaaaccgaatgagacgaagacctacttctggaaagtacagcaccacatggcccccacaaaagacgaattcgattgcaaagcatgggcgtatttttcagacgttgacttggagaaagatgtacattcaggacttattggtcctttgttggtgtgtcacactaacactctcaatccagcccatggcaggcaggtgacagtccaggaattcgctcttttctttaccatctttgatgagaccaagtcctggtacttcacggaaaacatggagcgcaattgcagagccccctgtaacatacagatggaggaccctacctttaaggaaaattatcggttccacgcaatcaacggatacattatggatacactccctggccttgtgatggctcaggaccaacgaatcaggtggtacctcctcagcatgggttctaatgagaacatacactccattcacttttcaggacatgtgttcactgtccggaagaaagaagagtataagatggccctctacaatttgtatccaggcgtgtttgagaccgttgaaatgcttccctctaaagctggcatctggagagtagagtgcttgatcggagaacatcttcacgcaggtatgagcaccttgttcctcgtgtacagcaacaaatgtcagaatccacttggcatggccagtggacacattcgcgactttcagatcacagcatctggccagtatggacaatgggccccaaagttggctcgcctccattactccggtagcataaatgcgtggtccactaaagaacctttcagctggattaaggtcgatcttcttgcccccatgatcatccacggcattaagacacagggagcgaggcagaaattctcctccctctacatctcacagttcattattatgtatagtttggacggcaagaagtggcaaacttatagaggtaacagtactggaacagacatggtgttcttcggcaacgttgatagctctggcatcaaacacaacatctttaatcctcccataatagctcggtacatcagattgcatccgacccactacagcattaggagtacactccgaatggagcttatgggttgcgacttgaattcctgttcaatgccactcggaatggagtctaaagccatctctgatgcacagataaccgccagtagctactttacgaacatgtttgctacgtggtcaccctctaaggcaaggcttcatttgcaaggccggtctaatgcctggagacctcaggtgaacaacccgaaagaatggctccaggtggactttcagaagaccatgaaagtaacaggtgtcactactcagggagttaagtccttggatactagcatgtatgtgaaggagttccttatttcctcatcacaagatggccaccagtggaccctcttctttcagaatggtaaggtcaaagtgtttcagggcaatcaagacagcttcacacccgtggtgaacagtcttgatcctccactcttgacacgataccttcgaatccatccacagtcttgggagcaccagattgcattgcgcatggaagtacttggatgcgaggctcaggacctctac

SEQ ID NO: 1626 - protein, 1457 aa, synthetic construct
  REGION 1..1457: note = Variant of human B-domain deleted Factor VIII
MQIELSTCFFLCLLRFCFSATRRYYLGAVELSWDYMQSDLGELPVDARFPPRVPKSFPFNTSQVYKKTLFVEFTDHLFNIAKPRPPWMGLLGPTIQAEVYDTVSITLKNMASHPVSLHAVGVSYWKASEGAEYDDQTSQREKEDDKVFPGGSHTYVWQVLKENGPMASDPPCLTYSYLSHVDLVKDLNSGLIGALLVCREGSLAKEKTQTLAKFILLFAVFDEGKSWHSETKNSLMQDRDAASARAWPKMHTVNGYVNRTLPGLIGCHRKSVYWHVIGMGTTPEVHSIFLEGHTFLVRNHRQASLGISPITFLTAQTLLRDLGQFLLFCHIPSHQHDGMEAYVKVDSCPEEPQLRMKNNEEAEDYDDDLTDSEMDVVRFDDDNSPSIIQARSGAKKHPKTWVHYIAAEEEDWDYAPLVLAPDDRSYKSQYLNNGPQRIGRKYKKVRFMAYTDETFKTREAIQHESGILGPLLYGEVGDTLLIIFKNQASRPYNIYPHGITDVRPLYSRRLPKGVKHLKDFPILPGEIFKYKWTITVEDGPTKSDPRCLTRYYSSFVNWERDLASGLIGPLLICYKESVDQRGNQIMSDKRNVILFSVFDENRSWYLTENIQRFLPNPAGVQLEDPEFQASNIMHSINGYVFDSLQLSVCLHEVAYWYILSIGAQTDFLSVFFSGYTFKHKGVYEDTLTLFPFSGETVFMSMENPGLWILGCHNSDFRNRGMTALLKVSSCDWNTGDYYEDSYEDISAYFDSKNNAIEPRSFSQNPPVLKRHQREGTRTTLQSDQEEIDYDDTISVEMKKEDFDIYDEDENQSPRSFQKKTRHYFIAAVERLWDYGMSSSPHVLRNRAQSGSVPQFKKVVFQEFTDGSFTQPLYRGELNEHLGLLGPYIRAEVEDNIMVTFRNQASRPYSFYSSLISYEEDQRQGAEPRKNFVKPNETKTYFWKVQHHMAPTKDEFDCKAWAYFSDVDLEKDVHSGLIGPLLVCHTNTLNPAHGRQVTVQEFALFFTIFDETKSWYFTENMERNCRAPCNIQMEDPTFKENYRFHAINGYIMDTLPGLVMAQDQRIRWYLLSMGSNENIHSIHFSGHVFTVRKKEEYKMALYNLYPGVFETVEMLPSKAGIWRVECLIGEHLHAGMSTLFLVYSNKCQNPLGMASGHIRDFQITASGQYGQWAPKLARLHYSGSINAWSTKEPFSWIKVDLLAPMIIHGIKTQGARQKFSSLYISQFIIMYSLDGKKWQTYRGNSTGTDMVFFGNVDSSGIKHNIFNPPIIARYIRLHPTHYSIRSTLRMELMGCDLNSCSMPLGMESKAISDAQITASSYFTNMFATWSPSKARLHLQGRSNAWRPQVNNPKEWLQVDFQKTMKVTGVTTQGVKSLDTSMYVKEFLISSSQDGHQWTLFFQNGKVKVFQGNQDSFTPVVNSLDPPLLTRYLRIHPQSWEHQIALRMEVLGCEAQDLY

SEQ ID NO: 1627 - DNA, 4371 bp, synthetic construct
  misc_feature 1..4371: note = Variant of human B-domain deleted Factor VIII
  source 1..4371: mol_type = other DNA
atgcagattgaactgtctacctgcttcttcctctgtttgctgaggttctgctttagcgccactagacggtactaccttggcgctgtggagctgtcctgggactatatgcagagtgatttgggagagcttcccgtcgacgcacgatttcctcctcgcgttccaaagtcatttccctttaacacaagccaggtgtacaagaagacgctcttcgtcgaattcaccgatcacctgttcaatatcgccaaacccagaccaccatggatgggtcttttggggcctaccatacaagcggaggtgtatgacacagttgttatcactctcaagaacatggcttctcatccggtaagtcttcacgcagtgggcgtgtcctactggaaagcttcagaaggagccgagtatgatgatcagacatcccagagggagaaagaagacgacaaggtatttccaggtgggtctcatacctatgtgtggcaagtgctcaaagagaatggccctatggcaagcgatccgccgtgtttgacttacagctacctttcacacgttgacctcgtcaaggacctcaactccgggttgattggagccttgttggtatgcagggaaggatctcttgccaaagagaagacacagaccctggccaagtttatccttctctttgctgtgttcgatgagggcaaaagttggcatagcgaaacgaagaattccctcatgcaggatcgcgacgcagccagcgccagagcttggcccaagatgcacactgtgaacggatatgtcaataggacgcttcctggcttgattgggtgtcatcggaaaagtgtctactggcacgtgatcggaatggggacaacaccagaggtccactccatatttctcgaaggccataccttccttgttcgaaaccacagacaggcatccttggggatctctcccattacctttctcactgcccaaacgctccttcgtgacttgggtcagttccttctcttttgccatatcccgtcacaccagcatgatggtatggaagcttatgtgaaagtcgacagttgtcctgaggagccacagttgcgcatgaagaataatgaagaagccgaggattacgacgacgatctcaccgattctgagatggacgtggtgaggtttgatgacgacaactctccctccatcattcaagctcggagcggggcgaagaaacaccccaagacttgggtccactatatagcggcggaagaggaggattgggattacgctcctcttgtattggcaccagatgaccgctcatacaaaagccagtacctcaacaacggaccgcagagaattggccggaagtataagaaagtgcgatttatggcctatacagacgaaacctttaagacaagggaggccatccagcatgagagtgggattttgggacctcttctttacggcgaagttggtgataccctcctcatcatcttcaagaatcaagcttctcgcccctataacatttacccacacgggatcactgacgttaggcctttgtatagcagaagacttcccaaaggcgtgaagcatctcaaagacttccccattttgccaggcgagatctttaagtacaaatggaccattacagtggaagatggaccgactaaatcagaccctcgatgccttacgcggtactattcctccttcgtgaattgggagagagatttggcaagcggactcataggaccactcctcatctgttacaaggaatctgtagaccagaggggtaaccagattatgagtgataaacgcaatgtgatcctttttagcgtcttcgacgagaaccggtcctggtacttgaccgagaatatacaaaggttccttgataaccccgcaggcgttcagttggaagaccctgagtttcaggccagcaatattatgcactcaatcaacggctatgtgtttgatagtctccagctttctgtttgcctccatgaagtagcctattggtacatcttgtcaattggtgctcaaacagacttcctctccgtcttcttctccggctacacctttaagcacaagggcgtgtatgaggacactctcacactctttccattttctggagaaaccgtgttcatgagcatggagaatccaggcctttggatcttgggttgccacaacagtgattttcgcaatcggggaatgactgctctcctcaaagtcagcagctgtgattggaacacaggcgactattacgaagattcttacgaggacataagtgcctactttgactccaagaataacgccattgagcccagatcattctcccagaatcctcccgtgcttaaaaggcatcagcgcgaaggtaccagaactactcttcagtctgatcaagaggagattgactatgacgacaccattagcgtggaaatgaagaaggaggatttcgatatctatgacgaagatgagaaccagtctccgcggagctttcagaagaagacgcgacactacttcattgcagcagtcgaaaggctttgggactacggtatgtcatcatcccctcatgtgttgcgcaatagagctcagagtggaagtgttccacagttcaagaaagtcgtctttcaagagtttacagatggcagcttcacacagcctctctatcggggcgagcttaacgaacatttgggactccttggtccctatatccgagccgaagtggaggacaacattatggttacctttaggaatcaagcctctcgcccctacagcttctactcctccctcatcagttatgaggaggatcagagacaaggcgctgaaccacggaagaactttgtgaaaccgaatgagacgaagacctacttctggaaagtacagcaccacatggcccccacaaaagacgaattcgattgcaaagcatgggcgtatttttcagacgttgacttggagaaagatgtacattcaggacttattggtcctttgttggtgtgtcacactaacactctcaatccagcccatggcaggcaggtgacagtccaggaattcgctcttttctttaccatctttgatgagaccaagtcctggtacttcacggaaaacatggagcgcaattgcagagccccctgtaacatacagatggaggaccctacctttaaggaaaattatcggttccacgcaatcaacggatacattatggatacactccctggccttgtgatggctcaggaccaacgaatcaggtggtacctcctcagcatgggttctaatgagaacatacactccattcacttttcaggacatgtgttcactgtccggaagaaagaagagtataagatggccctctacaatttgtatccaggcgtgtttgagaccgttgaaatgcttccctctaaagctggcatctggagagtagagtgcttgatcggagaacatcttcacgcaggtatgagcaccttgttcctcgtgtacagcaacaaatgtcagaatccacttggcatggccagtggacacattcgcgactttcagatcacagcatctggccagtatggacaatgggccccaaagttggctcgcctccattactccggtagcataaatgcgtggtccactaaagaacctttcagctggattaaggtcgatcttcttgcccccatgatcatccacggcattaagacacagggagcgaggcagaaattctcctccctctacatctcacagttcattattatgtatagtttggacggcaagaagtggcaaacttatagaggtaacagtactggaacagacatggtgttcttcggcaacgttgatagctctggcatcaaacacaacatctttaatcctcccataatagctcggtacatcagattgcatccgacccactacagcattaggagtacactccgaatggagcttatgggttgcgacttgaattcctgttcaatgccactcggaatggagtctaaagccatctctgatgcacagataaccgccagtagctactttacgaacatgtttgctacgtggtcaccctctaaggcaaggcttcatttgcaaggccggtctaatgcctggagacctcaggtgaacaacccgaaagaatggctccaggtggactttcagaagaccatgaaagtaacaggtgtcactactcagggagttaagtccttggatactagcatgtatgtgaaggagttccttatttcctcatcacaagatggccaccagtggaccctcttctttcagaatggtaaggtcaaagtgtttcagggcaatcaagacagcttcacacccgtggtgaacagtcttgatcctccactcttgacacgataccttcgaatccatccacagtcttgggagcaccagattgcattgcgcatggaagtacttggatgcgaggctcaggacctctac

SEQ ID NO: 1628 - protein, 1457 aa, synthetic construct
  REGION 1..1457: note = Variant of human B-domain deleted Factor VIII
MQIELSTCFFLCLLRFCFSATRRYYLGAVELSWDYMQSDLGELPVDARFPPRVPKSFPFNTSQVYKKTLFVEFTDHLFNIAKPRPPWMGLLGPTIQAEVYDTVVITLKNMASHPVSLHAVGVSYWKASEGAEYDDQTSQREKEDDKVFPGGSHTYVWQVLKENGPMASDPPCLTYSYLSHVDLVKDLNSGLIGALLVCREGSLAKEKTQTLAKFILLFAVFDEGKSWHSETKNSLMQDRDAASARAWPKMHTVNGYVNRTLPGLIGCHRKSVYWHVIGMGTTPEVHSIFLEGHTFLVRNHRQASLGISPITFLTAQTLLRDLGQFLLFCHIPSHQHDGMEAYVKVDSCPEEPQLRMKNNEEAEDYDDDLTDSEMDVVRFDDDNSPSIIQARSGAKKHPKTWVHYIAAEEEDWDYAPLVLAPDDRSYKSQYLNNGPQRIGRKYKKVRFMAYTDETFKTREAIQHESGILGPLLYGEVGDTLLIIFKNQASRPYNIYPHGITDVRPLYSRRLPKGVKHLKDFPILPGEIFKYKWTITVEDGPTKSDPRCLTRYYSSFVNWERDLASGLIGPLLICYKESVDQRGNQIMSDKRNVILFSVFDENRSWYLTENIQRFLDNPAGVQLEDPEFQASNIMHSINGYVFDSLQLSVCLHEVAYWYILSIGAQTDFLSVFFSGYTFKHKGVYEDTLTLFPFSGETVFMSMENPGLWILGCHNSDFRNRGMTALLKVSSCDWNTGDYYEDSYEDISAYFDSKNNAIEPRSFSQNPPVLKRHQREGTRTTLQSDQEEIDYDDTISVEMKKEDFDIYDEDENQSPRSFQKKTRHYFIAAVERLWDYGMSSSPHVLRNRAQSGSVPQFKKVVFQEFTDGSFTQPLYRGELNEHLGLLGPYIRAEVEDNIMVTFRNQASRPYSFYSSLISYEEDQRQGAEPRKNFVKPNETKTYFWKVQHHMAPTKDEFDCKAWAYFSDVDLEKDVHSGLIGPLLVCHTNTLNPAHGRQVTVQEFALFFTIFDETKSWYFTENMERNCRAPCNIQMEDPTFKENYRFHAINGYIMDTLPGLVMAQDQRIRWYLLSMGSNENIHSIHFSGHVFTVRKKEEYKMALYNLYPGVFETVEMLPSKAGIWRVECLIGEHLHAGMSTLFLVYSNKCQNPLGMASGHIRDFQITASGQYGQWAPKLARLHYSGSINAWSTKEPFSWIKVDLLAPMIIHGIKTQGARQKFSSLYISQFIIMYSLDGKKWQTYRGNSTGTDMVFFGNVDSSGIKHNIFNPPIIARYIRLHPTHYSIRSTLRMELMGCDLNSCSMPLGMESKAISDAQITASSYFTNMFATWSPSKARLHLQGRSNAWRPQVNNPKEWLQVDFQKTMKVTGVTTQGVKSLDTSMYVKEFLISSSQDGHQWTLFFQNGKVKVFQGNQDSFTPVVNSLDPPLLTRYLRIHPQSWEHQIALRMEVLGCEAQDLY

SEQ ID NO: 1629 - DNA, 4371 bp, synthetic construct
  misc_feature 1..4371: note = Variant of human B-domain deleted Factor VIII
  source 1..4371: mol_type = other DNA
atgcagattgaactgtctacctgcttcttcctctgtttgctgaggttctgctttagcgccactagacggtactaccttggcgctgtggagctgtcctgggactatatgcagagtgatttgggagagcttcccgtcgacgcacgatttcctcctcgcgttccaaagtcatttccctttaacacaagccaggtgtacaagaagacgctcttcgtcgaattcaccgatcacctgttcaatatcgccaaacccagaccaccatggatgggtcttttggggcctaccatacaagcggaggtgtatgacacagttgttatcactctcaagaacatggcttctcatccggtaagtcttcacgcagtgggcgtgtcctactggaaagcttcagaaggagccgagtatgatgatcagacatcccagagggagaaagaagacgacaaggtatttccaggtgggtctcatacctatgtgtggcaagtgctcaaagagaatggccctatggcaagcgatccgccgtgtttgacttacagctacctttcacacgttgacctcgtcaaggacctcaactccgggttgattggagccttgttggtatgcagggaaggatctcttgccaaagagaagacacagaccctggccaagtttatccttctctttgctgtgttcgatgagggcaaaagttggcatagcgaaacgaagaattccctcatgcaggatcgcgacgcagccagcgccagagcttggcccaagatgcacactgtgaacggatatgtcaataggacgcttcctggcttgattgggtgtcatcggaaaagtgtctactggcacgtgatcggaatggggacaacaccagaggtccactccatatttctcgaaggccataccttccttgttcgaaaccacagacaggcatccttggggatctctcccattacctttctcactgcccaaacgctccttcgtgacttgggtcagttccttctcttttgccatatcccgtcacaccagcatgatggtatggaagcttatgtgaaagtcgacagttgtcctgaggagccacagttgcgcatgaagaataatgaagaagccgaggattacgacgacgatctcaccgattctgagatggacgtggtgaggtttgatgacgacaactctccctccatcattcaagctcggagcggggcgaagaaacaccccaagacttgggtccactatatagcggcggaagaggaggattgggattacgctcctcttgtattggcaccagatgaccgctcatacaaaagccagtacctcaacaacggaccgcagagaattggccggaagtataagaaagtgcgatttatggcctatacagacgaaacctttaagacaagggaggccatccagcatgagagtgggattttgggacctcttctttacggcgaagttggtgataccctcctcatcatcttcaagaatcaagcttctcgcccctataacatttacccacacgggatcactgacgttaggcctttgtatagcagaagacttcccaaaggcgtgaagcatctcaaagacttccccattttgccaggcgagatctttaagtacaaatggaccattacagtggaagatggaccgactaaatcagaccctcgatgccttacgcggtactattcctccttcgtgaattgggagagagatttggcaagcggactcataggaccactcctcatctgttacaaggaatctgtagaccagaggggtaaccagattatgagtgataaacgcaatgtgatcctttttagcgtcttcgacgagaaccggtcctggtacttgaccgagaatagtcaaaggttccttcccaaccccgcaggcgttcagttggaagaccctgagtttcaggccagcaatattatgcactcaatcaacggctatgtgtttgatagtctccagctttctgtttgcctccatgaagtagcctattggtacatcttgtcaattggtgctcaaacagacttcctctccgtcttcttctccggctacacctttaagcacaagggcgtgtatgaggacactctcacactctttccattttctggagaaaccgtgttcatgagcatggagaatccaggcctttggatcttgggttgccacaacagtgattttcgcaatcggggaatgactgctctcctcaaagtcagcagctgtgattggaacacaggcgactattacgaagattcttacgaggacataagtgcctactttgactccaagaataacgccattgagcccagatcattctcccagaatcctcccgtgcttaaaaggcatcagcgcgaaggtaccagaactactcttcagtctgatcaagaggagattgactatgacgacaccattagcgtggaaatgaagaaggaggatttcgatatctatgacgaagatgagaaccagtctccgcggagctttcagaagaagacgcgacactacttcattgcagcagtcgaaaggctttgggactacggtatgtcatcatcccctcatgtgttgcgcaatagagctcagagtggaagtgttccacagttcaagaaagtcgtctttcaagagtttacagatggcagcttcacacagcctctctatcggggcgagcttaacgaacatttgggactccttggtccctatatccgagccgaagtggaggacaacattatggttacctttaggaatcaagcctctcgcccctacagcttctactcctccctcatcagttatgaggaggatcagagacaaggcgctgaaccacggaagaactttgtgaaaccgaatgagacgaagacctacttctggaaagtacagcaccacatggcccccacaaaagacgaattcgattgcaaagcatgggcgtatttttcagacgttgacttggagaaagatgtacattcaggacttattggtcctttgttggtgtgtcacactaacactctcaatccagcccatggcaggcaggtgacagtccaggaattcgctcttttctttaccatctttgatgagaccaagtcctggtacttcacggaaaacatggagcgcaattgcagagccccctgtaacatacagatggaggaccctacctttaaggaaaattatcggttccacgcaatcaacggatacattatggatacactccctggccttgtgatggctcaggaccaacgaatcaggtggtacctcctcagcatgggttctaatgagaacatacactccattcacttttcaggacatgtgttcactgtccggaagaaagaagagtataagatggccctctacaatttgtatccaggcgtgtttgagaccgttgaaatgcttccctctaaagctggcatctggagagtagagtgcttgatcggagaacatcttcacgcaggtatgagcaccttgttcctcgtgtacagcaacaaatgtcagaatccacttggcatggccagtggacacattcgcgactttcagatcacagcatctggccagtatggacaatgggccccaaagttggctcgcctccattactccggtagcataaatgcgtggtccactaaagaacctttcagctggattaaggtcgatcttcttgcccccatgatcatccacggcattaagacacagggagcgaggcagaaattctcctccctctacatctcacagttcattattatgtatagtttggacggcaagaagtggcaaacttatagaggtaacagtactggaacagacatggtgttcttcggcaacgttgatagctctggcatcaaacacaacatctttaatcctcccataatagctcggtacatcagattgcatccgacccactacagcattaggagtacactccgaatggagcttatgggttgcgacttgaattcctgttcaatgccactcggaatggagtctaaagccatctctgatgcacagataaccgccagtagctactttacgaacatgtttgctacgtggtcaccctctaaggcaaggcttcatttgcaaggccggtctaatgcctggagacctcaggtgaacaacccgaaagaatggctccaggtggactttcagaagaccatgaaagtaacaggtgtcactactcagggagttaagtccttggatactagcatgtatgtgaaggagttccttatttcctcatcacaagatggccaccagtggaccctcttctttcagaatggtaaggtcaaagtgtttcagggcaatcaagacagcttcacacccgtggtgaacagtcttgatcctccactcttgacacgataccttcgaatccatccacagtcttgggagcaccagattgcattgcgcatggaagtacttggatgcgaggctcaggacctctac

SEQ ID NO: 1630 - protein, 1457 aa, synthetic construct
  REGION 1..1457: note = Variant of human B-domain deleted Factor VIII
MQIELSTCFFLCLLRFCFSATRRYYLGAVELSWDYMQSDLGELPVDARFPPRVPKSFPFNTSQVYKKTLFVEFTDHLFNIAKPRPPWMGLLGPTIQAEVYDTVVITLKNMASHPVSLHAVGVSYWKASEGAEYDDQTSQREKEDDKVFPGGSHTYVWQVLKENGPMASDPPCLTYSYLSHVDLVKDLNSGLIGALLVCREGSLAKEKTQTLAKFILLFAVFDEGKSWHSETKNSLMQDRDAASARAWPKMHTVNGYVNRTLPGLIGCHRKSVYWHVIGMGTTPEVHSIFLEGHTFLVRNHRQASLGISPITFLTAQTLLRDLGQFLLFCHIPSHQHDGMEAYVKVDSCPEEPQLRMKNNEEAEDYDDDLTDSEMDVVRFDDDNSPSIIQARSGAKKHPKTWVHYIAAEEEDWDYAPLVLAPDDRSYKSQYLNNGPQRIGRKYKKVRFMAYTDETFKTREAIQHESGILGPLLYGEVGDTLLIIFKNQASRPYNIYPHGITDVRPLYSRRLPKGVKHLKDFPILPGEIFKYKWTITVEDGPTKSDPRCLTRYYSSFVNWERDLASGLIGPLLICYKESVDQRGNQIMSDKRNVILFSVFDENRSWYLTENSQRFLPNPAGVQLEDPEFQASNIMHSINGYVFDSLQLSVCLHEVAYWYILSIGAQTDFLSVFFSGYTFKHKGVYEDTLTLFPFSGETVFMSMENPGLWILGCHNSDFRNRGMTALLKVSSCDWNTGDYYEDSYEDISAYFDSKNNAIEPRSFSQNPPVLKRHQREGTRTTLQSDQEEIDYDDTISVEMKKEDFDIYDEDENQSPRSFQKKTRHYFIAAVERLWDYGMSSSPHVLRNRAQSGSVPQFKKVVFQEFTDGSFTQPLYRGELNEHLGLLGPYIRAEVEDNIMVTFRNQASRPYSFYSSLISYEEDQRQGAEPRKNFVKPNETKTYFWKVQHHMAPTKDEFDCKAWAYFSDVDLEKDVHSGLIGPLLVCHTNTLNPAHGRQVTVQEFALFFTIFDETKSWYFTENMERNCRAPCNIQMEDPTFKENYRFHAINGYIMDTLPGLVMAQDQRIRWYLLSMGSNENIHSIHFSGHVFTVRKKEEYKMALYNLYPGVFETVEMLPSKAGIWRVECLIGEHLHAGMSTLFLVYSNKCQNPLGMASGHIRDFQITASGQYGQWAPKLARLHYSGSINAWSTKEPFSWIKVDLLAPMIIHGIKTQGARQKFSSLYISQFIIMYSLDGKKWQTYRGNSTGTDMVFFGNVDSSGIKHNIFNPPIIARYIRLHPTHYSIRSTLRMELMGCDLNSCSMPLGMESKAISDAQITASSYFTNMFATWSPSKARLHLQGRSNAWRPQVNNPKEWLQVDFQKTMKVTGVTTQGVKSLDTSMYVKEFLISSSQDGHQWTLFFQNGKVKVFQGNQDSFTPVVNSLDPPLLTRYLRIHPQSWEHQIALRMEVLGCEAQDLY

SEQ ID NO: 1631 - DNA, 4371 bp, synthetic construct
  misc_feature 1..4371: note = Variant of human B-domain deleted Factor VIII
  source 1..4371: mol_type = other DNA
atgcagattgaactgtctacctgcttcttcctctgtttgctgaggttctgctttagcgccactagacggtactaccttggcgctgtggagctgtcctgggactatatgcagagtgatttgggagagcttcccgtcgacgcacgatttcctcctcgcgttccaaagtcatttccctttaacacaagccaggtgtacaagaagacgctcttcgtcgaattcaccgatcacctgttcaatatcgccaaacccagaccaccatggatgggtcttttggggcctaccatacaagcggaggtgtatgacacagttgttatcactctcaagaacatggcttctcatccggtaagtcttcacgcagtgggcgtgtcctactggaaagcttcagaaggagccgagtatgatgatcagacatcccagagggagaaagaagacgacaaggtatttccaggtgggtctcatacctatgtgtggcaagtgctcaaagagaatggccctatggcaagcgatccgccgtgtttgacttacagctacctttcacacgttgacctcgtcaaggacctcaactccgggttgattggagccttgttggtatgcagggaaggatctcttgccaaagagaagacacagaccctggccaagtttatccttctctttgctgtgttcgatgagggcaaaagttggcatagcgaaacgaagaattccctcatgcaggatcgcgacgcagccagcgccagagcttggcccaagatgcacactgtgaacggatatgtcaataggacgcttcctggcttgattgggtgtcatcggaaaagtgtctactggcacgtgatcggaatggggacaacaccagaggtccactccatatttctcgaaggccataccttccttgttcgaaaccacagacaggcatccttggggatctctcccattacctttctcactgcccaaacgctccttcgtgacttgggtcagttccttctcttttgccatatcccgtcacaccagcatgatggtatggaagcttatgtgaaagtcgacagttgtcctgaggagccacagttgcgcatgaagaataatgaagaagccgaggattacgacgacgatctcaccgattctgagatggacgtggtgaggtttgatgacgacaactctccctccatcattcaagctcggagcggggcgaagaaacaccccaagacttgggtccactatatagcggcggaagaggaggattgggattacgctcctcttgtattggcaccagatgaccgctcatacaaaagccagtacctcaacaacggaccgcagagaattggccggaagtataagaaagtgcgatttatggcctatacagacgaaacctttaagacaagggaggccatccagcatgagagtgggattttgggacctcttctttacggcgaagttggtgataccctcctcatcatcttcaagaatcaagcttctcgcccctataacatttacccacacgggatcactgacgttaggcctttgtatagcagaagacttcccaaaggcgtgaagcatctcaaagacttccccattttgccaggcgagatctttaagtacaaatggaccattacagtggaagatggaccgactaaatcagaccctcgatgccttacgcggtactattcctccttcgtgaattgggagagagatttggcaagcggactcataggaccactcctcatctgttacaaggaatctgtagaccagaggggtaaccagattatgagtgataaacgcaatgtgatcctttttagcgtcttcgacgagaaccggtcctggtacttgaccgagaataaacaaaggttccttcccaaccccgcaggcgttcagttggaagaccctgagtttcaggccagcaatattatgcactcaatcaacggctatgtgtttgatagtctccagctttctgtttgcctccatgaagtagcctattggtacatcttgtcaattggtgctcaaacagacttcctctccgtcttcttctccggctacacctttaagcacaagggcgtgtatgaggacactctcacactctttccattttctggagaaaccgtgttcatgagcatggagaatccaggcctttggatcttgggttgccacaacagtgattttcgcaatcggggaatgactgctctcctcaaagtcagcagctgtgattggaacacaggcgactattacgaagattcttacgaggacataagtgcctactttgactccaagaataacgccattgagcccagatcattctcccagaatcctcccgtgcttaaaaggcatcagcgcgaaggtaccagaactactcttcagtctgatcaagaggagattgactatgacgacaccattagcgtggaaatgaagaaggaggatttcgatatctatgacgaagatgagaaccagtctccgcggagctttcagaagaagacgcgacactacttcattgcagcagtcgaaaggctttgggactacggtatgtcatcatcccctcatgtgttgcgcaatagagctcagagtggaagtgttccacagttcaagaaagtcgtctttcaagagtttacagatggcagcttcacacagcctctctatcggggcgagcttaacgaacatttgggactccttggtccctatatccgagccgaagtggaggacaacattatggttacctttaggaatcaagcctctcgcccctacagcttctactcctccctcatcagttatgaggaggatcagagacaaggcgctgaaccacggaagaactttgtgaaaccgaatgagacgaagacctacttctggaaagtacagcaccacatggcccccacaaaagacgaattcgattgcaaagcatgggcgtatttttcagacgttgacttggagaaagatgtacattcaggacttattggtcctttgttggtgtgtcacactaacactctcaatccagcccatggcaggcaggtgacagtccaggaattcgctcttttctttaccatctttgatgagaccaagtcctggtacttcacggaaaacatggagcgcaattgcagagccccctgtaacatacagatggaggaccctacctttaaggaaaattatcggttccacgcaatcaacggatacattatggatacactccctggccttgtgatggctcaggaccaacgaatcaggtggtacctcctcagcatgggttctaatgagaacatacactccattcacttttcaggacatgtgttcactgtccggaagaaagaagagtataagatggccctctacaatttgtatccaggcgtgtttgagaccgttgaaatgcttccctctaaagctggcatctggagagtagagtgcttgatcggagaacatcttcacgcaggtatgagcaccttgttcctcgtgtacagcaacaaatgtcagaatccacttggcatggccagtggacacattcgcgactttcagatcacagcatctggccagtatggacaatgggccccaaagttggctcgcctccattactccggtagcataaatgcgtggtccactaaagaacctttcagctggattaaggtcgatcttcttgcccccatgatcatccacggcattaagacacagggagcgaggcagaaattctcctccctctacatctcacagttcattattatgtatagtttggacggcaagaagtggcaaacttatagaggtaacagtactggaacagacatggtgttcttcggcaacgttgatagctctggcatcaaacacaacatctttaatcctcccataatagctcggtacatcagattgcatccgacccactacagcattaggagtacactccgaatggagcttatgggttgcgacttgaattcctgttcaatgccactcggaatggagtctaaagccatctctgatgcacagataaccgccagtagctactttacgaacatgtttgctacgtggtcaccctctaaggcaaggcttcatttgcaaggccggtctaatgcctggagacctcaggtgaacaacccgaaagaatggctccaggtggactttcagaagaccatgaaagtaacaggtgtcactactcagggagttaagtccttggatactagcatgtatgtgaaggagttccttatttcctcatcacaagatggccaccagtggaccctcttctttcagaatggtaaggtcaaagtgtttcagggcaatcaagacagcttcacacccgtggtgaacagtcttgatcctccactcttgacacgataccttcgaatccatccacagtcttgggagcaccagattgcattgcgcatggaagtacttggatgcgaggctcaggacctctac

SEQ ID NO: 1632 - protein, 1457 aa, synthetic construct
  REGION 1..1457: note = Variant of human B-domain deleted Factor VIII
MQIELSTCFFLCLLRFCFSATRRYYLGAVELSWDYMQSDLGELPVDARFPPRVPKSFPFNTSQVYKKTLFVEFTDHLFNIAKPRPPWMGLLGPTIQAEVYDTVVITLKNMASHPVSLHAVGVSYWKASEGAEYDDQTSQREKEDDKVFPGGSHTYVWQVLKENGPMASDPPCLTYSYLSHVDLVKDLNSGLIGALLVCREGSLAKEKTQTLAKFILLFAVFDEGKSWHSETKNSLMQDRDAASARAWPKMHTVNGYVNRTLPGLIGCHRKSVYWHVIGMGTTPEVHSIFLEGHTFLVRNHRQASLGISPITFLTAQTLLRDLGQFLLFCHIPSHQHDGMEAYVKVDSCPEEPQLRMKNNEEAEDYDDDLTDSEMDVVRFDDDNSPSIIQARSGAKKHPKTWVHYIAAEEEDWDYAPLVLAPDDRSYKSQYLNNGPQRIGRKYKKVRFMAYTDETFKTREAIQHESGILGPLLYGEVGDTLLIIFKNQASRPYNIYPHGITDVRPLYSRRLPKGVKHLKDFPILPGEIFKYKWTITVEDGPTKSDPRCLTRYYSSFVNWERDLASGLIGPLLICYKESVDQRGNQIMSDKRNVILFSVFDENRSWYLTENKQRFLPNPAGVQLEDPEFQASNIMHSINGYVFDSLQLSVCLHEVAYWYILSIGAQTDFLSVFFSGYTFKHKGVYEDTLTLFPFSGETVFMSMENPGLWILGCHNSDFRNRGMTALLKVSSCDWNTGDYYEDSYEDISAYFDSKNNAIEPRSFSQNPPVLKRHQREGTRTTLQSDQEEIDYDDTISVEMKKEDFDIYDEDENQSPRSFQKKTRHYFIAAVERLWDYGMSSSPHVLRNRAQSGSVPQFKKVVFQEFTDGSFTQPLYRGELNEHLGLLGPYIRAEVEDNIMVTFRNQASRPYSFYSSLISYEEDQRQGAEPRKNFVKPNETKTYFWKVQHHMAPTKDEFDCKAWAYFSDVDLEKDVHSGLIGPLLVCHTNTLNPAHGRQVTVQEFALFFTIFDETKSWYFTENMERNCRAPCNIQMEDPTFKENYRFHAINGYIMDTLPGLVMAQDQRIRWYLLSMGSNENIHSIHFSGHVFTVRKKEEYKMALYNLYPGVFETVEMLPSKAGIWRVECLIGEHLHAGMSTLFLVYSNKCQNPLGMASGHIRDFQITASGQYGQWAPKLARLHYSGSINAWSTKEPFSWIKVDLLAPMIIHGIKTQGARQKFSSLYISQFIIMYSLDGKKWQTYRGNSTGTDMVFFGNVDSSGIKHNIFNPPIIARYIRLHPTHYSIRSTLRMELMGCDLNSCSMPLGMESKAISDAQITASSYFTNMFATWSPSKARLHLQGRSNAWRPQVNNPKEWLQVDFQKTMKVTGVTTQGVKSLDTSMYVKEFLISSSQDGHQWTLFFQNGKVKVFQGNQDSFTPVVNSLDPPLLTRYLRIHPQSWEHQIALRMEVLGCEAQDLY

SEQ ID NO: 1633 - DNA, 4371 bp, synthetic construct
  misc_feature 1..4371: note = Variant of human B-domain deleted Factor VIII
  source 1..4371: mol_type = other DNA
atgcagattgaactgtctacctgcttcttcctctgtttgctgaggttctgctttagcgccactagacggtactaccttggcgctgtggagctgtcctgggactatatgcagagtgatttgggagagcttcccgtcgacgcacgatttcctcctcgcgttccaaagtcatttccctttaacacaagccaggtgtacaagaagacgctcttcgtcgaattcaccgatcacctgttcaatatcgccaaacccagaccaccatggatgggtcttttggggcctaccatacaagcggaggtgtatgacacagttgttatcactctcaagaacatggcttctcatccggtaagtcttcacgcagtgggcgtgtcctactggaaagcttcagaaggagccgagtatgatgatcagacatcccagagggagaaagaagacgacaaggtatttccaggtgggtctcatacctatgtgtggcaagtgctcaaagagaatggccctatggcaagcgatccgccgtgtttgacttacagctacctttcacacgttgacctcgtcaaggacctcaactccgggttgattggagccttgttggtatgcagggaaggatctcttgccaaagagaagacacagaccctggccaagtttatccttctctttgctgtgttcgatgagggcaaaagttggcatagcgaaacgaagaattccctcatgcaggatcgcgacgcagccagcgccagagcttggcccaagatgcacactgtgaacggatatgtcaataggacgcttcctggcttgattgggtgtcatcggaaaagtgtctactggcacgtgatcggaatggggacaacaccagaggtccactccatatttctcgaaggccataccttccttgttcgaaaccacagacaggcatccttggggatctctcccattacctttctcactgcccaaacgctccttcgtgacttgggtcagttccttctcttttgccatatcccgtcacaccagcatgatggtatggaagcttatgtgaaagtcgacagttgtcctgaggagccacagttgcgcatgaagaataatgaagaagccgaggattacgacgacgatctcaccgattctgagatggacgtggtgaggtttgatgacgacaactctccctccatcattcaagctcggagcggggcgaagaaacaccccaagacttgggtccactatatagcggcggaagaggaggattgggattacgctcctcttgtattggcaccagatgaccgctcatacaaaagccagtacctcaacaacggaccgcagagaattggccggaagtataagaaagtgcgatttatggcctatacagacgaaacctttaagacaagggaggccatccagcatgagagtgggattttgggacctcttctttacggcgaagttggtgataccctcctcatcatcttcaagaatcaagcttctcgcccctataacatttacccacacgggatcactgacgttaggcctttgtatagcagaagacttcccaaaggcgtgaagcatctcaaagacttccccattttgccaggcgagatctttaagtacaaatggaccattacagtggaagatggaccgactaaatcagaccctcgatgccttacgcggtactattcctccttcgtgaattgggagagagatttggcaagcggactcataggaccactcctcatctgttacaaggaatctgtagaccagaggggtaaccagattatgagtgataaacgcaatgtgatcctttttagcgtcttcgacgagaaccggtcctggtacttgaccgagaatacccaaaggttccttcccaaccccgcaggcgttcagttggaagaccctgagtttcaggccagcaatattatgcactcaatcaacggctatgtgtttgatagtctccagctttctgtttgcctccatgaagtagcctattggtacatcttgtcaattggtgctcaaacagacttcctctccgtcttcttctccggctacacctttaagcacaagggcgtgtatgaggacactctcacactctttccattttctggagaaaccgtgttcatgagcatggagaatccaggcctttggatcttgggttgccacaacagtgattttcgcaatcggggaatgactgctctcctcaaagtcagcagctgtgattggaacacaggcgactattacgaagattcttacgaggacataagtgcctactttgactccaagaataacgccattgagcccagatcattctcccagaatcctcccgtgcttaaaaggcatcagcgcgaaggtaccagaactactcttcagtctgatcaagaggagattgactatgacgacaccattagcgtggaaatgaagaaggaggatttcgatatctatgacgaagatgagaaccagtctccgcggagctttcagaagaagacgcgacactacttcattgcagcagtcgaaaggctttgggactacggtatgtcatcatcccctcatgtgttgcgcaatagagctcagagtggaagtgttccacagttcaagaaagtcgtctttcaagagtttacagatggcagcttcacacagcctctctatcggggcgagcttaacgaacatttgggactccttggtccctatatccgagccgaagtggaggacaacattatggttacctttaggaatcaagcctctcgcccctacagcttctactcctccctcatcagttatgaggaggatcagagacaaggcgctgaaccacggaagaactttgtgaaaccgaatgagacgaagacctacttctggaaagtacagcaccacatggcccccacaaaagacgaattcgattgcaaagcatgggcgtatttttcagacgttgacttggagaaagatgtacattcaggacttattggtcctttgttggtgtgtcacactaacactctcaatccagcccatggcaggcaggtgacagtccaggaattcgctcttttctttaccatctttgatgagaccaagtcctggtacttcacggaaaacatggagcgcaattgcagagccccctgtaacatacagatggaggaccctacctttaaggaaaattatcggttccacgcaatcaacggatacattatggatacactccctggccttgtgatggctcaggaccaacgaatcaggtggtacctcctcagcatgggttctaatgagaacatacactccattcacttttcaggacatgtgttcactgtccggaagaaagaagagtataagatggccctctacaatttgtatccaggcgtgtttgagaccgttgaaatgcttccctctaaagctggcatctggagagtagagtgcttgatcggagaacatcttcacgcaggtatgagcaccttgttcctcgtgtacagcaacaaatgtcagaatccacttggcatggccagtggacacattcgcgactttcagatcacagcatctggccagtatggacaatgggccccaaagttggctcgcctccattactccggtagcataaatgcgtggtccactaaagaacctttcagctggattaaggtcgatcttcttgcccccatgatcatccacggcattaagacacagggagcgaggcagaaattctcctccctctacatctcacagttcattattatgtatagtttggacggcaagaagtggcaaacttatagaggtaacagtactggaacagacatggtgttcttcggcaacgttgatagctctggcatcaaacacaacatctttaatcctcccataatagctcggtacatcagattgcatccgacccactacagcattaggagtacactccgaatggagcttatgggttgcgacttgaattcctgttcaatgccactcggaatggagtctaaagccatctctgatgcacagataaccgccagtagctactttacgaacatgtttgctacgtggtcaccctctaaggcaaggcttcatttgcaaggccggtctaatgcctggagacctcaggtgaacaacccgaaagaatggctccaggtggactttcagaagaccatgaaagtaacaggtgtcactactcagggagttaagtccttggatactagcatgtatgtgaaggagttccttatttcctcatcacaagatggccaccagtggaccctcttctttcagaatggtaaggtcaaagtgtttcagggcaatcaagacagcttcacacccgtggtgaacagtcttgatcctccactcttgacacgataccttcgaatccatccacagtcttgggagcaccagattgcattgcgcatggaagtacttggatgcgaggctcaggacctctac

SEQ ID NO: 1634 - protein, 1457 aa, synthetic construct
  REGION 1..1457: note = Variant of human B-domain deleted Factor VIII
MQIELSTCFFLCLLRFCFSATRRYYLGAVELSWDYMQSDLGELPVDARFPPRVPKSFPFNTSQVYKKTLFVEFTDHLFNIAKPRPPWMGLLGPTIQAEVYDTVVITLKNMASHPVSLHAVGVSYWKASEGAEYDDQTSQREKEDDKVFPGGSHTYVWQVLKENGPMASDPPCLTYSYLSHVDLVKDLNSGLIGALLVCREGSLAKEKTQTLAKFILLFAVFDEGKSWHSETKNSLMQDRDAASARAWPKMHTVNGYVNRTLPGLIGCHRKSVYWHVIGMGTTPEVHSIFLEGHTFLVRNHRQASLGISPITFLTAQTLLRDLGQFLLFCHIPSHQHDGMEAYVKVDSCPEEPQLRMKNNEEAEDYDDDLTDSEMDVVRFDDDNSPSIIQARSGAKKHPKTWVHYIAAEEEDWDYAPLVLAPDDRSYKSQYLNNGPQRIGRKYKKVRFMAYTDETFKTREAIQHESGILGPLLYGEVGDTLLIIFKNQASRPYNIYPHGITDVRPLYSRRLPKGVKHLKDFPILPGEIFKYKWTITVEDGPTKSDPRCLTRYYSSFVNWERDLASGLIGPLLICYKESVDQRGNQIMSDKRNVILFSVFDENRSWYLTENTQRFLPNPAGVQLEDPEFQASNIMHSINGYVFDSLQLSVCLHEVAYWYILSIGAQTDFLSVFFSGYTFKHKGVYEDTLTLFPFSGETVFMSMENPGLWILGCHNSDFRNRGMTALLKVSSCDWNTGDYYEDSYEDISAYFDSKNNAIEPRSFSQNPPVLKRHQREGTRTTLQSDQEEIDYDDTISVEMKKEDFDIYDEDENQSPRSFQKKTRHYFIAAVERLWDYGMSSSPHVLRNRAQSGSVPQFKKVVFQEFTDGSFTQPLYRGELNEHLGLLGPYIRAEVEDNIMVTFRNQASRPYSFYSSLISYEEDQRQGAEPRKNFVKPNETKTYFWKVQHHMAPTKDEFDCKAWAYFSDVDLEKDVHSGLIGPLLVCHTNTLNPAHGRQVTVQEFALFFTIFDETKSWYFTENMERNCRAPCNIQMEDPTFKENYRFHAINGYIMDTLPGLVMAQDQRIRWYLLSMGSNENIHSIHFSGHVFTVRKKEEYKMALYNLYPGVFETVEMLPSKAGIWRVECLIGEHLHAGMSTLFLVYSNKCQNPLGMASGHIRDFQITASGQYGQWAPKLARLHYSGSINAWSTKEPFSWIKVDLLAPMIIHGIKTQGARQKFSSLYISQFIIMYSLDGKKWQTYRGNSTGTDMVFFGNVDSSGIKHNIFNPPIIARYIRLHPTHYSIRSTLRMELMGCDLNSCSMPLGMESKAISDAQITASSYFTNMFATWSPSKARLHLQGRSNAWRPQVNNPKEWLQVDFQKTMKVTGVTTQGVKSLDTSMYVKEFLISSSQDGHQWTLFFQNGKVKVFQGNQDSFTPVVNSLDPPLLTRYLRIHPQSWEHQIALRMEVLGCEAQDLY

SEQ ID NO: 1635 - DNA, 4371 bp, synthetic construct
  misc_feature 1..4371: note = Variant of human B-domain deleted Factor VIII
  source 1..4371: mol_type = other DNA
atgcagattgaactgtctacctgcttcttcctctgtttgctgaggttctgctttagcgccactagacggtactaccttggcgctgtggagctgtcctgggactatatgcagagtgatttgggagagcttcccgtcgacgcacgatttcctcctcgcgttccaaagtcatttccctttaacacaagccaggtgtacaagaagacgctcttcgtcgaattcaccgatcacctgttcaatatcgccaaacccagaccaccatggatgggtcttttggggcctaccatacaagcggaggtgtatgacacagttgttatcactctcaagaacatggcttctcatccggtaagtcttcacgcagtgggcgtgtcctactggaaagcttcagaaggagccgagtatgatgatcagacatcccagagggagaaagaagacgacaaggtatttccaggtgggtctcatacctatgtgtggcaagtgctcaaagagaatggccctatggcaagcgatccgccgtgtttgacttacagctacctttcacacgttgacctcgtcaaggacctcaactccgggttgattggagccttgttggtatgcagggaaggatctcttgccaaagagaagacacagaccctggccaagtttatccttctctttgctgtgttcgatgagggcaaaagttggcatagcgaaacgaagaattccctcatgcaggatcgcgacgcagccagcgccagagcttggcccaagatgcacactgtgaacggatatgtcaataggacgcttcctggcttgattgggtgtcatcggaaaagtgtctactggcacgtgatcggaatggggacaacaccagaggtccactccatatttctcgaaggccataccttccttgttcgaaaccacagacaggcatccttggggatctctcccattacctttctcactgcccaaacgctccttcgtgacttgggtcagttccttctcttttgccatatcccgtcacaccagcatgatggtatggaagcttatgtgaaagtcgacagttgtcctgaggagccacagttgcgcatgaagaataatgaagaagccgaggattacgacgacgatctcaccgattctgagatggacgtggtgaggtttgatgacgacaactctccctccatcattcaagctcggagcggggcgaagaaacaccccaagacttgggtccactatatagcggcggaagaggaggattgggattacgctcctcttgtattggcaccagatgaccgctcatacaaaagccagtacctcaacaacggaccgcagagaattggccggaagtataagaaagtgcgatttatggcctatacagacgaaacctttaagacaagggaggccatccagcatgagagtgggattttgggacctcttctttacggcgaagttggtgataccctcctcatcatcttcaagaatcaagcttctcgcccctataacatttacccacacgggatcactgacgttaggcctttgtatagcagaagacttcccaaaggcgtgaagcatctcaaagacttccccattttgccaggcgagatctttaagtacaaatggaccattacaccagaagatggaccgactaaatcagaccctcgatgccttacgcggtactattcctccttcgtgaattgggagagagatttggcaagcggactcataggaccactcctcatctgttacaaggaatctgtagaccagaggggtaaccagattatgagtgataaacgcaatgtgatcctttttagcgtcttcgacgagaaccggtcctggtacttgaccgagaatatacaaaggttccttcccaaccccgcaggcgttcagttggaagaccctgagtttcaggccagcaatattatgcactcaatcaacggctatgtgtttgatagtctccagctttctgtttgcctccatgaagtagcctattggtacatcttgtcaattggtgctcaaacagacttcctctccgtcttcttctccggctacacctttaagcacaagggcgtgtatgaggacactctcacactctttccattttctggagaaaccgtgttcatgagcatggagaatccaggcctttggatcttgggttgccacaacagtgattttcgcaatcggggaatgactgctctcctcaaagtcagcagctgtgattggaacacaggcgactattacgaagattcttacgaggacataagtgcctactttgactccaagaataacgccattgagcccagatcattctcccagaatcctcccgtgcttaaaaggcatcagcgcgaaggtaccagaactactcttcagtctgatcaagaggagattgactatgacgacaccattagcgtggaaatgaagaaagaggatttcgatatctatgacgaagatgagaaccagtctccgcggagctttcagaagaagacgcgacactacttcattgcagcagtcgaaaggctttgggactacggtatgtcatcaagtcctcatgtgttgcgcaatagagctcagagtggaagtgttccacagttcaagaaagtcgtctttcaagagtttacagatggcagcttcacacagcctctctatcggggcgagcttaacgaacatttgggactccttggtccctatatccgagccgaagtggaggacaacattatggttacctttaggaatcaagcctctcgcccctacagcttctactcctccctcatcagttatgaggaggatcagagacaaggcgctgaaccacggaagaactttgtgaaaccgaatgagacgaagacctacttctggaaagtacagcaccacatggcccccacaaaagacgaattcgattgcaaagcatgggcgtatttttcagacgttgacttggagaaagatgtacattcaggacttattggtcctttgttggtgtgtcacactaacactctcaatccagcccatggcaggcaggtgacagtccaggaattcgctcttttctttaccatctttgatgagaccaagtcctggtacttcacggaaaacatggagcgcaattgcagagccccctgtaacatacagatggaggaccctacctttaaggaaaattatcggttccacgcaatcaacggatacattatggatacactccctggccttgtgatggctcaggaccaacgaatcaggtggtacctcctcagcatgggttctaatgagaacatacactccattcacttttcaggacatgtgttcactgtccggaagaaagaagagtataagatggccctctacaatttgtatccaggcgtgtttgagaccgttgaaatgcttccctctaaagctggcatctggagagtagagtgcttgatcggagaacatcttcacgcaggtatgagcaccttgttcctcgtgtacagcaacaaatgtcagaatccacttggcatggccagtggacacattcgcgactttcagatcacagcatctggccagtatggacaatgggccccaaagttggctcgcctccattactccggtagcataaatgcgtggtccactaaagaacctttcagctggattaaggtcgatcttcttgcccccatgatcatccacggcattaagacacagggagcgaggcagaaattctcctccctctacatctcacagttcattattatgtatagtttggacggcaagaagtggcaaacttatagaggtaacagtactggaacagacatggtgttcttcggcaacgttgatagctctggcatcaaacacaacatctttaatcctcccataatagctcggtacatcagattgcatccgacccactacagcattaggagtacactccgaatggagcttatgggttgcgacttgaattcctgttcaatgccactcggaatggagtctaaagccatctctgatgcacagataaccgccagtagctactttacgaacatgtttgctacgtggtcaccctctaaggcaaggcttcatttgcaaggccggtctaatgcctggagacctcaggtgaacaacccgaaagaatggctccaggtggactttcagaagaccatgaaagtaacaggtgtcactactcagggagttaagtccttggatactagcatgtatgtgaaggagttccttatttcctcatcacaagatggccaccagtggaccctcttctttcagaatggtaaggtcaaagtgtttcagggcaatcaagacagcttcacacccgtggtgaacagtcttgatcctccactcttgacacgataccttcgaatccatccacagtcttgggagcaccagattgcattgcgcatggaagtacttggatgcgaggctcaggacctctac

SEQ ID NO: 1636 - protein, 1457 aa, synthetic construct
  REGION 1..1457: note = Variant of human B-domain deleted Factor VIII
MQIELSTCFFLCLLRFCFSATRRYYLGAVELSWDYMQSDLGELPVDARFPPRVPKSFPFNTSQVYKKTLFVEFTDHLFNIAKPRPPWMGLLGPTIQAEVYDTVVITLKNMASHPVSLHAVGVSYWKASEGAEYDDQTSQREKEDDKVFPGGSHTYVWQVLKENGPMASDPPCLTYSYLSHVDLVKDLNSGLIGALLVCREGSLAKEKTQTLAKFILLFAVFDEGKSWHSETKNSLMQDRDAASARAWPKMHTVNGYVNRTLPGLIGCHRKSVYWHVIGMGTTPEVHSIFLEGHTFLVRNHRQASLGISPITFLTAQTLLRDLGQFLLFCHIPSHQHDGMEAYVKVDSCPEEPQLRMKNNEEAEDYDDDLTDSEMDVVRFDDDNSPSIIQARSGAKKHPKTWVHYIAAEEEDWDYAPLVLAPDDRSYKSQYLNNGPQRIGRKYKKVRFMAYTDETFKTREAIQHESGILGPLLYGEVGDTLLIIFKNQASRPYNIYPHGITDVRPLYSRRLPKGVKHLKDFPILPGEIFKYKWTITPEDGPTKSDPRCLTRYYSSFVNWERDLASGLIGPLLICYKESVDQRGNQIMSDKRNVILFSVFDENRSWYLTENIQRFLPNPAGVQLEDPEFQASNIMHSINGYVFDSLQLSVCLHEVAYWYILSIGAQTDFLSVFFSGYTFKHKGVYEDTLTLFPFSGETVFMSMENPGLWILGCHNSDFRNRGMTALLKVSSCDWNTGDYYEDSYEDISAYFDSKNNAIEPRSFSQNPPVLKRHQREGTRTTLQSDQEEIDYDDTISVEMKKEDFDIYDEDENQSPRSFQKKTRHYFIAAVERLWDYGMSSSPHVLRNRAQSGSVPQFKKVVFQEFTDGSFTQPLYRGELNEHLGLLGPYIRAEVEDNIMVTFRNQASRPYSFYSSLISYEEDQRQGAEPRKNFVKPNETKTYFWKVQHHMAPTKDEFDCKAWAYFSDVDLEKDVHSGLIGPLLVCHTNTLNPAHGRQVTVQEFALFFTIFDETKSWYFTENMERNCRAPCNIQMEDPTFKENYRFHAINGYIMDTLPGLVMAQDQRIRWYLLSMGSNENIHSIHFSGHVFTVRKKEEYKMALYNLYPGVFETVEMLPSKAGIWRVECLIGEHLHAGMSTLFLVYSNKCQNPLGMASGHIRDFQITASGQYGQWAPKLARLHYSGSINAWSTKEPFSWIKVDLLAPMIIHGIKTQGARQKFSSLYISQFIIMYSLDGKKWQTYRGNSTGTDMVFFGNVDSSGIKHNIFNPPIIARYIRLHPTHYSIRSTLRMELMGCDLNSCSMPLGMESKAISDAQITASSYFTNMFATWSPSKARLHLQGRSNAWRPQVNNPKEWLQVDFQKTMKVTGVTTQGVKSLDTSMYVKEFLISSSQDGHQWTLFFQNGKVKVFQGNQDSFTPVVNSLDPPLLTRYLRIHPQSWEHQIALRMEVLGCEAQDLY

SEQ ID NO: 1637 - DNA, 4371 bp, synthetic construct
  misc_feature 1..4371: note = Variant of human B-domain deleted Factor VIII
  source 1..4371: mol_type = other DNA
atgcagattgaactgtctacctgcttcttcctctgtttgctgaggttctgctttagcgccactagacggtactaccttggcgctgtggagctgtcctgggactatatgcagagtgatttgggagagcttcccgtcgacgcacgatttcctcctcgcgttccaaagtcatttccctttaacacaagccaggtgtacaagaagacgctcttcgtcgaattcaccgatcacctgttcaatatcgccaaacccagaccaccatggatgggtcttttggggcctaccatacaagcggaggtgtatgacacagttgttatcactctcaagaacatggcttctcatccggtaagtcttcacgcagtgggcgtgtcctactggaaagcttcagaaggagccgagtatgatgatcagacatcccagagggagaaagaagacgacaaggtatttccaggtgggtctcatacctatgtgtggcaagtgctcaaagagaatggccctatggcaagcgatccgccgtgtttgacttacagctacctttcacacgttgacctcgtcaaggacctcaactccgggttgattggagccttgttggtatgcagggaaggatctcttgccaaagagaagacacagaccctggccaagtttatccttctctttgctgtgttcgatgagggcaaaagttggcatagcgaaacgaagaattccctcatgcaggatcgcgacgcagccagcgccagagcttggcccaagatgcacactgtgaacggatatgtcaataggacgcttcctggcttgattgggtgtcatcggaaaagtgtctactggcacgtgatcggaatggggacaacaccagaggtccactccatatttctcgaaggccataccttccttgttcgaaaccacagacaggcatccttggggatctctcccattacctttctcactgcccaaacgctccttcgtgacttgggtcagttccttctcttttgccatatcccgtcacaccagcatgatggtatggaagcttatgtgaaagtcgacagttgtcctgaggagccacagttgcgcatgaagaataatgaagaagccgaggattacgacgacgatctcaccgattctgagatggacgtggtgaggtttgatgacgacaactctccctccatcattcaagctcggagcggggcgaagaaacaccccaagacttgggtccactatatagcggcggaagaggaggattgggattacgctcctcttgtattggcaccagatgaccgctcatacaaaagccagtacctcaacaacggaccgcagagaattggccggaagtataagaaagtgcgatttatggcctatacagacgaaacctttaagacaagggaggccatccagcatgagagtgggattttgggacctcttctttacggcgaagttggtgataccctcctcatcatcttcaagaatcaagcttctcgcccctataacatttacccacacgggatcactgacgttaggcctttgtatagcagaagacttcccaaaggcgtgaagcatctcaaagacttccccattttgccaggcgagatctttaagtacaaatggaccattacagtggaagatggaccgactaaatcagaccctcgatgccttacgcggtactattcctccttcgtgaattgggagagagatttggcaagcggactcataggaccactcctcatctgttacaaggaatctgtagaccagaggggtaaccagattatgagtgataaacgcaatgtgatcctttttagcgtcttcgacgagaaccggtcctggtacttgaccgagaatatacaaaggttccttcccaacccctatggcgttcagttggaagaccctgagtttcaggccagcaatattatgcactcaatcaacggctatgtgtttgatagtctccagctttctgtttgcctccatgaagtagcctattggtacatcttgtcaattggtgctcaaacagacttcctctccgtcttcttctccggctacacctttaagcacaagggcgtgtatgaggacactctcacactctttccattttctggagaaaccgtgttcatgagcatggagaatccaggcctttggatcttgggttgccacaacagtgattttcgcaatcggggaatgactgctctcctcaaagtcagcagctgtgattggaacacaggcgactattacgaagattcttacgaggacataagtgcctactttgactccaagaataacgccattgagcccagatcattctcccagaatcctcccgtgcttaaaaggcatcagcgcgaaggtaccagaactactcttcagtctgatcaagaggagattgactatgacgacaccattagcgtggaaatgaagaaggaggatttcgatatctatgacgaagatgagaaccagtctccgcggagctttcagaagaagacgcgacactacttcattgcagcagtcgaaaggctttgggactacggtatgtcatcatcccctcatgtgttgcgcaatagagctcagagtggaagtgttccacagttcaagaaagtcgtctttcaagagtttacagatggcagcttcacacagcctctctatcggggcgagcttaacgaacatttgggactccttggtccctatatccgagccgaagtggaggacaacattatggttacctttaggaatcaagcctctcgcccctacagcttctactcctccctcatcagttatgaggaggatcagagacaaggcgctgaaccacggaagaactttgtgaaaccgaatgagacgaagacctacttctggaaagtacagcaccacatggcccccacaaaagacgaattcgattgcaaagcatgggcgtatttttcagacgttgacttggagaaagatgtacattcaggacttattggtcctttgttggtgtgtcacactaacactctcaatccagcccatggcaggcaggtgacagtccaggaattcgctcttttctttaccatctttgatgagaccaagtcctggtacttcacggaaaacatggagcgcaattgcagagccccctgtaacatacagatggaggaccctacctttaaggaaaattatcggttccacgcaatcaacggatacattatggatacactccctggccttgtgatggctcaggaccaacgaatcaggtggtacctcctcagcatgggttctaatgagaacatacactccattcacttttcaggacatgtgttcactgtccggaagaaagaagagtataagatggccctctacaatttgtatccaggcgtgtttgagaccgttgaaatgcttccctctaaagctggcatctggagagtagagtgcttgatcggagaacatcttcacgcaggtatgagcaccttgttcctcgtgtacagcaacaaatgtcagaatccacttggcatggccagtggacacattcgcgactttcagatcacagcatctggccagtatggacaatgggccccaaagttggctcgcctccattactccggtagcataaatgcgtggtccactaaagaacctttcagctggattaaggtcgatcttcttgcccccatgatcatccacggcattaagacacagggagcgaggcagaaattctcctccctctacatctcacagttcattattatgtatagtttggacggcaagaagtggcaaacttatagaggtaacagtactggaacagacatggtgttcttcggcaacgttgatagctctggcatcaaacacaacatctttaatcctcccataatagctcggtacatcagattgcatccgacccactacagcattaggagtacactccgaatggagcttatgggttgcgacttgaattcctgttcaatgccactcggaatggagtctaaagccatctctgatgcacagataaccgccagtagctactttacgaacatgtttgctacgtggtcaccctctaaggcaaggcttcatttgcaaggccggtctaatgcctggagacctcaggtgaacaacccgaaagaatggctccaggtggactttcagaagaccatgaaagtaacaggtgtcactactcagggagttaagtccttggatactagcatgtatgtgaaggagttccttatttcctcatcacaagatggccaccagtggaccctcttctttcagaatggtaaggtcaaagtgtttcagggcaatcaagacagcttcacacccgtggtgaacagtcttgatcctccactcttgacacgataccttcgaatccatccacagtcttgggagcaccagattgcattgcgcatggaagtacttggatgcgaggctcaggacctctac

SEQ ID NO: 1638 - protein, 1457 aa, synthetic construct
  REGION 1..1457: note = Variant of human B-domain deleted Factor VIII
MQIELSTCFFLCLLRFCFSATRRYYLGAVELSWDYMQSDLGELPVDARFPPRVPKSFPFNTSQVYKKTLFVEFTDHLFNIAKPRPPWMGLLGPTIQAEVYDTVVITLKNMASHPVSLHAVGVSYWKASEGAEYDDQTSQREKEDDKVFPGGSHTYVWQVLKENGPMASDPPCLTYSYLSHVDLVKDLNSGLIGALLVCREGSLAKEKTQTLAKFILLFAVFDEGKSWHSETKNSLMQDRDAASARAWPKMHTVNGYVNRTLPGLIGCHRKSVYWHVIGMGTTPEVHSIFLEGHTFLVRNHRQASLGISPITFLTAQTLLRDLGQFLLFCHIPSHQHDGMEAYVKVDSCPEEPQLRMKNNEEAEDYDDDLTDSEMDVVRFDDDNSPSIIQARSGAKKHPKTWVHYIAAEEEDWDYAPLVLAPDDRSYKSQYLNNGPQRIGRKYKKVRFMAYTDETFKTREAIQHESGILGPLLYGEVGDTLLIIFKNQASRPYNIYPHGITDVRPLYSRRLPKGVKHLKDFPILPGEIFKYKWTITVEDGPTKSDPRCLTRYYSSFVNWERDLASGLIGPLLICYKESVDQRGNQIMSDKRNVILFSVFDENRSWYLTENIQRFLPNPYGVQLEDPEFQASNIMHSINGYVFDSLQLSVCLHEVAYWYILSIGAQTDFLSVFFSGYTFKHKGVYEDTLTLFPFSGETVFMSMENPGLWILGCHNSDFRNRGMTALLKVSSCDWNTGDYYEDSYEDISAYFDSKNNAIEPRSFSQNPPVLKRHQREGTRTTLQSDQEEIDYDDTISVEMKKEDFDIYDEDENQSPRSFQKKTRHYFIAAVERLWDYGMSSSPHVLRNRAQSGSVPQFKKVVFQEFTDGSFTQPLYRGELNEHLGLLGPYIRAEVEDNIMVTFRNQASRPYSFYSSLISYEEDQRQGAEPRKNFVKPNETKTYFWKVQHHMAPTKDEFDCKAWAYFSDVDLEKDVHSGLIGPLLVCHTNTLNPAHGRQVTVQEFALFFTIFDETKSWYFTENMERNCRAPCNIQMEDPTFKENYRFHAINGYIMDTLPGLVMAQDQRIRWYLLSMGSNENIHSIHFSGHVFTVRKKEEYKMALYNLYPGVFETVEMLPSKAGIWRVECLIGEHLHAGMSTLFLVYSNKCQNPLGMASGHIRDFQITASGQYGQWAPKLARLHYSGSINAWSTKEPFSWIKVDLLAPMIIHGIKTQGARQKFSSLYISQFIIMYSLDGKKWQTYRGNSTGTDMVFFGNVDSSGIKHNIFNPPIIARYIRLHPTHYSIRSTLRMELMGCDLNSCSMPLGMESKAISDAQITASSYFTNMFATWSPSKARLHLQGRSNAWRPQVNNPKEWLQVDFQKTMKVTGVTTQGVKSLDTSMYVKEFLISSSQDGHQWTLFFQNGKVKVFQGNQDSFTPVVNSLDPPLLTRYLRIHPQSWEHQIALRMEVLGCEAQDLY

SEQ ID NO: 1639 - DNA, 4371 bp, synthetic construct
  misc_feature 1..4371: note = Variant of human B-domain deleted Factor VIII
  source 1..4371: mol_type = other DNA
atgcagattgaactgtctacctgcttcttcctctgtttgctgaggttctgctttagcgccactagacggtactaccttggcgctgtggagctgtcctgggactatatgcagagtgatttgggagagcttcccgtcgacgcacgatttcctcctcgcgttccaaagtcatttccctttaacacaagccaggtgtacaagaagacgctcttcgtcgaattcaccgatcacctgttcaatatcgccaaacccagaccaccatggatgggtcttttggggcctaccatacaagcggaggtgtatgacacagttgttatcactctcaagaacatggcttctcatccggtaagtcttcacgcagtgggcgtgtcctactggaaagcttcagaaggagccgagtatgatgatcagacatcccagagggagaaagaagacgacaaggtatttccaggtgggtctcatacctatgtgtggcaagtgctcaaagagaatggccctatggcaagcgatccgccgtgtttgacttacagctacctttcacacgttgacctcgtcaaggacctcaactccgggttgattggagccttgttggtatgcagggaaggatctcttgccaaagagaagacacagaccctggccaagtttatccttctctttgctgtgttcgatgagggcaaaagttggcatagcgaaacgaagaattccctcatgcaggatcgcgacgcagccagcgccagagcttggcccaagatgcacactgtgaacggatatgtcaataggacgcttcctggcttgattgggtgtcatcggaaaagtgtctactggcacgtgatcggaatggggacaacaccagaggtccactccatatttctcgaaggccataccttccttgttcgaaaccacagacaggcatccttggggatctctcccattacctttctcactgcccaaacgctccttcgtgacttgggtcagttccttctcttttgccatatcccgtcacaccagcatgatggtatggaagcttatgtgaaagtcgacagttgtcctgaggagccacagttgcgcatgaagaataatgaagaagccgaggattacgacgacgatctcaccgattctgagatggacgtggtgaggtttgatgacgacaactctccctccatcattcaagctcggagcggggcgaagaaacaccccaagacttgggtccactatatagcggcggaagaggaggattgggattacgctcctcttgtattggcaccagatgaccgctcatacaaaagccagtacctcaacaacggaccgcagagaattggccggaagtataagaaagtgcgatttatggcctatacagacgaaacctttaagacaagggaggccatccagcatgagagtgggattttgggacctcttctttacggcgaagttggtgataccctcctcatcatcttcaagaatcaagcttctcgcccctataacatttacccacacgggatcactgacgttaggcctttgtatagcagaagacttcccaaaggcgtgaagcatctcaaagacttccccattttgccaggcgagatctttaagtacaaatggaccattacagtggaagatggaccgactaaatcagaccctcgatgccttacgcggtactattcctccttcgtgaattgggagagagatttggcaagcggactcataggaccactcctcatctgttacaaggaatctgtagaccagaggggtaaccagattatgagtgataaacgcaatgtgatcctttttagcgtcttcgacgagaaccggtcctggtacttgaccgagaatatacaaaggttccttcccaaccccgcaggcgtttggttggaagaccctgagtttcaggccagcaatattatgcactcaatcaacggctatgtgtttgatagtctccagctttctgtttgcctccatgaagtagcctattggtacatcttgtcaattggtgctcaaacagacttcctctccgtcttcttctccggctacacctttaagcacaagggcgtgtatgaggacactctcacactctttccattttctggagaaaccgtgttcatgagcatggagaatccaggcctttggatcttgggttgccacaacagtgattttcgcaatcggggaatgactgctctcctcaaagtcagcagctgtgattggaacacaggcgactattacgaagattcttacgaggacataagtgcctactttgactccaagaataacgccattgagcccagatcattctcccagaatcctcccgtgcttaaaaggcatcagcgcgaaggtaccagaactactcttcagtctgatcaagaggagattgactatgacgacaccattagcgtggaaatgaagaaggaggatttcgatatctatgacgaagatgagaaccagtctccgcggagctttcagaagaagacgcgacactacttcattgcagcagtcgaaaggctttgggactacggtatgtcatcatcccctcatgtgttgcgcaatagagctcagagtggaagtgttccacagttcaagaaagtcgtctttcaagagtttacagatggcagcttcacacagcctctctatcggggcgagcttaacgaacatttgggactccttggtccctatatccgagccgaagtggaggacaacattatggttacctttaggaatcaagcctctcgcccctacagcttctactcctccctcatcagttatgaggaggatcagagacaaggcgctgaaccacggaagaactttgtgaaaccgaatgagacgaagacctacttctggaaagtacagcaccacatggcccccacaaaagacgaattcgattgcaaagcatgggcgtatttttcagacgttgacttggagaaagatgtacattcaggacttattggtcctttgttggtgtgtcacactaacactctcaatccagcccatggcaggcaggtgacagtccaggaattcgctcttttctttaccatctttgatgagaccaagtcctggtacttcacggaaaacatggagcgcaattgcagagccccctgtaacatacagatggaggaccctacctttaaggaaaattatcggttccacgcaatcaacggatacattatggatacactccctggccttgtgatggctcaggaccaacgaatcaggtggtacctcctcagcatgggttctaatgagaacatacactccattcacttttcaggacatgtgttcactgtccggaagaaagaagagtataagatggccctctacaatttgtatccaggcgtgtttgagaccgttgaaatgcttccctctaaagctggcatctggagagtagagtgcttgatcggagaacatcttcacgcaggtatgagcaccttgttcctcgtgtacagcaacaaatgtcagaatccacttggcatggccagtggacacattcgcgactttcagatcacagcatctggccagtatggacaatgggccccaaagttggctcgcctccattactccggtagcataaatgcgtggtccactaaagaacctttcagctggattaaggtcgatcttcttgcccccatgatcatccacggcattaagacacagggagcgaggcagaaattctcctccctctacatctcacagttcattattatgtatagtttggacggcaagaagtggcaaacttatagaggtaacagtactggaacagacatggtgttcttcggcaacgttgatagctctggcatcaaacacaacatctttaatcctcccataatagctcggtacatcagattgcatccgacccactacagcattaggagtacactccgaatggagcttatgggttgcgacttgaattcctgttcaatgccactcggaatggagtctaaagccatctctgatgcacagataaccgccagtagctactttacgaacatgtttgctacgtggtcaccctctaaggcaaggcttcatttgcaaggccggtctaatgcctggagacctcaggtgaacaacccgaaagaatggctccaggtggactttcagaagaccatgaaagtaacaggtgtcactactcagggagttaagtccttggatactagcatgtatgtgaaggagttccttatttcctcatcacaagatggccaccagtggaccctcttctttcagaatggtaaggtcaaagtgtttcagggcaatcaagacagcttcacacccgtggtgaacagtcttgatcctccactcttgacacgataccttcgaatccatccacagtcttgggagcaccagattgcattgcgcatggaagtacttggatgcgaggctcaggacctctac

SEQ ID NO: 1640 - protein, 1457 aa, synthetic construct
  REGION 1..1457: note = Variant of human B-domain deleted Factor VIII
MQIELSTCFFLCLLRFCFSATRRYYLGAVELSWDYMQSDLGELPVDARFPPRVPKSFPFNTSQVYKKTLFVEFTDHLFNIAKPRPPWMGLLGPTIQAEVYDTVVITLKNMASHPVSLHAVGVSYWKASEGAEYDDQTSQREKEDDKVFPGGSHTYVWQVLKENGPMASDPPCLTYSYLSHVDLVKDLNSGLIGALLVCREGSLAKEKTQTLAKFILLFAVFDEGKSWHSETKNSLMQDRDAASARAWPKMHTVNGYVNRTLPGLIGCHRKSVYWHVIGMGTTPEVHSIFLEGHTFLVRNHRQASLGISPITFLTAQTLLRDLGQFLLFCHIPSHQHDGMEAYVKVDSCPEEPQLRMKNNEEAEDYDDDLTDSEMDVVRFDDDNSPSIIQARSGAKKHPKTWVHYIAAEEEDWDYAPLVLAPDDRSYKSQYLNNGPQRIGRKYKKVRFMAYTDETFKTREAIQHESGILGPLLYGEVGDTLLIIFKNQASRPYNIYPHGITDVRPLYSRRLPKGVKHLKDFPILPGEIFKYKWTITVEDGPTKSDPRCLTRYYSSFVNWERDLASGLIGPLLICYKESVDQRGNQIMSDKRNVILFSVFDENRSWYLTENIQRFLPNPAGVWLEDPEFQASNIMHSINGYVFDSLQLSVCLHEVAYWYILSIGAQTDFLSVFFSGYTFKHKGVYEDTLTLFPFSGETVFMSMENPGLWILGCHNSDFRNRGMTALLKVSSCDWNTGDYYEDSYEDISAYFDSKNNAIEPRSFSQNPPVLKRHQREGTRTTLQSDQEEIDYDDTISVEMKKEDFDIYDEDENQSPRSFQKKTRHYFIAAVERLWDYGMSSSPHVLRNRAQSGSVPQFKKVVFQEFTDGSFTQPLYRGELNEHLGLLGPYIRAEVEDNIMVTFRNQASRPYSFYSSLISYEEDQRQGAEPRKNFVKPNETKTYFWKVQHHMAPTKDEFDCKAWAYFSDVDLEKDVHSGLIGPLLVCHTNTLNPAHGRQVTVQEFALFFTIFDETKSWYFTENMERNCRAPCNIQMEDPTFKENYRFHAINGYIMDTLPGLVMAQDQRIRWYLLSMGSNENIHSIHFSGHVFTVRKKEEYKMALYNLYPGVFETVEMLPSKAGIWRVECLIGEHLHAGMSTLFLVYSNKCQNPLGMASGHIRDFQITASGQYGQWAPKLARLHYSGSINAWSTKEPFSWIKVDLLAPMIIHGIKTQGARQKFSSLYISQFIIMYSLDGKKWQTYRGNSTGTDMVFFGNVDSSGIKHNIFNPPIIARYIRLHPTHYSIRSTLRMELMGCDLNSCSMPLGMESKAISDAQITASSYFTNMFATWSPSKARLHLQGRSNAWRPQVNNPKEWLQVDFQKTMKVTGVTTQGVKSLDTSMYVKEFLISSSQDGHQWTLFFQNGKVKVFQGNQDSFTPVVNSLDPPLLTRYLRIHPQSWEHQIALRMEVLGCEAQDLY

SEQ ID NO: 1641 - DNA, 4371 bp, synthetic construct
  misc_feature 1..4371: note = Variant of human B-domain deleted Factor VIII
  source 1..4371: mol_type = other DNA
atgcagattgaactgtctacctgcttcttcctctgtttgctgaggttctgctttagcgccactagacggtactaccttggcgctgtggagctgtcctgggactatatgcagagtgatttgggagagcttcccgtcgacgcacgatttcctcctcgcgttccaaagtcatttccctttaacacaagccaggtgtacaagaagacgctcttcgtcgaattcaccgatcacctgttcaatatcgccaaacccagaccaccatggatgggtcttttggggcctaccatacaagcggaggtgtatgacacagttgttatcactctcaagaacatggcttctcatccggtaagtcttcacgcagtgggcgtgtcctactggaaagcttcagaaggagccgagtatgatgatcagacatcccagagggagaaagaagacgacaaggtatttccaggtgggtctcatacctatgtgtggcaagtgctcaaagagaatggccctatggcaagcgatccgccgtgtttgacttacagctacctttcacacgttgacctcgtcaaggacctcaactccgggttgattggagccttgttggtatgcagggaaggatctcttgccaaagagaagacacagaccctggccaagtttatccttctctttgctgtgttcgatgagggcaaaagttggcatagcgaaacgaagaattccctcatgcaggatcgcgacgcagccagcgccagagcttggcccaagatgcacactgtgaacggatatgtcaataggacgcttcctggcttgattgggtgtcatcggaaaagtgtctactggcacgtgatcggaatggggacaacaccagaggtccactccatatttctcgaaggccataccttccttgttcgaaaccacagacaggcatccttggggatctctcccattacctttctcactgcccaaacgctccttcgtgacttgggtcagttccttctcttttgccatatcccgtcacaccagcatgatggtatggaagcttatgtgaaagtcgacagttgtcctgaggagccacagttgcgcatgaagaataatgaagaagccgaggattacgacgacgatctcaccgattctgagatggacgtggtgaggtttgatgacgacaactctccctccatcattcaagctcggagcggggcgaagaaacaccccaagacttgggtccactatatagcggcggaagaggaggattgggattacgctcctcttgtattggcaccagatgaccgctcatacaaaagccagtacctcaacaacggaccgcagagaattggccggaagtataagaaagtgcgatttatggcctatacagacgaaacctttaagacaagggaggccatccagcatgagagtgggattttgggacctcttctttacggcgaagttggtgataccctcctcatcatcttcaagaatcaagcttctcgcccctataacatttacccacacgggatcactgacgttaggcctttgtatagcagaagacttcccaaaggcgtgaagcatctcaaagacttccccattttgccaggcgagatctttaagtacaaatggaccattacagtggaagatggaccgactaaatcagaccctcgatgccttacgcggtactattcctccttcgtgaattgggagagagatttggcaagcggactcataggaccactcctcatctgttacaaggaatctgtagaccagaggggtaaccagattatgagtgataaacgcaatgtgatcctttttagcgtcttcgacgagaaccggtcctggtacttgaccgagaatatacaaaggttccttcccaaccccccgggcgttcagttggaagaccctgagtttcaggccagcaatattatgcactcaatcaacggctatgtgtttgatagtctccagctttctgtttgcctccatgaagtagcctattggtacatcttgtcaattggtgctcaaacagacttcctctccgtcttcttctccggctacacctttaagcacaagggcgtgtatgaggacactctcacactctttccattttctggagaaaccgtgttcatgagcatggagaatccaggcctttggatcttgggttgccacaacagtgattttcgcaatcggggaatgactgctctcctcaaagtcagcagctgtgattggaacacaggcgactattacgaagattcttacgaggacataagtgcctactttgactccaagaataacgccattgagcccagatcattctcccagaatcctcccgtgcttaaaaggcatcagcgcgaaggtaccagaactactcttcagtctgatcaagaggagattgactatgacgacaccattagcgtggaaatgaagaaggaggatttcgatatctatgacgaagatgagaaccagtctccgcggagctttcagaagaagacgcgacactacttcattgcagcagtcgaaaggctttgggactacggtatgtcatcatcccctcatgtgttgcgcaatagagctcagagtggaagtgttccacagttcaagaaagtcgtctttcaagagtttacagatggcagcttcacacagcctctctatcggggcgagcttaacgaacatttgggactccttggtccctatatccgagccgaagtggaggacaacattatggttacctttaggaatcaagcctctcgcccctacagcttctactcctccctcatcagttatgaggaggatcagagacaaggcgctgaaccacggaagaactttgtgaaaccgaatgagacgaagacctacttctggaaagtacagcaccacatggcccccacaaaagacgaattcgattgcaaagcatgggcgtatttttcagacgttgacttggagaaagatgtacattcaggacttattggtcctttgttggtgtgtcacactaacactctcaatccagcccatggcaggcaggtgacagtccaggaattcgctcttttctttaccatctttgatgagaccaagtcctggtacttcacggaaaacatggagcgcaattgcagagccccctgtaacatacagatggaggaccctacctttaaggaaaattatcggttccacgcaatcaacggatacattatggatacactccctggccttgtgatggctcaggaccaacgaatcaggtggtacctcctcagcatgggttctaatgagaacatacactccattcacttttcaggacatgtgttcactgtccggaagaaagaagagtataagatggccctctacaatttgtatccaggcgtgtttgagaccgttgaaatgcttccctctaaagctggcatctggagagtagagtgcttgatcggagaacatcttcacgcaggtatgagcaccttgttcctcgtgtacagcaacaaatgtcagaatccacttggcatggccagtggacacattcgcgactttcagatcacagcatctggccagtatggacaatgggccccaaagttggctcgcctccattactccggtagcataaatgcgtggtccactaaagaacctttcagctggattaaggtcgatcttcttgcccccatgatcatccacggcattaagacacagggagcgaggcagaaattctcctccctctacatctcacagttcattattatgtatagtttggacggcaagaagtggcaaacttatagaggtaacagtactggaacagacatggtgttcttcggcaacgttgatagctctggcatcaaacacaacatctttaatcctcccataatagctcggtacatcagattgcatccgacccactacagcattaggagtacactccgaatggagcttatgggttgcgacttgaattcctgttcaatgccactcggaatggagtctaaagccatctctgatgcacagataaccgccagtagctactttacgaacatgtttgctacgtggtcaccctctaaggcaaggcttcatttgcaaggccggtctaatgcctggagacctcaggtgaacaacccgaaagaatggctccaggtggactttcagaagaccatgaaagtaacaggtgtcactactcagggagttaagtccttggatactagcatgtatgtgaaggagttccttatttcctcatcacaagatggccaccagtggaccctcttctttcagaatggtaaggtcaaagtgtttcagggcaatcaagacagcttcacacccgtggtgaacagtcttgatcctccactcttgacacgataccttcgaatccatccacagtcttgggagcaccagattgcattgcgcatggaagtacttggatgcgaggctcaggacctctac

SEQ ID NO: 1642 - protein, 1457 aa, synthetic construct
  REGION 1..1457: note = Variant of human B-domain deleted Factor VIII
MQIELSTCFFLCLLRFCFSATRRYYLGAVELSWDYMQSDLGELPVDARFPPRVPKSFPFNTSQVYKKTLFVEFTDHLFNIAKPRPPWMGLLGPTIQAEVYDTVVITLKNMASHPVSLHAVGVSYWKASEGAEYDDQTSQREKEDDKVFPGGSHTYVWQVLKENGPMASDPPCLTYSYLSHVDLVKDLNSGLIGALLVCREGSLAKEKTQTLAKFILLFAVFDEGKSWHSETKNSLMQDRDAASARAWPKMHTVNGYVNRTLPGLIGCHRKSVYWHVIGMGTTPEVHSIFLEGHTFLVRNHRQASLGISPITFLTAQTLLRDLGQFLLFCHIPSHQHDGMEAYVKVDSCPEEPQLRMKNNEEAEDYDDDLTDSEMDVVRFDDDNSPSIIQARSGAKKHPKTWVHYIAAEEEDWDYAPLVLAPDDRSYKSQYLNNGPQRIGRKYKKVRFMAYTDETFKTREAIQHESGILGPLLYGEVGDTLLIIFKNQASRPYNIYPHGITDVRPLYSRRLPKGVKHLKDFPILPGEIFKYKWTITVEDGPTKSDPRCLTRYYSSFVNWERDLASGLIGPLLICYKESVDQRGNQIMSDKRNVILFSVFDENRSWYLTENIQRFLPNPPGVQLEDPEFQASNIMHSINGYVFDSLQLSVCLHEVAYWYILSIGAQTDFLSVFFSGYTFKHKGVYEDTLTLFPFSGETVFMSMENPGLWILGCHNSDFRNRGMTALLKVSSCDWNTGDYYEDSYEDISAYFDSKNNAIEPRSFSQNPPVLKRHQREGTRTTLQSDQEEIDYDDTISVEMKKEDFDIYDEDENQSPRSFQKKTRHYFIAAVERLWDYGMSSSPHVLRNRAQSGSVPQFKKVVFQEFTDGSFTQPLYRGELNEHLGLLGPYIRAEVEDNIMVTFRNQASRPYSFYSSLISYEEDQRQGAEPRKNFVKPNETKTYFWKVQHHMAPTKDEFDCKAWAYFSDVDLEKDVHSGLIGPLLVCHTNTLNPAHGRQVTVQEFALFFTIFDETKSWYFTENMERNCRAPCNIQMEDPTFKENYRFHAINGYIMDTLPGLVMAQDQRIRWYLLSMGSNENIHSIHFSGHVFTVRKKEEYKMALYNLYPGVFETVEMLPSKAGIWRVECLIGEHLHAGMSTLFLVYSNKCQNPLGMASGHIRDFQITASGQYGQWAPKLARLHYSGSINAWSTKEPFSWIKVDLLAPMIIHGIKTQGARQKFSSLYISQFIIMYSLDGKKWQTYRGNSTGTDMVFFGNVDSSGIKHNIFNPPIIARYIRLHPTHYSIRSTLRMELMGCDLNSCSMPLGMESKAISDAQITASSYFTNMFATWSPSKARLHLQGRSNAWRPQVNNPKEWLQVDFQKTMKVTGVTTQGVKSLDTSMYVKEFLISSSQDGHQWTLFFQNGKVKVFQGNQDSFTPVVNSLDPPLLTRYLRIHPQSWEHQIALRMEVLGCEAQDLY

SEQ ID NO: 1643 - DNA, 4371 bp, synthetic construct
  misc_feature 1..4371: note = Variant of human B-domain deleted Factor VIII
  source 1..4371: mol_type = other DNA
atgcagattgaactgtctacctgcttcttcctctgtttgctgaggttctgctttagcgccactagacggtactaccttggcgctgtggagctgtcctgggactatatgcagagtgatttgggagagcttcccgtcgacgcacgatttcctcctcgcgttccaaagtcatttccctttaacacaagccaggtgtacaagaagacgctcttcgtcgaattcaccgatcacctgttcaatatcgccaaacccagaccaccatggatgggtcttttggggcctaccatacaagcggaggtgtatgacacagttgttatcactctcaagaacatggcttctcatccggtaagtcttcacgcagtgggcgtgtcctactggaaagcttcagaaggagccgagtatgatgatcagacatcccagagggagaaagaagacgacaaggtatttccaggtgggtctcatacctatgtgtggcaagtgctcaaagagaatggccctatggcaagcgatccgccgtgtttgacttacagctacctttcacacgttgacctcgtcaaggacctcaactccgggttgattggagccttgttggtatgcagggaaggatctcttgccaaagagaagacacagaccctggccaagtttatccttctctttgctgtgttcgatgagggcaaaagttggcatagcgaaacgaagaattccctcatgcaggatcgcgacgcagccagcgccagagcttggcccaagatgcacactgtgaacggatatgtcaataggacgcttcctggcttgattgggtgtcatcggaaaagtgtctactggcacgtgatcggaatggggacaacaccagaggtccactccatatttctcgaaggccataccttccttgttcgaaaccacagacaggcatccttggggatctctcccattacctttctcactgcccaaacgctccttcgtgacttgggtcagttccttctcttttgccatatcccgtcacaccagcatgatggtatggaagcttatgtgaaagtcgacagttgtcctgaggagccacagttgcgcatgaagaataatgaagaagccgaggattacgacgacgatctcaccgattctgagatggacgtggtgaggtttgatgacgacaactctccctccatcattcaagctcggagcggggcgaagaaacaccccaagacttgggtccactatatagcggcggaagaggaggattgggattacgctcctcttgtattggcaccagatgaccgctcatacaaaagccagtacctcaacaacggaccgcagagaattggccggaagtataagaaagtgcgatttatggcctatacagacgaaacctttaagacaagggaggccatccagcatgagagtgggattttgggacctcttctttacggcgaagttggtgataccctcctcatcatcttcaagaatcaagcttctcgcccctataacatttacccacacgggatcactgacgttaggcctttgtatagcagaagacttcccaaaggcgtgaagcatctcaaagacttccccattttgccaggcgagatctttaagtacaaatggaccattacagtggaagatggaccgactaaatcagaccctcgatgccttacgcggtactattcctccttcgtgaattgggagagagatttggcaagcggactcataggaccactcctcatctgttacaaggaatctgtagaccagaggggtaaccagattatgagtgataaacgcaatgtgatcctttttagcgtcttcgacgagaaccggtcctggtacttgaccgagaatatacaaaggttctttcccaaccccgcaggcgttcagttggaagaccctgagtttcaggccagcaatattatgcactcaatcaacggctatgtgtttgatagtctccagctttctgtttgcctccatgaagtagcctattggtacatcttgtcaattggtgctcaaacagacttcctctccgtcttcttctccggctacacctttaagcacaagggcgtgtatgaggacactctcacactctttccattttctggagaaaccgtgttcatgagcatggagaatccaggcctttggatcttgggttgccacaacagtgattttcgcaatcggggaatgactgctctcctcaaagtcagcagctgtgattggaacacaggcgactattacgaagattcttacgaggacataagtgcctactttgactccaagaataacgccattgagcccagatcattctcccagaatcctcccgtgcttaaaaggcatcagcgcgaaggtaccagaactactcttcagtctgatcaagaggagattgactatgacgacaccattagcgtggaaatgaagaaggaggatttcgatatctatgacgaagatgagaaccagtctccgcggagctttcagaagaagacgcgacactacttcattgcagcagtcgaaaggctttgggactacggtatgtcatcatcccctcatgtgttgcgcaatagagctcagagtggaagtgttccacagttcaagaaagtcgtctttcaagagtttacagatggcagcttcacacagcctctctatcggggcgagcttaacgaacatttgggactccttggtccctatatccgagccgaagtggaggacaacattatggttacctttaggaatcaagcctctcgcccctacagcttctactcctccctcatcagttatgaggaggatcagagacaaggcgctgaaccacggaagaactttgtgaaaccgaatgagacgaagacctacttctggaaagtacagcaccacatggcccccacaaaagacgaattcgattgcaaagcatgggcgtatttttcagacgttgacttggagaaagatgtacattcaggacttattggtcctttgttggtgtgtcacactaacactctcaatccagcccatggcaggcaggtgacagtccaggaattcgctcttttctttaccatctttgatgagaccaagtcctggtacttcacggaaaacatggagcgcaattgcagagccccctgtaacatacagatggaggaccctacctttaaggaaaattatcggttccacgcaatcaacggatacattatggatacactccctggccttgtgatggctcaggaccaacgaatcaggtggtacctcctcagcatgggttctaatgagaacatacactccattcacttttcaggacatgtgttcactgtccggaagaaagaagagtataagatggccctctacaatttgtatccaggcgtgtttgagaccgttgaaatgcttccctctaaagctggcatctggagagtagagtgcttgatcggagaacatcttcacgcaggtatgagcaccttgttcctcgtgtacagcaacaaatgtcagaatccacttggcatggccagtggacacattcgcgactttcagatcacagcatctggccagtatggacaatgggccccaaagttggctcgcctccattactccggtagcataaatgcgtggtccactaaagaacctttcagctggattaaggtcgatcttcttgcccccatgatcatccacggcattaagacacagggagcgaggcagaaattctcctccctctacatctcacagttcattattatgtatagtttggacggcaagaagtggcaaacttatagaggtaacagtactggaacagacatggtgttcttcggcaacgttgatagctctggcatcaaacacaacatctttaatcctcccataatagctcggtacatcagattgcatccgacccactacagcattaggagtacactccgaatggagcttatgggttgcgacttgaattcctgttcaatgccactcggaatggagtctaaagccatctctgatgcacagataaccgccagtagctactttacgaacatgtttgctacgtggtcaccctctaaggcaaggcttcatttgcaaggccggtctaatgcctggagacctcaggtgaacaacccgaaagaatggctccaggtggactttcagaagaccatgaaagtaacaggtgtcactactcagggagttaagtccttggatactagcatgtatgtgaaggagttccttatttcctcatcacaagatggccaccagtggaccctcttctttcagaatggtaaggtcaaagtgtttcagggcaatcaagacagcttcacacccgtggtgaacagtcttgatcctccactcttgacacgataccttcgaatccatccacagtcttgggagcaccagattgcattgcgcatggaagtacttggatgcgaggctcaggacctctac

SEQ ID NO: 1644 - protein, 1457 aa, synthetic construct
  REGION 1..1457: note = Variant of human B-domain deleted Factor VIII
MQIELSTCFFLCLLRFCFSATRRYYLGAVELSWDYMQSDLGELPVDARFPPRVPKSFPFNTSQVYKKTLFVEFTDHLFNIAKPRPPWMGLLGPTIQAEVYDTVVITLKNMASHPVSLHAVGVSYWKASEGAEYDDQTSQREKEDDKVFPGGSHTYVWQVLKENGPMASDPPCLTYSYLSHVDLVKDLNSGLIGALLVCREGSLAKEKTQTLAKFILLFAVFDEGKSWHSETKNSLMQDRDAASARAWPKMHTVNGYVNRTLPGLIGCHRKSVYWHVIGMGTTPEVHSIFLEGHTFLVRNHRQASLGISPITFLTAQTLLRDLGQFLLFCHIPSHQHDGMEAYVKVDSCPEEPQLRMKNNEEAEDYDDDLTDSEMDVVRFDDDNSPSIIQARSGAKKHPKTWVHYIAAEEEDWDYAPLVLAPDDRSYKSQYLNNGPQRIGRKYKKVRFMAYTDETFKTREAIQHESGILGPLLYGEVGDTLLIIFKNQASRPYNIYPHGITDVRPLYSRRLPKGVKHLKDFPILPGEIFKYKWTITVEDGPTKSDPRCLTRYYSSFVNWERDLASGLIGPLLICYKESVDQRGNQIMSDKRNVILFSVFDENRSWYLTENIQRFFPNPAGVQLEDPEFQASNIMHSINGYVFDSLQLSVCLHEVAYWYILSIGAQTDFLSVFFSGYTFKHKGVYEDTLTLFPFSGETVFMSMENPGLWILGCHNSDFRNRGMTALLKVSSCDWNTGDYYEDSYEDISAYFDSKNNAIEPRSFSQNPPVLKRHQREGTRTTLQSDQEEIDYDDTISVEMKKEDFDIYDEDENQSPRSFQKKTRHYFIAAVERLWDYGMSSSPHVLRNRAQSGSVPQFKKVVFQEFTDGSFTQPLYRGELNEHLGLLGPYIRAEVEDNIMVTFRNQASRPYSFYSSLISYEEDQRQGAEPRKNFVKPNETKTYFWKVQHHMAPTKDEFDCKAWAYFSDVDLEKDVHSGLIGPLLVCHTNTLNPAHGRQVTVQEFALFFTIFDETKSWYFTENMERNCRAPCNIQMEDPTFKENYRFHAINGYIMDTLPGLVMAQDQRIRWYLLSMGSNENIHSIHFSGHVFTVRKKEEYKMALYNLYPGVFETVEMLPSKAGIWRVECLIGEHLHAGMSTLFLVYSNKCQNPLGMASGHIRDFQITASGQYGQWAPKLARLHYSGSINAWSTKEPFSWIKVDLLAPMIIHGIKTQGARQKFSSLYISQFIIMYSLDGKKWQTYRGNSTGTDMVFFGNVDSSGIKHNIFNPPIIARYIRLHPTHYSIRSTLRMELMGCDLNSCSMPLGMESKAISDAQITASSYFTNMFATWSPSKARLHLQGRSNAWRPQVNNPKEWLQVDFQKTMKVTGVTTQGVKSLDTSMYVKEFLISSSQDGHQWTLFFQNGKVKVFQGNQDSFTPVVNSLDPPLLTRYLRIHPQSWEHQIALRMEVLGCEAQDLY

SEQ ID NO: 1645 - DNA, 4371 bp, synthetic construct
  misc_feature 1..4371: note = Variant of human B-domain deleted Factor VIII
  source 1..4371: mol_type = other DNA
atgcagattgaactgtctacctgcttcttcctctgtttgctgaggttctgctttagcgccactagacggtactaccttggcgctgtggagctgtcctgggactatatgcagagtgatttgggagagcttcccgtcgacgcacgatttcctcctcgcgttccaaagtcatttccctttaacacaagccaggtgtacaagaagacgctcttcgtcgaattcaccgatcacctgttcaatatcgccaaacccagaccaccatggatgggtcttttggggcctaccatacaagcggaggtgtatgacacagttgttatcactctcaagaaccatgcttctcatccggtaagtcttcacgcagtgggcgtgtcctactggaaagcttcagaaggagccgagtatgatgatcagacatcccagagggagaaagaagacgacaaggtatttccaggtgggtctcatacctatgtgtggcaagtgctcaaagagaatggccctatggcaagcgatccgccgtgtttgacttacagctacctttcacacgttgacctcgtcaaggacctcaactccgggttgattggagccttgttggtatgcagggaaggatctcttgccaaagagaagacacagaccctggccaagtttatccttctctttgctgtgttcgatgagggcaaaagttggcatagcgaaacgaagaattccctcatgcaggatcgcgacgcagccagcgccagagcttggcccaagatgcacactgtgaacggatatgtcaataggacgcttcctggcttgattgggtgtcatcggaaaagtgtctactggcacgtgatcggaatggggacaacaccagaggtccactccatatttctcgaaggccataccttccttgttcgaaaccacagacaggcatccttggggatctctcccattacctttctcactgcccaaacgctccttcgtgacttgggtcagttccttctcttttgccatatcccgtcacaccagcatgatggtatggaagcttatgtgaaagtcgacagttgtcctgaggagccacagttgcgcatgaagaataatgaagaagccgaggattacgacgacgatctcaccgattctgagatggacgtggtgaggtttgatgacgacaactctccctccatcattcaagctcggagcggggcgaagaaacaccccaagacttgggtccactatatagcggcggaagaggaggattgggattacgctcctcttgtattggcaccagatgaccgctcatacaaaagccagtacctcaacaacggaccgcagagaattggccggaagtataagaaagtgcgatttatggcctatacagacgaaacctttaagacaagggaggccatccagcatgagagtgggattttgggacctcttctttacggcgaagttggtgataccctcctcatcatcttcaagaatcaagcttctcgcccctataacatttacccacacgggatcactgacgttaggcctttgtatagcagaagacttcccaaaggcgtgaagcatctcaaagacttccccattttgccaggcgagatctttaagtacaaatggaccattacagtggaagatggaccgactaaatcagaccctcgatgccttacgcggtactattcctccttcgtgaattgggagagagatttggcaagcggactcataggaccactcctcatctgttacaaggaatctgtagaccagaggggtaaccagattatgagtgataaacgcaatgtgatcctttttagcgtcttcgacgagaaccggtcctggtacttgaccgagaatatacaaaggttccttcccaaccccgcaggcgttcagttggaagaccctgagtttcaggccagcaatattatgcactcaatcaacggctatgtgtttgatagtctccagctttctgtttgcctccatgaagtagcctattggtacatcttgtcaattggtgctcaaacagacttcctctccgtcttcttctccggctacacctttaagcacaagggcgtgtatgaggacactctcacactctttccattttctggagaaaccgtgttcatgagcatggagaatccaggcctttggatcttgggttgccacaacagtgattttcgcaatcggggaatgactgctctcctcaaagtcagcagctgtgattggaacacaggcgactattacgaagattcttacgaggacataagtgcctactttgactccaagaataacgccattgagcccagatcattctcccagaatcctcccgtgcttaaaaggcatcagcgcgaaggtaccagaactactcttcagtctgatcaagaggagattgactatgacgacaccattagcgtggaaatgaagaaggaggatttcgatatctatgacgaagatgagaaccagtctccgcggagctttcagaagaagacgcgacactacttcattgcagcagtcgaaaggctttgggactacggtatgtcatcatcccctcatgtgttgcgcaatagagctcagagtggaagtgttccacagttcaagaaagtcgtctttcaagagtttacagatggcagcttcacacagcctctctatcggggcgagcttaacgaacatttgggactccttggtccctatatccgagccgaagtggaggacaacattatggttacctttaggaatcaagcctctcgcccctacagcttctactcctccctcatcagttatgaggaggatcagagacaaggcgctgaaccacggaagaactttgtgaaaccgaatgagacgaagacctacttctggaaagtacagcaccacatggcccccacaaaagacgaattcgattgcaaagcatgggcgtatttttcagacgttgacttggagaaagatgtacattcaggacttattggtcctttgttggtgtgtcacactaacactctcaatccagcccatggcaggcaggtgacagtccaggaattcgctcttttctttaccatctttgatgagaccaagtcctggtacttcacggaaaacatggagcgcaattgcagagccccctgtaacatacagatggaggaccctacctttaaggaaaattatcggttccacgcaatcaacggatacattatggatacactccctggccttgtgatggctcaggaccaacgaatcaggtggtacctcctcagcatgggttctaatgagaacatacactccattcacttttcaggacatgtgttcactgtccggaagaaagaagagtataagatggccctctacaatttgtatccaggcgtgtttgagaccgttgaaatgcttccctctaaagctggcatctggagagtagagtgcttgatcggagaacatcttcacgcaggtatgagcaccttgttcctcgtgtacagcaacaaatgtcagaatccacttggcatggccagtggacacattcgcgactttcagatcacagcatctggccagtatggacaatgggccccaaagttggctcgcctccattactccggtagcataaatgcgtggtccactaaagaacctttcagctggattaaggtcgatcttcttgcccccatgatcatccacggcattaagacacagggagcgaggcagaaattctcctccctctacatctcacagttcattattatgtatagtttggacggcaagaagtggcaaacttatagaggtaacagtactggaacagacatggtgttcttcggcaacgttgatagctctggcatcaaacacaacatctttaatcctcccataatagctcggtacatcagattgcatccgacccactacagcattaggagtacactccgaatggagcttatgggttgcgacttgaattcctgttcaatgccactcggaatggagtctaaagccatctctgatgcacagataaccgccagtagctactttacgaacatgtttgctacgtggtcaccctctaaggcaaggcttcatttgcaaggccggtctaatgcctggagacctcaggtgaacaacccgaaagaatggctccaggtggactttcagaagaccatgaaagtaacaggtgtcactactcagggagttaagtccttggatactagcatgtatgtgaaggagttccttatttcctcatcacaagatggccaccagtggaccctcttctttcagaatggtaaggtcaaagtgtttcagggcaatcaagacagcttcacacccgtggtgaacagtcttgatcctccactcttgacacgataccttcgaatccatccacagtcttgggagcaccagattgcattgcgcatggaagtacttggatgcgaggctcaggacctctac

SEQ ID NO: 1646 - protein, 1457 aa, synthetic construct
  REGION 1..1457: note = Variant of human B-domain deleted Factor VIII
MQIELSTCFFLCLLRFCFSATRRYYLGAVELSWDYMQSDLGELPVDARFPPRVPKSFPFNTSQVYKKTLFVEFTDHLFNIAKPRPPWMGLLGPTIQAEVYDTVVITLKNHASHPVSLHAVGVSYWKASEGAEYDDQTSQREKEDDKVFPGGSHTYVWQVLKENGPMASDPPCLTYSYLSHVDLVKDLNSGLIGALLVCREGSLAKEKTQTLAKFILLFAVFDEGKSWHSETKNSLMQDRDAASARAWPKMHTVNGYVNRTLPGLIGCHRKSVYWHVIGMGTTPEVHSIFLEGHTFLVRNHRQASLGISPITFLTAQTLLRDLGQFLLFCHIPSHQHDGMEAYVKVDSCPEEPQLRMKNNEEAEDYDDDLTDSEMDVVRFDDDNSPSIIQARSGAKKHPKTWVHYIAAEEEDWDYAPLVLAPDDRSYKSQYLNNGPQRIGRKYKKVRFMAYTDETFKTREAIQHESGILGPLLYGEVGDTLLIIFKNQASRPYNIYPHGITDVRPLYSRRLPKGVKHLKDFPILPGEIFKYKWTITVEDGPTKSDPRCLTRYYSSFVNWERDLASGLIGPLLICYKESVDQRGNQIMSDKRNVILFSVFDENRSWYLTENIQRFLPNPAGVQLEDPEFQASNIMHSINGYVFDSLQLSVCLHEVAYWYILSIGAQTDFLSVFFSGYTFKHKGVYEDTLTLFPFSGETVFMSMENPGLWILGCHNSDFRNRGMTALLKVSSCDWNTGDYYEDSYEDISAYFDSKNNAIEPRSFSQNPPVLKRHQREGTRTTLQSDQEEIDYDDTISVEMKKEDFDIYDEDENQSPRSFQKKTRHYFIAAVERLWDYGMSSSPHVLRNRAQSGSVPQFKKVVFQEFTDGSFTQPLYRGELNEHLGLLGPYIRAEVEDNIMVTFRNQASRPYSFYSSLISYEEDQRQGAEPRKNFVKPNETKTYFWKVQHHMAPTKDEFDCKAWAYFSDVDLEKDVHSGLIGPLLVCHTNTLNPAHGRQVTVQEFALFFTIFDETKSWYFTENMERNCRAPCNIQMEDPTFKENYRFHAINGYIMDTLPGLVMAQDQRIRWYLLSMGSNENIHSIHFSGHVFTVRKKEEYKMALYNLYPGVFETVEMLPSKAGIWRVECLIGEHLHAGMSTLFLVYSNKCQNPLGMASGHIRDFQITASGQYGQWAPKLARLHYSGSINAWSTKEPFSWIKVDLLAPMIIHGIKTQGARQKFSSLYISQFIIMYSLDGKKWQTYRGNSTGTDMVFFGNVDSSGIKHNIFNPPIIARYIRLHPTHYSIRSTLRMELMGCDLNSCSMPLGMESKAISDAQITASSYFTNMFATWSPSKARLHLQGRSNAWRPQVNNPKEWLQVDFQKTMKVTGVTTQGVKSLDTSMYVKEFLISSSQDGHQWTLFFQNGKVKVFQGNQDSFTPVVNSLDPPLLTRYLRIHPQSWEHQIALRMEVLGCEAQDLY

SEQ ID NO: 1647 - DNA, 4371 bp, synthetic construct
  misc_feature 1..4371: note = Variant of human B-domain deleted Factor VIII
  source 1..4371: mol_type = other DNA
atgcagattgaactgtctacctgcttcttcctctgtttgctgaggttctgctttagcgccactagacggtactaccttggcgctgtggagctgtcctgggactatatgcagagtgatttgggagagcttcccgtcgacgcacgatttcctcctcgcgttccaaagtcatttccctttaacacaagccaggtgtacaagaagacgctcttcgtcgaattcaccgatcacctgttcaatatcgccaaacccagaccaccatggatgggtcttttggggcctaccatacaagcggaggtgtatgacacagttgttatcactctcaagaacatggcttctcatccggtaagtcttcacgcagtgggcgtgtcctactggaaagcttcagaaggagccgagtatgatgatcagacatcccagagggagaaagaagacgacaaggtatttccaggtgggtctcatacctatgtgtggcaagtgctcaaagagaatggccctatggcaagcgatccgccgtgtttgacttacagctacctttcacacgttgacctcgtcaaggacctcaactccgggttgattggagccttgttggtatgcagggaaggatctcttgccaaagagaagacacagaccctggccaagtttatccttctctttgctgtgttcgatgagggcaaaagttggcatagcgaaacgaagaattccctcatgcaggatcgcgacgcagccagcgccagagcttggcccaagatgcacactgtgaacggatatgtcaataggacgcttcctggcttgattgggtgtcatcggaaaagtgtctactggcacgtgatcggaatggggacaacaccagaggtccactccatatttctcgaaggccataccttccttgttcgaaaccacaagcaggcatccttggggatctctcccattacctttctcactgcccaaacgctccttcgtgacttgggtcagttccttctcttttgccatatcccgtcacaccagcatgatggtatggaagcttatgtgaaagtcgacagttgtcctgaggagccacagttgcgcatgaagaataatgaagaagccgaggattacgacgacgatctcaccgattctgagatggacgtggtgaggtttgatgacgacaactctccctccatcattcaagctcggagcggggcgaagaaacaccccaagacttgggtccactatatagcggcggaagaggaggattgggattacgctcctcttgtattggcaccagatgaccgctcatacaaaagccagtacctcaacaacggaccgcagagaattggccggaagtataagaaagtgcgatttatggcctatacagacgaaacctttaagacaagggaggccatccagcatgagagtgggattttgggacctcttctttacggcgaagttggtgataccctcctcatcatcttcaagaatcaagcttctcgcccctataacatttacccacacgggatcactgacgttaggcctttgtatagcagaagacttcccaaaggcgtgaagcatctcaaagacttccccattttgccaggcgagatctttaagtacaaatggaccattacagtggaagatggaccgactaaatcagaccctcgatgccttacgcggtactattcctccttcgtgaattgggagagagatttggcaagcggactcataggaccactcctcatctgttacaaggaatctgtagaccagaggggtaaccagattatgagtgataaacgcaatgtgatcctttttagcgtcttcgacgagaaccggtcctggtacttgaccgagaatatacaaaggttccttcccaaccccgcaggcgttcagttggaagaccctgagtttcaggccagcaatattatgcactcaatcaacggctatgtgtttgatagtctccagctttctgtttgcctccatgaagtagcctattggtacatcttgtcaattggtgctcaaacagacttcctctccgtcttcttctccggctacacctttaagcacaagggcgtgtatgaggacactctcacactctttccattttctggagaaaccgtgttcatgagcatggagaatccaggcctttggatcttgggttgccacaacagtgattttcgcaatcggggaatgactgctctcctcaaagtcagcagctgtgattggaacacaggcgactattacgaagattcttacgaggacataagtgcctactttgactccaagaataacgccattgagcccagatcattctcccagaatcctcccgtgcttaaaaggcatcagcgcgaaggtaccagaactactcttcagtctgatcaagaggagattgactatgacgacaccattagcgtggaaatgaagaaggaggatttcgatatctatgacgaagatgagaaccagtctccgcggagctttcagaagaagacgcgacactacttcattgcagcagtcgaaaggctttgggactacggtatgtcatcatcccctcatgtgttgcgcaatagagctcagagtggaagtgttccacagttcaagaaagtcgtctttcaagagtttacagatggcagcttcacacagcctctctatcggggcgagcttaacgaacatttgggactccttggtccctatatccgagccgaagtggaggacaacattatggttacctttaggaatcaagcctctcgcccctacagcttctactcctccctcatcagttatgaggaggatcagagacaaggcgctgaaccacggaagaactttgtgaaaccgaatgagacgaagacctacttctggaaagtacagcaccacatggcccccacaaaagacgaattcgattgcaaagcatgggcgtatttttcagacgttgacttggagaaagatgtacattcaggacttattggtcctttgttggtgtgtcacactaacactctcaatccagcccatggcaggcaggtgacagtccaggaattcgctcttttctttaccatctttgatgagaccaagtcctggtacttcacggaaaacatggagcgcaattgcagagccccctgtaacatacagatggaggaccctacctttaaggaaaattatcggttccacgcaatcaacggatacattatggatacactccctggccttgtgatggctcaggaccaacgaatcaggtggtacctcctcagcatgggttctaatgagaacatacactccattcacttttcaggacatgtgttcactgtccggaagaaagaagagtataagatggccctctacaatttgtatccaggcgtgtttgagaccgttgaaatgcttccctctaaagctggcatctggagagtagagtgcttgatcggagaacatcttcacgcaggtatgagcaccttgttcctcgtgtacagcaacaaatgtcagaatccacttggcatggccagtggacacattcgcgactttcagatcacagcatctggccagtatggacaatgggccccaaagttggctcgcctccattactccggtagcataaatgcgtggtccactaaagaacctttcagctggattaaggtcgatcttcttgcccccatgatcatccacggcattaagacacagggagcgaggcagaaattctcctccctctacatctcacagttcattattatgtatagtttggacggcaagaagtggcaaacttatagaggtaacagtactggaacagacatggtgttcttcggcaacgttgatagctctggcatcaaacacaacatctttaatcctcccataatagctcggtacatcagattgcatccgacccactacagcattaggagtacactccgaatggagcttatgggttgcgacttgaattcctgttcaatgccactcggaatggagtctaaagccatctctgatgcacagataaccgccagtagctactttacgaacatgtttgctacgtggtcaccctctaaggcaaggcttcatttgcaaggccggtctaatgcctggagacctcaggtgaacaacccgaaagaatggctccaggtggactttcagaagaccatgaaagtaacaggtgtcactactcagggagttaagtccttggatactagcatgtatgtgaaggagttccttatttcctcatcacaagatggccaccagtggaccctcttctttcagaatggtaaggtcaaagtgtttcagggcaatcaagacagcttcacacccgtggtgaacagtcttgatcctccactcttgacacgataccttcgaatccatccacagtcttgggagcaccagattgcattgcgcatggaagtacttggatgcgaggctcaggacctctac

SEQ ID NO: 1648 - protein, 1457 aa, synthetic construct
  REGION 1..1457: note = Variant of human B-domain deleted Factor VIII
MQIELSTCFFLCLLRFCFSATRRYYLGAVELSWDYMQSDLGELPVDARFPPRVPKSFPFNTSQVYKKTLFVEFTDHLFNIAKPRPPWMGLLGPTIQAEVYDTVVITLKNMASHPVSLHAVGVSYWKASEGAEYDDQTSQREKEDDKVFPGGSHTYVWQVLKENGPMASDPPCLTYSYLSHVDLVKDLNSGLIGALLVCREGSLAKEKTQTLAKFILLFAVFDEGKSWHSETKNSLMQDRDAASARAWPKMHTVNGYVNRTLPGLIGCHRKSVYWHVIGMGTTPEVHSIFLEGHTFLVRNHKQASLGISPITFLTAQTLLRDLGQFLLFCHIPSHQHDGMEAYVKVDSCPEEPQLRMKNNEEAEDYDDDLTDSEMDVVRFDDDNSPSIIQARSGAKKHPKTWVHYIAAEEEDWDYAPLVLAPDDRSYKSQYLNNGPQRIGRKYKKVRFMAYTDETFKTREAIQHESGILGPLLYGEVGDTLLIIFKNQASRPYNIYPHGITDVRPLYSRRLPKGVKHLKDFPILPGEIFKYKWTITVEDGPTKSDPRCLTRYYSSFVNWERDLASGLIGPLLICYKESVDQRGNQIMSDKRNVILFSVFDENRSWYLTENIQRFLPNPAGVQLEDPEFQASNIMHSINGYVFDSLQLSVCLHEVAYWYILSIGAQTDFLSVFFSGYTFKHKGVYEDTLTLFPFSGETVFMSMENPGLWILGCHNSDFRNRGMTALLKVSSCDWNTGDYYEDSYEDISAYFDSKNNAIEPRSFSQNPPVLKRHQREGTRTTLQSDQEEIDYDDTISVEMKKEDFDIYDEDENQSPRSFQKKTRHYFIAAVERLWDYGMSSSPHVLRNRAQSGSVPQFKKVVFQEFTDGSFTQPLYRGELNEHLGLLGPYIRAEVEDNIMVTFRNQASRPYSFYSSLISYEEDQRQGAEPRKNFVKPNETKTYFWKVQHHMAPTKDEFDCKAWAYFSDVDLEKDVHSGLIGPLLVCHTNTLNPAHGRQVTVQEFALFFTIFDETKSWYFTENMERNCRAPCNIQMEDPTFKENYRFHAINGYIMDTLPGLVMAQDQRIRWYLLSMGSNENIHSIHFSGHVFTVRKKEEYKMALYNLYPGVFETVEMLPSKAGIWRVECLIGEHLHAGMSTLFLVYSNKCQNPLGMASGHIRDFQITASGQYGQWAPKLARLHYSGSINAWSTKEPFSWIKVDLLAPMIIHGIKTQGARQKFSSLYISQFIIMYSLDGKKWQTYRGNSTGTDMVFFGNVDSSGIKHNIFNPPIIARYIRLHPTHYSIRSTLRMELMGCDLNSCSMPLGMESKAISDAQITASSYFTNMFATWSPSKARLHLQGRSNAWRPQVNNPKEWLQVDFQKTMKVTGVTTQGVKSLDTSMYVKEFLISSSQDGHQWTLFFQNGKVKVFQGNQDSFTPVVNSLDPPLLTRYLRIHPQSWEHQIALRMEVLGCEAQDLY

SEQ ID NO: 1649 - DNA, 4371 bp, synthetic construct
  misc_feature 1..4371: note = Variant of human B-domain deleted Factor VIII
  source 1..4371: mol_type = other DNA
atgcagattgaactgtctacctgcttcttcctctgtttgctgaggttctgctttagcgccactagacggtactaccttggcgctgtggagctgtcctgggactatatgcagagtgatttgggagagcttcccgtcgacgcacgatttcctcctcgcgttccaaagtcatttccctttaacacaagccaggtgtacaagaagacgctcttcgtcgaattcaccgatcacctgttcaatatcgccaaacccagaccaccatggatgggtcttttggggcctaccatacaagcggaggtgtatgacacagttgttatcactctcaagaacatggcttctcatccggtaagtcttcacgcagtgggcgtgtcctactggaaagcttcagaaggagccgagtatgatgatcagacatcccagagggagaaagaagacgacaaggtatttccaggtgggtctcatacctatgtgtggcaagtgctcaaagagaatggccctatggcaagcgatccgccgtgtttgacttacagctacctttcacacgttgacctcgtcaaggacctcaactccgggttgattggagccttgttggtatgcagggaaggatctcttgccaaagagaagacacagaccctggccaagtttatccttctctttgctgtgttcgatgagggcaaaagttggcatagcgaaacgaagaattccctcatgcaggatcgcgacgcagccagcgccagagcttggcccaagatgcacactgtgaacggatatgtcaataggacgcttcctggcttgattgggtgtcatcggaaaagtgtctactggcacgtgatcggaatggggacaacaccagaggtccactccatatttctcgaaggccataccttccttgttcgaaaccacagacaggcatccttggggatctctcccattacctttctcactgcccaaacgctccttcgtgacttgggtcagttccttctcttttgccatatcccgtcacaccagcatgatggtatggaagcttatgtgaaagtcgacagttgtcctgaggagccacagttgcgcatgaagaataatgaagaagccgaggattacgacgacgatctcaccgattctgagatggacgtggtgaggtttgatgacgacaactctccctccatcattcaagctcggagcggggcgaagaaacaccccaagacttgggtccactatatagcggcggaagaggaggattgggattacgctcctcttgtattggcaccagatgaccgctcatacaaaagccagtacctcaacaacggaccgcagagaattggccggaagtataagaaagtgcgatttatggcctatacagacgaaacctttaagacaagggaggccatccagcatgagagtgggattttgggacctcttctttacggcgaagttggtgataccctcctcatcatcttcaagaatcaagcttctcgcccctataacatttacccacacgggatcactgacgttaggcctttgtatagcagaagacttcccaaaggcgtgaagcatctcaaagacttccccattttgccaggcgagatctttaagtacaaatggaccattacagtggaagatggaccgactaaatcagaccctcgatgccttacgcggtactattcctccttcgtgaattgggagagagatttggcaagcggactcataggaccactcctcatctgttacaaggaatctgtagaccagaggggtaaccagattatgagtgataaacgcaatgtgatcctttttagcgtcttcgacgagaaccggtcctggtacttgaccgagaatatacaaaggttccttcccaaccccgcaggcgttcagttggaagaccctgagtttcaggccagcaatattatgcactcaatcaacggctatgtgtttgatagtctccagctttctgtttgcctccatgaagtagcctattggtacatcttgtcaattggtgctcaaacagacttcctctccgtcttcttctccggctacacctttaagcacaagggcgtgtatgaggacactctcacactctttccattttctggagaaaccgtgttcatgagcatggagaatccaggcctttggatcttgggttgccacaacagtgattttcgcaatcggggaatgactgctctcctcaaagtcagcagctgtgattggaacacaggcgactattacgaagattcttacgaggacataagtgcctactttgactccaagaataacgccattgagcccagatcattctcccagaatcctcccgtgcttaaaaggcatcagcgcgaaggtaccagaactactcttcagtctgatcaagaggagattgactatgacgacaccattagcgtggaaatgaagaaggaggatttcgatatctatgacgaagatgagaaccagtctccgcggagctttcagaagaagacgcgacactacttcattgcagcagtcgaaaggctttgggactacggtatgtcatcatcccctcatgtgttgcgcaatagagctcagagtggaagtgttccacagttcaagaaagtcgtctttcaagagtttacagatggcagcttcacacagcctctctatcggggcgagcttaacgaacatttgggactccttggtccctatatccgagccgaagtggaggacaacattatggttacctttaggaatcaagcctctcgcccctacagcttctactcctccctcatcagttatgaggaggatcagagacaaggcgctgaaccacggaagaactttgtgaaaccgaatgagacgaagacctacttctggaaagtacagcaccacatggcccccacaaaagacgaattcgattgcaaagcatgggcgtatttttcagacgttgacttggagaaagatgtacattcaggacttattggtcctttgttggtgtgtcacactaacactctcaatccagcccatggcaggcaggtgacagtccaggaattcgctcttttctttaccatctttgatgagaccaagtcctggtacttcacggaaaacatggagcgcaattgcagagccccctgtaacatacagatggaggaccctacctttaaggaaaattatcggttccacgcaatcaacggatacattatggatacactccctggccttgtgatggctcaggaccaacgaatcaggtggtacctcctcagcatgggttctaatgagaactcgcactccattcacttttcaggacatgtgttcactgtccggaagaaagaagagtataagatggccctctacaatttgtatccaggcgtgtttgagaccgttgaaatgcttccctctaaagctggcatctggagagtagagtgcttgatcggagaacatcttcacgcaggtatgagcaccttgttcctcgtgtacagcaacaaatgtcagaatccacttggcatggccagtggacacattcgcgactttcagatcacagcatctggccagtatggacaatgggccccaaagttggctcgcctccattactccggtagcataaatgcgtggtccactaaagaacctttcagctggattaaggtcgatcttcttgcccccatgatcatccacggcattaagacacagggagcgaggcagaaattctcctccctctacatctcacagttcattattatgtatagtttggacggcaagaagtggcaaacttatagaggtaacagtactggaacagacatggtgttcttcggcaacgttgatagctctggcatcaaacacaacatctttaatcctcccataatagctcggtacatcagattgcatccgacccactacagcattaggagtacactccgaatggagcttatgggttgcgacttgaattcctgttcaatgccactcggaatggagtctaaagccatctctgatgcacagataaccgccagtagctactttacgaacatgtttgctacgtggtcaccctctaaggcaaggcttcatttgcaaggccggtctaatgcctggagacctcaggtgaacaacccgaaagaatggctccaggtggactttcagaagaccatgaaagtaacaggtgtcactactcagggagttaagtccttggatactagcatgtatgtgaaggagttccttatttcctcatcacaagatggccaccagtggaccctcttctttcagaatggtaaggtcaaagtgtttcagggcaatcaagacagcttcacacccgtggtgaacagtcttgatcctccactcttgacacgataccttcgaatccatccacagtcttgggagcaccagattgcattgcgcatggaagtacttggatgcgaggctcaggacctctac

SEQ ID NO: 1650 - protein, 1457 aa, synthetic construct
  REGION 1..1457: note = Variant of human B-domain deleted Factor VIII
MQIELSTCFFLCLLRFCFSATRRYYLGAVELSWDYMQSDLGELPVDARFPPRVPKSFPFNTSQVYKKTLFVEFTDHLFNIAKPRPPWMGLLGPTIQAEVYDTVVITLKNMASHPVSLHAVGVSYWKASEGAEYDDQTSQREKEDDKVFPGGSHTYVWQVLKENGPMASDPPCLTYSYLSHVDLVKDLNSGLIGALLVCREGSLAKEKTQTLAKFILLFAVFDEGKSWHSETKNSLMQDRDAASARAWPKMHTVNGYVNRTLPGLIGCHRKSVYWHVIGMGTTPEVHSIFLEGHTFLVRNHRQASLGISPITFLTAQTLLRDLGQFLLFCHIPSHQHDGMEAYVKVDSCPEEPQLRMKNNEEAEDYDDDLTDSEMDVVRFDDDNSPSIIQARSGAKKHPKTWVHYIAAEEEDWDYAPLVLAPDDRSYKSQYLNNGPQRIGRKYKKVRFMAYTDETFKTREAIQHESGILGPLLYGEVGDTLLIIFKNQASRPYNIYPHGITDVRPLYSRRLPKGVKHLKDFPILPGEIFKYKWTITVEDGPTKSDPRCLTRYYSSFVNWERDLASGLIGPLLICYKESVDQRGNQIMSDKRNVILFSVFDENRSWYLTENIQRFLPNPAGVQLEDPEFQASNIMHSINGYVFDSLQLSVCLHEVAYWYILSIGAQTDFLSVFFSGYTFKHKGVYEDTLTLFPFSGETVFMSMENPGLWILGCHNSDFRNRGMTALLKVSSCDWNTGDYYEDSYEDISAYFDSKNNAIEPRSFSQNPPVLKRHQREGTRTTLQSDQEEIDYDDTISVEMKKEDFDIYDEDENQSPRSFQKKTRHYFIAAVERLWDYGMSSSPHVLRNRAQSGSVPQFKKVVFQEFTDGSFTQPLYRGELNEHLGLLGPYIRAEVEDNIMVTFRNQASRPYSFYSSLISYEEDQRQGAEPRKNFVKPNETKTYFWKVQHHMAPTKDEFDCKAWAYFSDVDLEKDVHSGLIGPLLVCHTNTLNPAHGRQVTVQEFALFFTIFDETKSWYFTENMERNCRAPCNIQMEDPTFKENYRFHAINGYIMDTLPGLVMAQDQRIRWYLLSMGSNENSHSIHFSGHVFTVRKKEEYKMALYNLYPGVFETVEMLPSKAGIWRVECLIGEHLHAGMSTLFLVYSNKCQNPLGMASGHIRDFQITASGQYGQWAPKLARLHYSGSINAWSTKEPFSWIKVDLLAPMIIHGIKTQGARQKFSSLYISQFIIMYSLDGKKWQTYRGNSTGTDMVFFGNVDSSGIKHNIFNPPIIARYIRLHPTHYSIRSTLRMELMGCDLNSCSMPLGMESKAISDAQITASSYFTNMFATWSPSKARLHLQGRSNAWRPQVNNPKEWLQVDFQKTMKVTGVTTQGVKSLDTSMYVKEFLISSSQDGHQWTLFFQNGKVKVFQGNQDSFTPVVNSLDPPLLTRYLRIHPQSWEHQIALRMEVLGCEAQDLY

SEQ ID NO: 1651 - DNA, 4371 bp, synthetic construct
  misc_feature 1..4371: note = Variant of human B-domain deleted Factor VIII
  source 1..4371: mol_type = other DNA
atgcagattgaactgtctacctgcttcttcctctgtttgctgaggttctgctttagcgccactagacggtactaccttggcgctgtggagctgtcctgggactatatgcagagtgatttgggagagcttcccgtcgacgcacgatttcctcctcgcgttccaaagtcatttccctttaacacaagccaggtgtacaagaagacgctcttcgtcgaattcaccgatcacctgttcaatatcgccaaacccagaccaccatggatgggtcttttggggcctaccatacaagcggaggtgtatgacacagttgttatcactctcaagaacatggcttctcatccggtaagtcttcacgcagtgggcgtgtcctactggaaagcttcagaaggagccgagtatgatgatcagacatcccagagggagaaagaagacgacaaggtatttccaggtgggtctcatacctatgtgtggcaagtgctcaaagagaatggccctatggcaagcgatccgccgtgtttgacttacagctacctttcacacgttgacctcgtcaaggacctcaactccgggttgattggagccttgttggtatgcagggaaggatctcttgccaaagagaagacacagaccctggccaagtttatccttctctttgctgtgttcgatgagggcaaaagttggcatagcgaaacgaagaattccctcatgcaggatcgcgacgcagccagcgccagagcttggcccaagatgcacactgtgaacggatatgtcaataggacgcttcctggcttgattgggtgtcatcggaaaagtgtctactggcacgtgatcggaatggggacaacaccagaggtccactccatatttctcgaaggccataccttccttgttcgaaaccacagacaggcatccttggggatctctcccattacctttctcactgcccaaacgctccttcgtgacttgggtcagttccttctcttttgccatatcccgtcacaccagcatgatggtatggaagcttatgtgaaagtcgacagttgtcctgaggagccacagttgcgcatgaagaataatgaagaagccgaggattacgacgacgatctcaccgattctgagatggacgtggtgaggtttgatgacgacaactctccctccatcattcaagctcggagcggggcgaagaaacaccccaagacttgggtccactatatagcggcggaagaggaggattgggattacgctcctcttgtattggcaccagatgaccgctcatacaaaagccagtacctcaacaacggaccgcagagaattggccggaagtataagaaagtgcgatttatggcctatacagacgaaacctttaagacaagggaggccatccagcatgagagtgggattttgggacctcttctttacggcgaagttggtgataccctcctcatcatcttcaagaatcaagcttctcgcccctataacatttacccacacgggatcactgacgttaggcctttgtatagcagaagacttcccaaaggcgtgaagcatctcaaagacttccccattttgccaggcgagatctttaagtacaaatggaccattacagtggaagatggaccgactaaatcagaccctcgatgccttacgcggtactattcctccttcgtgaattgggagagagatttggcaagcggactcataggaccactcctcatctgttacaaggaatctgtagaccagaggggtaaccagattatgagtgataaacgcaatgtgatcctttttagcgtcttcgacgagaaccggtcctggtacttgaccgagaatatacaaaggttccttcccaaccccgcaggcgttcagttggaagaccctgagtttcaggccagcaatattatgcactcaatcaacggctatgtgtttgatagtctccagctttctgtttgcctccatgaagtagcctattggtacatcttgtcaattggtgctcaaacagacttcctctccgtcttcttctccggctacacctttaagcacaagggcgtgtatgaggacactctcacactctttccattttctggagaaaccgtgttcatgagcatggagaatccaggcctttggatcttgggttgccacaacagtgattttcgcaatcggggaatgactgctctcctcaaagtcagcagctgtgattggaacacaggcgactattacgaagattcttacgaggacataagtgcctactttgactccaagaataacgccattgagcccagatcattctcccagaatcctcccgtgcttaaaaggcatcagcgcgaaggtaccagaactactcttcagtctgatcaagaggagattgactatgacgacaccattagcgtggaaatgaagaaggaggatttcgatatctatgacgaagatgagaaccaggggccgcggagctttcagaagaagacgcgacactacttcattgcagcagtcgaaaggctttgggactacggtatgtcatcatcccctcatgtgttgcgcaatagagctcagagtggaagtgttccacagttcaagaaagtcgtctttcaagagtttacagatggcagcttcacacagcctctctatcggggcgagcttaacgaacatttgggactccttggtccctatatccgagccgaagtggaggacaacattatggttacctttaggaatcaagcctctcgcccctacagcttctactcctccctcatcagttatgaggaggatcagagacaaggcgctgaaccacggaagaactttgtgaaaccgaatgagacgaagacctacttctggaaagtacagcaccacatggcccccacaaaagacgaattcgattgcaaagcatgggcgtatttttcagacgttgacttggagaaagatgtacattcaggacttattggtcctttgttggtgtgtcacactaacactctcaatccagcccatggcaggcaggtgacagtccaggaattcgctcttttctttaccatctttgatgagaccaagtcctggtacttcacggaaaacatggagcgcaattgcagagccccctgtaacatacagatggaggaccctacctttaaggaaaattatcggttccacgcaatcaacggatacattatggatacactccctggccttgtgatggctcaggaccaacgaatcaggtggtacctcctcagcatgggttctaatgagaacatacactccattcacttttcaggacatgtgttcactgtccggaagaaagaagagtataagatggccctctacaatttgtatccaggcgtgtttgagaccgttgaaatgcttccctctaaagctggcatctggagagtagagtgcttgatcggagaacatcttcacgcaggtatgagcaccttgttcctcgtgtacagcaacaaatgtcagaatccacttggcatggccagtggacacattcgcgactttcagatcacagcatctggccagtatggacaatgggccccaaagttggctcgcctccattactccggtagcataaatgcgtggtccactaaagaacctttcagctggattaaggtcgatcttcttgcccccatgatcatccacggcattaagacacagggagcgaggcagaaattctcctccctctacatctcacagttcattattatgtatagtttggacggcaagaagtggcaaacttatagaggtaacagtactggaacagacatggtgttcttcggcaacgttgatagctctggcatcaaacacaacatctttaatcctcccataatagctcggtacatcagattgcatccgacccactacagcattaggagtacactccgaatggagcttatgggttgcgacttgaattcctgttcaatgccactcggaatggagtctaaagccatctctgatgcacagataaccgccagtagctactttacgaacatgtttgctacgtggtcaccctctaaggcaaggcttcatttgcaaggccggtctaatgcctggagacctcaggtgaacaacccgaaagaatggctccaggtggactttcagaagaccatgaaagtaacaggtgtcactactcagggagttaagtccttggatactagcatgtatgtgaaggagttccttatttcctcatcacaagatggccaccagtggaccctcttctttcagaatggtaaggtcaaagtgtttcagggcaatcaagacagcttcacacccgtggtgaacagtcttgatcctccactcttgacacgataccttcgaatccatccacagtcttgggagcaccagattgcattgcgcatggaagtacttggatgcgaggctcaggacctctac

SEQ ID NO: 1652 - protein, 1457 aa, synthetic construct
  REGION 1..1457: note = Variant of human B-domain deleted Factor VIII
MQIELSTCFFLCLLRFCFSATRRYYLGAVELSWDYMQSDLGELPVDARFPPRVPKSFPFNTSQVYKKTLFVEFTDHLFNIAKPRPPWMGLLGPTIQAEVYDTVVITLKNMASHPVSLHAVGVSYWKASEGAEYDDQTSQREKEDDKVFPGGSHTYVWQVLKENGPMASDPPCLTYSYLSHVDLVKDLNSGLIGALLVCREGSLAKEKTQTLAKFILLFAVFDEGKSWHSETKNSLMQDRDAASARAWPKMHTVNGYVNRTLPGLIGCHRKSVYWHVIGMGTTPEVHSIFLEGHTFLVRNHRQASLGISPITFLTAQTLLRDLGQFLLFCHIPSHQHDGMEAYVKVDSCPEEPQLRMKNNEEAEDYDDDLTDSEMDVVRFDDDNSPSIIQARSGAKKHPKTWVHYIAAEEEDWDYAPLVLAPDDRSYKSQYLNNGPQRIGRKYKKVRFMAYTDETFKTREAIQHESGILGPLLYGEVGDTLLIIFKNQASRPYNIYPHGITDVRPLYSRRLPKGVKHLKDFPILPGEIFKYKWTITVEDGPTKSDPRCLTRYYSSFVNWERDLASGLIGPLLICYKESVDQRGNQIMSDKRNVILFSVFDENRSWYLTENIQRFLPNPAGVQLEDPEFQASNIMHSINGYVFDSLQLSVCLHEVAYWYILSIGAQTDFLSVFFSGYTFKHKGVYEDTLTLFPFSGETVFMSMENPGLWILGCHNSDFRNRGMTALLKVSSCDWNTGDYYEDSYEDISAYFDSKNNAIEPRSFSQNPPVLKRHQREGTRTTLQSDQEEIDYDDTISVEMKKEDFDIYDEDENQGPRSFQKKTRHYFIAAVERLWDYGMSSSPHVLRNRAQSGSVPQFKKVVFQEFTDGSFTQPLYRGELNEHLGLLGPYIRAEVEDNIMVTFRNQASRPYSFYSSLISYEEDQRQGAEPRKNFVKPNETKTYFWKVQHHMAPTKDEFDCKAWAYFSDVDLEKDVHSGLIGPLLVCHTNTLNPAHGRQVTVQEFALFFTIFDETKSWYFTENMERNCRAPCNIQMEDPTFKENYRFHAINGYIMDTLPGLVMAQDQRIRWYLLSMGSNENIHSIHFSGHVFTVRKKEEYKMALYNLYPGVFETVEMLPSKAGIWRVECLIGEHLHAGMSTLFLVYSNKCQNPLGMASGHIRDFQITASGQYGQWAPKLARLHYSGSINAWSTKEPFSWIKVDLLAPMIIHGIKTQGARQKFSSLYISQFIIMYSLDGKKWQTYRGNSTGTDMVFFGNVDSSGIKHNIFNPPIIARYIRLHPTHYSIRSTLRMELMGCDLNSCSMPLGMESKAISDAQITASSYFTNMFATWSPSKARLHLQGRSNAWRPQVNNPKEWLQVDFQKTMKVTGVTTQGVKSLDTSMYVKEFLISSSQDGHQWTLFFQNGKVKVFQGNQDSFTPVVNSLDPPLLTRYLRIHPQSWEHQIALRMEVLGCEAQDLY

SEQ ID NO: 1653 - DNA, 4371 bp, synthetic construct
  misc_feature 1..4371: note = Variant of human B-domain deleted Factor VIII
  source 1..4371: mol_type = other DNA
atgcagattgaactgtctacctgcttcttcctctgtttgctgaggttctgctttagcgccactagacggtactaccttggcgctgtggagctgtcctgggactatatgcagagtgatttgggagagcttcccgtcgacgcacgatttcctcctcgcgttccaaagtcatttccctttaacacaagccaggtgtacaagaagacgctcttcgtcgaattcaccgatcacctgttcaatatcgccaaacccagaccaccatggatgggtcttttggggcctaccatacaagcggaggtgtatgacacagttgttatcactctcaagaacatggcttctcatccggtaagtcttcacgcagtgggcgtgtcctactggaaagcttcagaaggagccgagtatgatgatcagacatcccagagggagaaagaagacgacaaggtatttccaggtgggtctcatacctatgtgtggcaagtgctcaaagagaatggccctatggcaagcgatccgccgtgtttgacttacagctacctttcacacgttgacctcgtcaaggacctcaactccgggttgattggagccttgttggtatgcagggaaggatctcttgccaaagagaagacacagaccctggccaagtttatccttctctttgctgtgttcgatgagggcaaaagttggcatagcgaaacgaagaattccctcatgcaggatcgcgacgcagccagcgccagagcttggcccaagatgcacactgtgaacggatatgtcaataggacgcttcctggcttgattgggtgtcatcggaaaagtgtctactggcacgtgatcggaatggggacaacaccagaggtccactccatatttctcgaaggccataccttccttgttcgaaaccacagacaggcatccttggggatctctcccattacctttctcactgcccaaacgctccttcgtgacttgggtcagttccttctcttttgccatatcccgtcacaccagcatgatggtatggaagcttatgtgaaagtcgacagttgtcctgaggagccacagttgcgcatgaagaataatgaagaagccgaggattacgacgacgatctcaccgattctgagatggacgtggtgaggtttgatgacgacaactctccctccatcattcaagctcggagcggggcgaagaaacaccccaagacttgggtccactatatagcggcggaagaggaggattgggattacgctcctcttgtattggcaccagatgaccgctcatacaaaagccagtacctcaacaacggaccgcagagaattggccggaagtataagaaagtgcgatttatggcctatacagacgaaacctttaagacaagggaggccatccagcatgagagtgggattttgggacctcttctttacggcgaagttggtgataccctcctcatcatcttcaagaatcaagcttctcgcccctataacatttacccacacgggatcactgacgttaggcctttgtatagcagaagacttcccaaaggcgtgaagcatctcaaagacttccccattttgccaggcgagatctttaagtacaaatggaccattacagtggaagatggaccgactaaatcagaccctcgatgccttacgcggtactattcctccttcgtgaattgggagagagatttggcaagcggactcataggaccactcctcatctgttacaaggaatctgtagaccagaggggtaaccagattatgagtgataaacgcaatgtgatcctttttagcgtcttcgacgagaaccggtcctggtacttgaccgagaatatacaaaggttccttcccaaccccgcaggcgttcagttggaagaccctgagtttcaggccagcaatattatgcactcaatcaacggctatgtgtttgatagtctccagctttctgtttgcctccatgaagtagcctattggtacatcttgtcaattggtgctcaaacagacttcctctccgtcttcttctccggctacacctttaagcacaagggcgtgtatgaggacactctcacactctttccattttctggagaaaccgtgttcatgagcatggagaatccaggcctttggatcttgggttgccacaacagtgattttcgcaatcggggaatgactgctctcctcaaagtcagcagctgtgattggaacacaggcgactattacgaagattcttacgaggacataagtgcctactttgactccaagaataacgccattgagcccagatcattctcccagaatcctcccgtgcttaaaaggcatcagcgcgaaggtaccagaactactcttcagtctgatcaagagtgtattgactatgacgacaccattagcgtggaaatgaagaaggaggatttcgatatctatgacgaagatgagaaccagtctccgcggagctttcagaagaagacgcgacactacttcattgcagcagtcgaaaggctttgggactacggtatgtcatcatcccctcatgtgttgcgcaatagagctcagagtggaagtgttccacagttcaagaaagtcgtctttcaagagtttacagatggcagcttcacacagcctctctatcggggcgagcttaacgaacatttgggactccttggtccctatatccgagccgaagtggaggacaacattatggttacctttaggaatcaagcctctcgcccctacagcttctactcctccctcatcagttatgaggaggatcagagacaaggcgctgaaccacggaagaactttgtgaaaccgaatgagacgaagacctacttctggaaagtacagcaccacatggcccccacaaaagacgaattcgattgcaaagcatgggcgtatttttcagacgttgacttggagaaagatgtacattcaggacttattggtcctttgttggtgtgtcacactaacactctcaatccagcccatggcaggcaggtgacagtccaggaattcgctcttttctttaccatctttgatgagaccaagtcctggtacttcacggaaaacatggagcgcaattgcagagccccctgtaacatacagatggaggaccctacctttaaggaaaattatcggttccacgcaatcaacggatacattatggatacactccctggccttgtgatggctcaggaccaacgaatcaggtggtacctcctcagcatgggttctaatgagaacatacactccattcacttttcaggacatgtgttcactgtccggaagaaagaagagtataagatggccctctacaatttgtatccaggcgtgtttgagaccgttgaaatgcttccctctaaagctggcatctggagagtagagtgcttgatcggagaacatcttcacgcaggtatgagcaccttgttcctcgtgtacagcaacaaatgtcagaatccacttggcatggccagtggacacattcgcgactttcagatcacagcatctggccagtatggacaatgggccccaaagttggctcgcctccattactccggtagcataaatgcgtggtccactaaagaacctttcagctggattaaggtcgatcttcttgcccccatgatcatccacggcattaagacacagggagcgaggcagaaattctcctccctctacatctcacagttcattattatgtatagtttggacggcaagaagtggcaaacttatagaggtaacagtactggaacagacatggtgttcttcggcaacgttgatagctctggcatcaaacacaacatctttaatcctcccataatagctcggtacatcagattgcatccgacccactacagcattaggagtacactccgaatggagcttatgggttgcgacttgaattcctgttcaatgccactcggaatggagtctaaagccatctctgatgcacagataaccgccagtagctactttacgaacatgtttgctacgtggtcaccctctaaggcaaggcttcatttgcaaggccggtctaatgcctggagacctcaggtgaacaacccgaaagaatggctccaggtggactttcagaagaccatgaaagtaacaggtgtcactactcagggagttaagtccttggatactagcatgtatgtgaaggagttccttatttcctcatcacaagatggccaccagtggaccctcttctttcagaatggtaaggtcaaagtgtttcagggcaatcaagacagcttcacacccgtggtgaacagtcttgatcctccactcttgacacgataccttcgaatccatccacagtcttgggagcaccagattgcattgcgcatggaagtacttggatgcgaggctcaggacctctac

SEQ ID NO: 1654 - protein, 1457 aa, synthetic construct
  REGION 1..1457: note = Variant of human B-domain deleted Factor VIII
MQIELSTCFFLCLLRFCFSATRRYYLGAVELSWDYMQSDLGELPVDARFPPRVPKSFPFNTSQVYKKTLFVEFTDHLFNIAKPRPPWMGLLGPTIQAEVYDTVVITLKNMASHPVSLHAVGVSYWKASEGAEYDDQTSQREKEDDKVFPGGSHTYVWQVLKENGPMASDPPCLTYSYLSHVDLVKDLNSGLIGALLVCREGSLAKEKTQTLAKFILLFAVFDEGKSWHSETKNSLMQDRDAASARAWPKMHTVNGYVNRTLPGLIGCHRKSVYWHVIGMGTTPEVHSIFLEGHTFLVRNHRQASLGISPITFLTAQTLLRDLGQFLLFCHIPSHQHDGMEAYVKVDSCPEEPQLRMKNNEEAEDYDDDLTDSEMDVVRFDDDNSPSIIQARSGAKKHPKTWVHYIAAEEEDWDYAPLVLAPDDRSYKSQYLNNGPQRIGRKYKKVRFMAYTDETFKTREAIQHESGILGPLLYGEVGDTLLIIFKNQASRPYNIYPHGITDVRPLYSRRLPKGVKHLKDFPILPGEIFKYKWTITVEDGPTKSDPRCLTRYYSSFVNWERDLASGLIGPLLICYKESVDQRGNQIMSDKRNVILFSVFDENRSWYLTENIQRFLPNPAGVQLEDPEFQASNIMHSINGYVFDSLQLSVCLHEVAYWYILSIGAQTDFLSVFFSGYTFKHKGVYEDTLTLFPFSGETVFMSMENPGLWILGCHNSDFRNRGMTALLKVSSCDWNTGDYYEDSYEDISAYFDSKNNAIEPRSFSQNPPVLKRHQREGTRTTLQSDQECIDYDDTISVEMKKEDFDIYDEDENQSPRSFQKKTRHYFIAAVERLWDYGMSSSPHVLRNRAQSGSVPQFKKVVFQEFTDGSFTQPLYRGELNEHLGLLGPYIRAEVEDNIMVTFRNQASRPYSFYSSLISYEEDQRQGAEPRKNFVKPNETKTYFWKVQHHMAPTKDEFDCKAWAYFSDVDLEKDVHSGLIGPLLVCHTNTLNPAHGRQVTVQEFALFFTIFDETKSWYFTENMERNCRAPCNIQMEDPTFKENYRFHAINGYIMDTLPGLVMAQDQRIRWYLLSMGSNENIHSIHFSGHVFTVRKKEEYKMALYNLYPGVFETVEMLPSKAGIWRVECLIGEHLHAGMSTLFLVYSNKCQNPLGMASGHIRDFQITASGQYGQWAPKLARLHYSGSINAWSTKEPFSWIKVDLLAPMIIHGIKTQGARQKFSSLYISQFIIMYSLDGKKWQTYRGNSTGTDMVFFGNVDSSGIKHNIFNPPIIARYIRLHPTHYSIRSTLRMELMGCDLNSCSMPLGMESKAISDAQITASSYFTNMFATWSPSKARLHLQGRSNAWRPQVNNPKEWLQVDFQKTMKVTGVTTQGVKSLDTSMYVKEFLISSSQDGHQWTLFFQNGKVKVFQGNQDSFTPVVNSLDPPLLTRYLRIHPQSWEHQIALRMEVLGCEAQDLY

SEQ ID NO: 1655 - DNA, 4371 bp, synthetic construct
  misc_feature 1..4371: note = Variant of human B-domain deleted Factor VIII
  source 1..4371: mol_type = other DNA
atgcagattgaactgtctacctgcttcttcctctgtttgctgaggttctgctttagcgccactagacggtactaccttggcgctgtggagctgtcctgggactatatgcagagtgatttgggagagcttcccgtcgacgcacgatttcctcctcgcgttccaaagtcatttccctttaacacaagccaggtgtacaagaagacgctcttcgtcgaattcaccgatcacctgttcaatatcgccaaacccagaccaccatggatgggtcttttggggcctaccatacaagcggaggtgtatgacacagttgttatcactctcaagaacatggcttctcatccggtaagtcttcacgcagtgggcgtgtcctactggaaagtgtcagaaggagccgagtatgatgatcagacatcccagagggagaaagaagacgacaaggtatttccaggtgggtctcatacctatgtgtggcaagtgctcaaagagaatggccctatggcaagcgatccgccgtgtttgacttacagctacctttcacacgttgacctcgtcaaggacctcaactccgggttgattggagccttgttggtatgcagggaaggatctcttgccaaagagaagacacagaccctggccaagtttatccttctctttgctgtgttcgatgagggcaaaagttggcatagcgaaacgaagaattccctcatgcaggatcgcgacgcagccagcgccagagcttggcccaagatgcacactgtgaacggatatgtcaataggacgcttcctggcttgattgggtgtcatcggaaaagtgtctactggcacgtgatcggaatggggacaacaccagaggtccactccatatttctcgaaggccataccttccttgttcgaaaccacagacaggcatccttggggatctctcccattacctttctcactgcccaaacgctccttcgtgacttgggtcagttccttctcttttgccatatcccgtcacaccagcatgatggtatggaagcttatgtgaaagtcgacagttgtcctgaggagccacagttgcgcatgaagaataatgaagaagccgaggattacgacgacgatctcaccgattctgagatggacgtggtgaggtttgatgacgacaactctccctccatcattcaagctcggagcggggcgaagaaacaccccaagacttgggtccactatatagcggcggaagaggaggattgggattacgctcctcttgtattggcaccagatgaccgctcatacaaaagccagtacctcaacaacggaccgcagagaattggccggaagtataagaaagtgcgatttatggcctatacagacgaaacctttaagacaagggaggccatccagcatgagagtgggattttgggacctcttctttacggcgaagttggtgataccctcctcatcatcttcaagaatcaagcttctcgcccctataacatttacccacacgggatcactgacgttaggcctttgtatagcagaagacttcccaaaggcgtgaagcatctcaaagacttccccattttgccaggcgagatctttaagtacaaatggaccattacagtggaagatggaccgactaaatcagaccctcgatgccttacgcggtactattcctccttcgtgaattgggagagagatttggcaagcggactcataggaccactcctcatctgttacaaggaatctgtagaccagaggggtaaccagattatgagtgataaacgcaatgtgatcctttttagcgtcttcgacgagaaccggtcctggtacttgaccgagaatatacaaaggttccttcccaaccccgcaggcgttcagttggaagaccctgagtttcaggccagcaatattatgcactcaatcaacggctatgtgtttgatagtctccagctttctgtttgcctccatgaagtagcctattggtacatcttgtcaattggtgctcaaacagacttcctctccgtcttcttctccggctacacctttaagcacaagggcgtgtatgaggacactctcacactctttccattttctggagaaaccgtgttcatgagcatggagaatccaggcctttggatcttgggttgccacaacagtgattttcgcaatcggggaatgactgctctcctcaaagtcagcagctgtgattggaacacaggcgactattacgaagattcttacgaggacataagtgcctactttgactccaagaataacgccattgagcccagatcattctcccagaatcctcccgtgcttaaaaggcatcagcgcgaaggtaccagaactactcttcagtctgatcaagaggagattgactatgacgacaccattagcgtggaaatgaagaaggaggatttcgatatctatgacgaagatgagaaccagtctccgcggagctttcagaagaagacgcgacactacttcattgcagcagtcgaaaggctttgggactacggtatgtcatcatcccctcatgtgttgcgcaatagagctcagagtggaagtgttccacagttcaagaaagtcgtctttcaagagtttacagatggcagcttcacacagcctctctatcggggcgagcttaacgaacatttgggactccttggtccctatatccgagccgaagtggaggacaacattatggttacctttaggaatcaagcctctcgcccctacagcttctactcctccctcatcagttatgaggaggatcagagacaaggcgctgaaccacggaagaactttgtgaaaccgaatgagacgaagacctacttctggaaagtacagcaccacatggcccccacaaaagacgaattcgattgcaaagcatgggcgtatttttcagacgttgacttggagaaagatgtacattcaggacttattggtcctttgttggtgtgtcacactaacactctcaatccagcccatggcaggcaggtgacagtccaggaattcgctcttttctttaccatctttgatgagaccaagtcctggtacttcacggaaaacatggagcgcaattgcagagccccctgtaacatacagatggaggaccctacctttaaggaaaattatcggttccacgcaatcaacggatacattatggatacactccctggccttgtgatggctcaggaccaacgaatcaggtggtacctcctcagcatgggttctaatgagaacatacactccattcacttttcaggacatgtgttcactgtccggaagaaagaagagtataagatggccctctacaatttgtatccaggcgtgtttgagaccgttgaaatgcttccctctaaagctggcatctggagagtagagtgcttgatcggagaacatcttcacgcaggtatgagcaccttgttcctcgtgtacagcaacaaatgtcagaatccacttggcatggccagtggacacattcgcgactttcagatcacagcatctggccagtatggacaatgggccccaaagttggctcgcctccattactccggtagcataaatgcgtggtccactaaagaacctttcagctggattaaggtcgatcttcttgcccccatgatcatccacggcattaagacacagggagcgaggcagaaattctcctccctctacatctcacagttcattattatgtatagtttggacggcaagaagtggcaaacttatagaggtaacagtactggaacagacatggtgttcttcggcaacgttgatagctctggcatcaaacacaacatctttaatcctcccataatagctcggtacatcagattgcatccgacccactacagcattaggagtacactccgaatggagcttatgggttgcgacttgaattcctgttcaatgccactcggaatggagtctaaagccatctctgatgcacagataaccgccagtagctactttacgaacatgtttgctacgtggtcaccctctaaggcaaggcttcatttgcaaggccggtctaatgcctggagacctcaggtgaacaacccgaaagaatggctccaggtggactttcagaagaccatgaaagtaacaggtgtcactactcagggagttaagtccttggatactagcatgtatgtgaaggagttccttatttcctcatcacaagatggccaccagtggaccctcttctttcagaatggtaaggtcaaagtgtttcagggcaatcaagacagcttcacacccgtggtgaacagtcttgatcctccactcttgacacgataccttcgaatccatccacagtcttgggagcaccagattgcattgcgcatggaagtacttggatgcgaggctcaggacctctac

SEQ ID NO: 1656 - protein, 1457 aa, synthetic construct
  REGION 1..1457: note = Variant of human B-domain deleted Factor VIII
MQIELSTCFFLCLLRFCFSATRRYYLGAVELSWDYMQSDLGELPVDARFPPRVPKSFPFNTSQVYKKTLFVEFTDHLFNIAKPRPPWMGLLGPTIQAEVYDTVVITLKNMASHPVSLHAVGVSYWKVSEGAEYDDQTSQREKEDDKVFPGGSHTYVWQVLKENGPMASDPPCLTYSYLSHVDLVKDLNSGLIGALLVCREGSLAKEKTQTLAKFILLFAVFDEGKSWHSETKNSLMQDRDAASARAWPKMHTVNGYVNRTLPGLIGCHRKSVYWHVIGMGTTPEVHSIFLEGHTFLVRNHRQASLGISPITFLTAQTLLRDLGQFLLFCHIPSHQHDGMEAYVKVDSCPEEPQLRMKNNEEAEDYDDDLTDSEMDVVRFDDDNSPSIIQARSGAKKHPKTWVHYIAAEEEDWDYAPLVLAPDDRSYKSQYLNNGPQRIGRKYKKVRFMAYTDETFKTREAIQHESGILGPLLYGEVGDTLLIIFKNQASRPYNIYPHGITDVRPLYSRRLPKGVKHLKDFPILPGEIFKYKWTITVEDGPTKSDPRCLTRYYSSFVNWERDLASGLIGPLLICYKESVDQRGNQIMSDKRNVILFSVFDENRSWYLTENIQRFLPNPAGVQLEDPEFQASNIMHSINGYVFDSLQLSVCLHEVAYWYILSIGAQTDFLSVFFSGYTFKHKGVYEDTLTLFPFSGETVFMSMENPGLWILGCHNSDFRNRGMTALLKVSSCDWNTGDYYEDSYEDISAYFDSKNNAIEPRSFSQNPPVLKRHQREGTRTTLQSDQEEIDYDDTISVEMKKEDFDIYDEDENQSPRSFQKKTRHYFIAAVERLWDYGMSSSPHVLRNRAQSGSVPQFKKVVFQEFTDGSFTQPLYRGELNEHLGLLGPYIRAEVEDNIMVTFRNQASRPYSFYSSLISYEEDQRQGAEPRKNFVKPNETKTYFWKVQHHMAPTKDEFDCKAWAYFSDVDLEKDVHSGLIGPLLVCHTNTLNPAHGRQVTVQEFALFFTIFDETKSWYFTENMERNCRAPCNIQMEDPTFKENYRFHAINGYIMDTLPGLVMAQDQRIRWYLLSMGSNENIHSIHFSGHVFTVRKKEEYKMALYNLYPGVFETVEMLPSKAGIWRVECLIGEHLHAGMSTLFLVYSNKCQNPLGMASGHIRDFQITASGQYGQWAPKLARLHYSGSINAWSTKEPFSWIKVDLLAPMIIHGIKTQGARQKFSSLYISQFIIMYSLDGKKWQTYRGNSTGTDMVFFGNVDSSGIKHNIFNPPIIARYIRLHPTHYSIRSTLRMELMGCDLNSCSMPLGMESKAISDAQITASSYFTNMFATWSPSKARLHLQGRSNAWRPQVNNPKEWLQVDFQKTMKVTGVTTQGVKSLDTSMYVKEFLISSSQDGHQWTLFFQNGKVKVFQGNQDSFTPVVNSLDPPLLTRYLRIHPQSWEHQIALRMEVLGCEAQDLY

SEQ ID NO: 1657 - DNA, 4371 bp, synthetic construct
  misc_feature 1..4371: note = Variant of human B-domain deleted Factor VIII
  source 1..4371: mol_type = other DNA
atgcagattgaactgtctacctgcttcttcctctgtttgctgaggttctgctttagcgccactagacggtactaccttggcgctgtggagctgtcctgggactatatgcagagtgatttgggagagcttcccgtcgacgcacgatttcctcctcgcgttccaaagtcatttccctttaacacaagccaggtgtacaagaagacgctcttcgtcgaattcaccgatcacctgttcaatatcgccaaacccagaccaccatggatgggtcttttggggcctaccatacaagcggaggtgtatgacacagttgttatcactctcaagaacatggcttctcatccggtaagtcttcacgcagtgggcgtgtcctactggaaagcttcagaaggagccgagtatgatgatcagacatcccagagggagaaagaagacgacaaggtatttccaggtgggtctcatacctatgtgtggcaagtgctcaaagagaatggccctatggcaagcgatccgccgtgtttgactggtagctacctttcacacgttgacctcgtcaaggacctcaactccgggttgattggagccttgttggtatgcagggaaggatctcttgccaaagagaagacacagaccctggccaagtttatccttctctttgctgtgttcgatgagggcaaaagttggcatagcgaaacgaagaattccctcatgcaggatcgcgacgcagccagcgccagagcttggcccaagatgcacactgtgaacggatatgtcaataggacgcttcctggcttgattgggtgtcatcggaaaagtgtctactggcacgtgatcggaatggggacaacaccagaggtccactccatatttctcgaaggccataccttccttgttcgaaaccacagacaggcatccttggggatctctcccattacctttctcactgcccaaacgctccttcgtgacttgggtcagttccttctcttttgccatatcccgtcacaccagcatgatggtatggaagcttatgtgaaagtcgacagttgtcctgaggagccacagttgcgcatgaagaataatgaagaagccgaggattacgacgacgatctcaccgattctgagatggacgtggtgaggtttgatgacgacaactctccctccatcattcaagctcggagcggggcgaagaaacaccccaagacttgggtccactatatagcggcggaagaggaggattgggattacgctcctcttgtattggcaccagatgaccgctcatacaaaagccagtacctcaacaacggaccgcagagaattggccggaagtataagaaagtgcgatttatggcctatacagacgaaacctttaagacaagggaggccatccagcatgagagtgggattttgggacctcttctttacggcgaagttggtgataccctcctcatcatcttcaagaatcaagcttctcgcccctataacatttacccacacgggatcactgacgttaggcctttgtatagcagaagacttcccaaaggcgtgaagcatctcaaagacttccccattttgccaggcgagatctttaagtacaaatggaccattacagtggaagatggaccgactaaatcagaccctcgatgccttacgcggtactattcctccttcgtgaattgggagagagatttggcaagcggactcataggaccactcctcatctgttacaaggaatctgtagaccagaggggtaaccagattatgagtgataaacgcaatgtgatcctttttagcgtcttcgacgagaaccggtcctggtacttgaccgagaatatacaaaggttccttcccaaccccgcaggcgttcagttggaagaccctgagtttcaggccagcaatattatgcactcaatcaacggctatgtgtttgatagtctccagctttctgtttgcctccatgaagtagcctattggtacatcttgtcaattggtgctcaaacagacttcctctccgtcttcttctccggctacacctttaagcacaagggcgtgtatgaggacactctcacactctttccattttctggagaaaccgtgttcatgagcatggagaatccaggcctttggatcttgggttgccacaacagtgattttcgcaatcggggaatgactgctctcctcaaagtcagcagctgtgattggaacacaggcgactattacgaagattcttacgaggacataagtgcctactttgactccaagaataacgccattgagcccagatcattctcccagaatcctcccgtgcttaaaaggcatcagcgcgaaggtaccagaactactcttcagtctgatcaagaggagattgactatgacgacaccattagcgtggaaatgaagaaggaggatttcgatatctatgacgaagatgagaaccagtctccgcggagctttcagaagaagacgcgacactacttcattgcagcagtcgaaaggctttgggactacggtatgtcatcatcccctcatgtgttgcgcaatagagctcagagtggaagtgttccacagttcaagaaagtcgtctttcaagagtttacagatggcagcttcacacagcctctctatcggggcgagcttaacgaacatttgggactccttggtccctatatccgagccgaagtggaggacaacattatggttacctttaggaatcaagcctctcgcccctacagcttctactcctccctcatcagttatgaggaggatcagagacaaggcgctgaaccacggaagaactttgtgaaaccgaatgagacgaagacctacttctggaaagtacagcaccacatggcccccacaaaagacgaattcgattgcaaagcatgggcgtatttttcagacgttgacttggagaaagatgtacattcaggacttattggtcctttgttggtgtgtcacactaacactctcaatccagcccatggcaggcaggtgacagtccaggaattcgctcttttctttaccatctttgatgagaccaagtcctggtacttcacggaaaacatggagcgcaattgcagagccccctgtaacatacagatggaggaccctacctttaaggaaaattatcggttccacgcaatcaacggatacattatggatacactccctggccttgtgatggctcaggaccaacgaatcaggtggtacctcctcagcatgggttctaatgagaacatacactccattcacttttcaggacatgtgttcactgtccggaagaaagaagagtataagatggccctctacaatttgtatccaggcgtgtttgagaccgttgaaatgcttccctctaaagctggcatctggagagtagagtgcttgatcggagaacatcttcacgcaggtatgagcaccttgttcctcgtgtacagcaacaaatgtcagaatccacttggcatggccagtggacacattcgcgactttcagatcacagcatctggccagtatggacaatgggccccaaagttggctcgcctccattactccggtagcataaatgcgtggtccactaaagaacctttcagctggattaaggtcgatcttcttgcccccatgatcatccacggcattaagacacagggagcgaggcagaaattctcctccctctacatctcacagttcattattatgtatagtttggacggcaagaagtggcaaacttatagaggtaacagtactggaacagacatggtgttcttcggcaacgttgatagctctggcatcaaacacaacatctttaatcctcccataatagctcggtacatcagattgcatccgacccactacagcattaggagtacactccgaatggagcttatgggttgcgacttgaattcctgttcaatgccactcggaatggagtctaaagccatctctgatgcacagataaccgccagtagctactttacgaacatgtttgctacgtggtcaccctctaaggcaaggcttcatttgcaaggccggtctaatgcctggagacctcaggtgaacaacccgaaagaatggctccaggtggactttcagaagaccatgaaagtaacaggtgtcactactcagggagttaagtccttggatactagcatgtatgtgaaggagttccttatttcctcatcacaagatggccaccagtggaccctcttctttcagaatggtaaggtcaaagtgtttcagggcaatcaagacagcttcacacccgtggtgaacagtcttgatcctccactcttgacacgataccttcgaatccatccacagtcttgggagcaccagattgcattgcgcatggaagtacttggatgcgaggctcaggacctctac

SEQ ID NO: 1658 - protein, 1457 aa, synthetic construct
  REGION 1..1457: note = Variant of human B-domain deleted Factor VIII
MQIELSTCFFLCLLRFCFSATRRYYLGAVELSWDYMQSDLGELPVDARFPPRVPKSFPFNTSQVYKKTLFVEFTDHLFNIAKPRPPWMGLLGPTIQAEVYDTVVITLKNMASHPVSLHAVGVSYWKASEGAEYDDQTSQREKEDDKVFPGGSHTYVWQVLKENGPMASDPPCLTGSYLSHVDLVKDLNSGLIGALLVCREGSLAKEKTQTLAKFILLFAVFDEGKSWHSETKNSLMQDRDAASARAWPKMHTVNGYVNRTLPGLIGCHRKSVYWHVIGMGTTPEVHSIFLEGHTFLVRNHRQASLGISPITFLTAQTLLRDLGQFLLFCHIPSHQHDGMEAYVKVDSCPEEPQLRMKNNEEAEDYDDDLTDSEMDVVRFDDDNSPSIIQARSGAKKHPKTWVHYIAAEEEDWDYAPLVLAPDDRSYKSQYLNNGPQRIGRKYKKVRFMAYTDETFKTREAIQHESGILGPLLYGEVGDTLLIIFKNQASRPYNIYPHGITDVRPLYSRRLPKGVKHLKDFPILPGEIFKYKWTITVEDGPTKSDPRCLTRYYSSFVNWERDLASGLIGPLLICYKESVDQRGNQIMSDKRNVILFSVFDENRSWYLTENIQRFLPNPAGVQLEDPEFQASNIMHSINGYVFDSLQLSVCLHEVAYWYILSIGAQTDFLSVFFSGYTFKHKGVYEDTLTLFPFSGETVFMSMENPGLWILGCHNSDFRNRGMTALLKVSSCDWNTGDYYEDSYEDISAYFDSKNNAIEPRSFSQNPPVLKRHQREGTRTTLQSDQEEIDYDDTISVEMKKEDFDIYDEDENQSPRSFQKKTRHYFIAAVERLWDYGMSSSPHVLRNRAQSGSVPQFKKVVFQEFTDGSFTQPLYRGELNEHLGLLGPYIRAEVEDNIMVTFRNQASRPYSFYSSLISYEEDQRQGAEPRKNFVKPNETKTYFWKVQHHMAPTKDEFDCKAWAYFSDVDLEKDVHSGLIGPLLVCHTNTLNPAHGRQVTVQEFALFFTIFDETKSWYFTENMERNCRAPCNIQMEDPTFKENYRFHAINGYIMDTLPGLVMAQDQRIRWYLLSMGSNENIHSIHFSGHVFTVRKKEEYKMALYNLYPGVFETVEMLPSKAGIWRVECLIGEHLHAGMSTLFLVYSNKCQNPLGMASGHIRDFQITASGQYGQWAPKLARLHYSGSINAWSTKEPFSWIKVDLLAPMIIHGIKTQGARQKFSSLYISQFIIMYSLDGKKWQTYRGNSTGTDMVFFGNVDSSGIKHNIFNPPIIARYIRLHPTHYSIRSTLRMELMGCDLNSCSMPLGMESKAISDAQITASSYFTNMFATWSPSKARLHLQGRSNAWRPQVNNPKEWLQVDFQKTMKVTGVTTQGVKSLDTSMYVKEFLISSSQDGHQWTLFFQNGKVKVFQGNQDSFTPVVNSLDPPLLTRYLRIHPQSWEHQIALRMEVLGCEAQDLY

SEQ ID NO: 1659 - DNA, 4371 bp, synthetic construct
  misc_feature 1..4371: note = Variant of human B-domain deleted Factor VIII
  source 1..4371: mol_type = other DNA
atgcagattgaactgtctacctgcttcttcctctgtttgctgaggttctgctttagcgccactagacggtactaccttggcgctgtggagctgtcctgggactatatgcagagtgatttgggagagcttcccgtcgacgcacgatttcctcctcgcgttccaaagtcatttccctttaacacaagccaggtgtacaagaagacgctcttcgtcgaattcaccgatcacctgttcaatatcgccaaacccagaccaccatggatgggtcttttggggcctaccatacaagcggaggtgtatgacacagttgttatcactctcaagaacatggcttctcatccggtaagtcttcacgcagtgggcgtgtcctactggaaagcttcagaaggagccgagtatgatgatcagacatcccagagggagaaagaagacgacaaggtatttccaggtgggtctcatacctatgtgtggcaagtgctcaaagagaatggccctatggcaagcgatccgccgtgtttgacttacagctacctttcacacgttgacctcgtcaaggacctcaactccgggttgattggagccttgttggtatgcagggaaggatctcttgccaaagagaagacacagaccctggccaagtttatccttctctttgctgtgttcgatgagggcaaaagttggcatagcgaaacgaagaattccctcatgcaggatcgcgacgcagccagcgccagagcttggcccaagatgcacactgtgaacggatatgtcaataggacgcttcctggcttgattgggtgtcatcggaaaagtgtctactggcacgtgatcggaatggggacaacaccagaggtccactccatatttctcgaaggccataccttccttgttcgaaaccacagacaggcatccttggggatctctcccattacctttctcactgcccaaacgctccttcgtgacttgggtcagttccttctcttttgccatatcccgtcacaccagcatgatggtatggaagcttatgtgaaagtcgacagttgtcctgaggagccacagttgcgcatgaagaataatgaagaagccgaggattacgacgacgatctcaccgattctgagatggacgtggtgaggtttgatgacgacaactctccctccatcattcaagctcggagcggggcgaagaaacaccccaagacttgggtccactatatagcggcggaagaggaggattgggattacgctcctcttgtattggcaccagatgaccgctcatacaaaagccagtacctcaacaacggaccgcagagaattggccggaagtataagaaagtgcgatttatggcctatacagacgaaacctttaagacaagggaggccatccagcatgagagtgggattttgggacctcttctttacggcgaagttggtgataccctcctcatcatcttcaagaatcaagcttctcgcccctataacatttacccacacgggatcactgacgttaggcctttgtatagcagaagacttcccaaaggcgtgaagcatctcaaagacttccccattttgccaggcgagatctttaagtacaaatggaccattacagtggaagatggaccgactaaatcagaccctcgatgccttacgcggtactattcctccttcgtgaattgggagagagatttggcaagcggactcataggaccactcctcatctgttacaaggaatctgtagaccagaggggtaaccagattatgagtgataaacgcaatgtgatcctttttagcgtcttcgacgagaaccggtcctggtacttgaccgagaatatacaaaggttccttcccaaccccgcaggcgttcagttggaagaccctgagtttcaggccagcaatattatgcactcaatcaacggctatgtgtttgatagtctccagctttctgtttgcctccatgaagtagcctattggtacatcttgtcaattggtgctcaaacagacttcctctccgtcttcttctccggctacacctttaagcacaagggcgtgtatgaggacactctcacactctttccattttctggagaaaccgtgttcatgagcatggagaatccaggcctttggatcttgggttgccacaacagtgattttcgcaatcggggaatgactgctctcctcaaagtcagcagctgtgattggaacacaggcgactattacgaagattcttacgaggacataagtgcctactttgactccaagaataacgccattgagcccagatcattctcccagaatcctcccgtgcttaaaaggcatcagcgcgaaggtaccagaactactcttcagtctgatcaagaggagattgactatgacgacaccattagcgtggaaatgaagaaggaggatttcgatatctatgacgaagatgagaaccagtctccgcggagctttcagaagaagacgcgacactacttcattgcagcagtcgaaaggctttgggactacggtatgtcatcatcccctcatgtgttgcgcaatagagctcagagtggaagtgttccacagttcaagaaagtcgtctttcaagagtttacagatggcagcttcacacagcctctctatcggggcgagcttaacgaacatttgggactccttggtccctatatccgagccgaagtggaggacaacattatggttacctttaggaatcaagcctctcgcccctacagcttctactcctccctcatcagttatgaggaggatcagagacaaggcgctgaaccacggaagaactttgtgaaaccgaatgagacgaagacctacttctggaaagtacagcaccacatggcccccacaaaagacgaattcgattgcaaagcatgggcgtatttttcagacgttgacttggagaaagatgtacattcaggacttattggtcctttgttggtgtgtcacactaacactctcaatccagcccatggcaggcaggtgacagtccaggaattcgctcttttctttaccatctttgatgagaccaagtcctggtacttcacggaaaacatggagcgcaattgcagagccccctgtaacatacagatggaggaccctacctttaaggaaaattatcggttccacgcaatcaacggatacattatggatacactccctggccttgtgatggctcaggaccaacgaatcaggtggtacctcctcagcatgggttctaatgagaacatacactccattcacttttcaggacatgtgttcactgtccggaagtgggaagagtataagatggccctctacaatttgtatccaggcgtgtttgagaccgttgaaatgcttccctctaaagctggcatctggagagtagagtgcttgatcggagaacatcttcacgcaggtatgagcaccttgttcctcgtgtacagcaacaaatgtcagaatccacttggcatggccagtggacacattcgcgactttcagatcacagcatctggccagtatggacaatgggccccaaagttggctcgcctccattactccggtagcataaatgcgtggtccactaaagaacctttcagctggattaaggtcgatcttcttgcccccatgatcatccacggcattaagacacagggagcgaggcagaaattctcctccctctacatctcacagttcattattatgtatagtttggacggcaagaagtggcaaacttatagaggtaacagtactggaacagacatggtgttcttcggcaacgttgatagctctggcatcaaacacaacatctttaatcctcccataatagctcggtacatcagattgcatccgacccactacagcattaggagtacactccgaatggagcttatgggttgcgacttgaattcctgttcaatgccactcggaatggagtctaaagccatctctgatgcacagataaccgccagtagctactttacgaacatgtttgctacgtggtcaccctctaaggcaaggcttcatttgcaaggccggtctaatgcctggagacctcaggtgaacaacccgaaagaatggctccaggtggactttcagaagaccatgaaagtaacaggtgtcactactcagggagttaagtccttggatactagcatgtatgtgaaggagttccttatttcctcatcacaagatggccaccagtggaccctcttctttcagaatggtaaggtcaaagtgtttcagggcaatcaagacagcttcacacccgtggtgaacagtcttgatcctccactcttgacacgataccttcgaatccatccacagtcttgggagcaccagattgcattgcgcatggaagtacttggatgcgaggctcaggacctctac

SEQ ID NO: 1660 - protein, 1457 aa, synthetic construct
  REGION 1..1457: note = Variant of human B-domain deleted Factor VIII
MQIELSTCFFLCLLRFCFSATRRYYLGAVELSWDYMQSDLGELPVDARFPPRVPKSFPFNTSQVYKKTLFVEFTDHLFNIAKPRPPWMGLLGPTIQAEVYDTVVITLKNMASHPVSLHAVGVSYWKASEGAEYDDQTSQREKEDDKVFPGGSHTYVWQVLKENGPMASDPPCLTYSYLSHVDLVKDLNSGLIGALLVCREGSLAKEKTQTLAKFILLFAVFDEGKSWHSETKNSLMQDRDAASARAWPKMHTVNGYVNRTLPGLIGCHRKSVYWHVIGMGTTPEVHSIFLEGHTFLVRNHRQASLGISPITFLTAQTLLRDLGQFLLFCHIPSHQHDGMEAYVKVDSCPEEPQLRMKNNEEAEDYDDDLTDSEMDVVRFDDDNSPSIIQARSGAKKHPKTWVHYIAAEEEDWDYAPLVLAPDDRSYKSQYLNNGPQRIGRKYKKVRFMAYTDETFKTREAIQHESGILGPLLYGEVGDTLLIIFKNQASRPYNIYPHGITDVRPLYSRRLPKGVKHLKDFPILPGEIFKYKWTITVEDGPTKSDPRCLTRYYSSFVNWERDLASGLIGPLLICYKESVDQRGNQIMSDKRNVILFSVFDENRSWYLTENIQRFLPNPAGVQLEDPEFQASNIMHSINGYVFDSLQLSVCLHEVAYWYILSIGAQTDFLSVFFSGYTFKHKGVYEDTLTLFPFSGETVFMSMENPGLWILGCHNSDFRNRGMTALLKVSSCDWNTGDYYEDSYEDISAYFDSKNNAIEPRSFSQNPPVLKRHQREGTRTTLQSDQEEIDYDDTISVEMKKEDFDIYDEDENQSPRSFQKKTRHYFIAAVERLWDYGMSSSPHVLRNRAQSGSVPQFKKVVFQEFTDGSFTQPLYRGELNEHLGLLGPYIRAEVEDNIMVTFRNQASRPYSFYSSLISYEEDQRQGAEPRKNFVKPNETKTYFWKVQHHMAPTKDEFDCKAWAYFSDVDLEKDVHSGLIGPLLVCHTNTLNPAHGRQVTVQEFALFFTIFDETKSWYFTENMERNCRAPCNIQMEDPTFKENYRFHAINGYIMDTLPGLVMAQDQRIRWYLLSMGSNENIHSIHFSGHVFTVRKWEEYKMALYNLYPGVFETVEMLPSKAGIWRVECLIGEHLHAGMSTLFLVYSNKCQNPLGMASGHIRDFQITASGQYGQWAPKLARLHYSGSINAWSTKEPFSWIKVDLLAPMIIHGIKTQGARQKFSSLYISQFIIMYSLDGKKWQTYRGNSTGTDMVFFGNVDSSGIKHNIFNPPIIARYIRLHPTHYSIRSTLRMELMGCDLNSCSMPLGMESKAISDAQITASSYFTNMFATWSPSKARLHLQGRSNAWRPQVNNPKEWLQVDFQKTMKVTGVTTQGVKSLDTSMYVKEFLISSSQDGHQWTLFFQNGKVKVFQGNQDSFTPVVNSLDPPLLTRYLRIHPQSWEHQIALRMEVLGCEAQDLY

SEQ ID NO: 1661 - DNA, 4371 bp, synthetic construct
  misc_feature 1..4371: note = Variant of human B-domain deleted Factor VIII
  source 1..4371: mol_type = other DNA
atgcagattgaactgtctacctgcttcttcctctgtttgctgaggttctgctttagcgccactagacggtactaccttggcgctgtggagctgtcctgggactatatgcagagtgatttgggagagcttcccgtcgacgcacgatttcctcctcgcgttccaaagtcatttccctttaacacaagccaggtgtacaagaagacgctcttcgtcgaattcaccgatcacctgttcaatatcgccaaacccagaccaccatggatgggtcttttggggcctaccatacaagcggaggtgtatgacacagttgttatcactctcaagaacatggcttctcatccggtaagtcttcacgcagtgggcgtgtcctactggaaagcttcagaaggagccgagtatgatgatcagacatcccagagggagaaagaagacgacaaggtatttccaggtgggtctcatacctatgtgtggcaagtgctcaaagagaatggccctatggcaagcgatccgccgtgtttgacttacagctacctttcacacgttgacctcgtcaaggacctcaactccgggttgattggagccttgttggtatgcagggaaggatctcttgccaaagagaagacacagaccctggccaagtttatccttctctttgctgtgttcgatgagggcaaaagttggcatagcgaaacgaagaattccctcatgcaggatcgcgacgcagccagcgccagagcttggcccaagatgcacactgtgaacggatatgtcaataggacgcttcctggcttgattgggtgtcatcggaaaagtgtctactggcacgtgatcggaatggggacaacaccagaggtccactccatatttctcgaaggccataccttccttgttcgaaaccacagacaggcatccttggggatctctcccattacctttctcactgcccaaacgctccttcgtgacttgggtcagttccttctcttttgccatatcccgtcacaccagcatgatggtatggaagcttatgtgaaagtcgacagttgtcctgaggagccacagttgcgcatgaagaataatgaagaagccgaggattacgacgacgatctcaccgattctgagatggacgtggtgaggtttgatgacgacaactctccctccatcattcaagctcggagcggggcgaagaaacaccccaagacttgggtccactatatagcggcggaagaggaggattgggattacgctcctcttgtattggcaccagatgaccgctcatacaaaagccagtacctcaacaacggaccgcagagaattggccggaagtataagaaagtgcgatttatggcctatacagacgaaacctttaagacaagggaggccatccagcatgagagtgggattttgggacctcttctttacggcgaagttggtgataccctcctcatcatcttcaagaatcaagcttctcgcccctataacatttacccacacgggatcactgacgttaggcctttgtatagcagaagacttcccaaaggcgtgaagcatctcaaagacttccccattttgccaggcgagatctttaagtacaaatggaccattacagtggaagatggaccgactaaatcagaccctcgatgccttacgcggtactattcctccttcgtgaattgggagagagatttggcaagcggactcataggaccactcctcatctgttacaaggaatctgtagaccagaggggtaaccagattatgagtgataaacgcaatgtgatcctttttagcgtcttcgacgagaaccggtcctggtacttgaccgagaatatacaaaggttccttcccaaccccgcaggcgttcagttggaagaccctgagtttcaggccagcaatattatgcactcaatcaacggctatgtgtttgatagtctccagctttctgtttgcctccatgaagtagcctattggtacatcttgtcaattggtgctcaaacagacttcctctccgtcttcttctccggctacacctttaagcacaagggcgtgtatgaggacactctcacactctttccattttctggagaaaccgtgttcatgagcatggagaatccaggcctttggatcttgggttgccacaacagtgattttcgcaatcggggaatgactgctctcctcaaagtcagcagctgtgattggaacacaggcgactattacgaagattcttacgaggacataagtgcctactttgactccaagaataacgccattgagcccagatcattctcccagaatcctcccgtgcttaaaaggcatcagcgcgaaggtaccagaactactcttcagtctgatcaagaggagattgactatgacgacaccattagcgtggaaatgaagaaggaggatttcgatatctatgacgaagatgagaaccagtctccgcggagctttcagaagaagacgcgacactacttcattgcagcagtcgaaaggctttgggactacggtatgtcatcatcccctcatgtgttgcgcaatagagctcagagtggaagtgttccacagttcaagaaagtcgtctttcaagagtttacagatggcagcttcacacagcctctctatcggggcgagcttaacgaacatttgggactccttggtccctatatccgagccgaagtggaggacaacattatggttacctttaggaatcaagcctctcgcccctacagcttctactcctccctcatcagttatgaggaggatcagagacaaggcgctgaaccacggaagaactttgtgaaaccgaatgagacgaagacctacttctggaaagtacagcaccacatggcccccacaaaagacgaattcgattgcaaagcatgggcgtatttttcagacgttgacttggagaaagatgtacattcaggacttattggtcctttgttggtgtgtcacactaacactctcaatccagcccatggcaggcaggtgacagtccaggaattcgctcttttctttaccatctttgatgagaccaagtcctggtacttcacggaaaacatggagcgcaattgcagagccccctgtaacatacagatggaggaccctacctttaaggaaaattatcggttccacgcaatcaacggatacattatggatacactccctggccttgtgatggctcaggaccaacgaatcaggtggtacctcctcagcatgggttctaatgagaacatacactccattcacttttcaggacatgtgggtactgtccggaagaaagaagagtataagatggccctctacaatttgtatccaggcgtgtttgagaccgttgaaatgcttccctctaaagctggcatctggagagtagagtgcttgatcggagaacatcttcacgcaggtatgagcaccttgttcctcgtgtacagcaacaaatgtcagaatccacttggcatggccagtggacacattcgcgactttcagatcacagcatctggccagtatggacaatgggccccaaagttggctcgcctccattactccggtagcataaatgcgtggtccactaaagaacctttcagctggattaaggtcgatcttcttgcccccatgatcatccacggcattaagacacagggagcgaggcagaaattctcctccctctacatctcacagttcattattatgtatagtttggacggcaagaagtggcaaacttatagaggtaacagtactggaacagacatggtgttcttcggcaacgttgatagctctggcatcaaacacaacatctttaatcctcccataatagctcggtacatcagattgcatccgacccactacagcattaggagtacactccgaatggagcttatgggttgcgacttgaattcctgttcaatgccactcggaatggagtctaaagccatctctgatgcacagataaccgccagtagctactttacgaacatgtttgctacgtggtcaccctctaaggcaaggcttcatttgcaaggccggtctaatgcctggagacctcaggtgaacaacccgaaagaatggctccaggtggactttcagaagaccatgaaagtaacaggtgtcactactcagggagttaagtccttggatactagcatgtatgtgaaggagttccttatttcctcatcacaagatggccaccagtggaccctcttctttcagaatggtaaggtcaaagtgtttcagggcaatcaagacagcttcacacccgtggtgaacagtcttgatcctccactcttgacacgataccttcgaatccatccacagtcttgggagcaccagattgcattgcgcatggaagtacttggatgcgaggctcaggacctctac

SEQ ID NO: 1662 - protein, 1457 aa, synthetic construct
  REGION 1..1457: note = Variant of human B-domain deleted Factor VIII
MQIELSTCFFLCLLRFCFSATRRYYLGAVELSWDYMQSDLGELPVDARFPPRVPKSFPFNTSQVYKKTLFVEFTDHLFNIAKPRPPWMGLLGPTIQAEVYDTVVITLKNMASHPVSLHAVGVSYWKASEGAEYDDQTSQREKEDDKVFPGGSHTYVWQVLKENGPMASDPPCLTYSYLSHVDLVKDLNSGLIGALLVCREGSLAKEKTQTLAKFILLFAVFDEGKSWHSETKNSLMQDRDAASARAWPKMHTVNGYVNRTLPGLIGCHRKSVYWHVIGMGTTPEVHSIFLEGHTFLVRNHRQASLGISPITFLTAQTLLRDLGQFLLFCHIPSHQHDGMEAYVKVDSCPEEPQLRMKNNEEAEDYDDDLTDSEMDVVRFDDDNSPSIIQARSGAKKHPKTWVHYIAAEEEDWDYAPLVLAPDDRSYKSQYLNNGPQRIGRKYKKVRFMAYTDETFKTREAIQHESGILGPLLYGEVGDTLLIIFKNQASRPYNIYPHGITDVRPLYSRRLPKGVKHLKDFPILPGEIFKYKWTITVEDGPTKSDPRCLTRYYSSFVNWERDLASGLIGPLLICYKESVDQRGNQIMSDKRNVILFSVFDENRSWYLTENIQRFLPNPAGVQLEDPEFQASNIMHSINGYVFDSLQLSVCLHEVAYWYILSIGAQTDFLSVFFSGYTFKHKGVYEDTLTLFPFSGETVFMSMENPGLWILGCHNSDFRNRGMTALLKVSSCDWNTGDYYEDSYEDISAYFDSKNNAIEPRSFSQNPPVLKRHQREGTRTTLQSDQEEIDYDDTISVEMKKEDFDIYDEDENQSPRSFQKKTRHYFIAAVERLWDYGMSSSPHVLRNRAQSGSVPQFKKVVFQEFTDGSFTQPLYRGELNEHLGLLGPYIRAEVEDNIMVTFRNQASRPYSFYSSLISYEEDQRQGAEPRKNFVKPNETKTYFWKVQHHMAPTKDEFDCKAWAYFSDVDLEKDVHSGLIGPLLVCHTNTLNPAHGRQVTVQEFALFFTIFDETKSWYFTENMERNCRAPCNIQMEDPTFKENYRFHAINGYIMDTLPGLVMAQDQRIRWYLLSMGSNENIHSIHFSGHVGTVRKKEEYKMALYNLYPGVFETVEMLPSKAGIWRVECLIGEHLHAGMSTLFLVYSNKCQNPLGMASGHIRDFQITASGQYGQWAPKLARLHYSGSINAWSTKEPFSWIKVDLLAPMIIHGIKTQGARQKFSSLYISQFIIMYSLDGKKWQTYRGNSTGTDMVFFGNVDSSGIKHNIFNPPIIARYIRLHPTHYSIRSTLRMELMGCDLNSCSMPLGMESKAISDAQITASSYFTNMFATWSPSKARLHLQGRSNAWRPQVNNPKEWLQVDFQKTMKVTGVTTQGVKSLDTSMYVKEFLISSSQDGHQWTLFFQNGKVKVFQGNQDSFTPVVNSLDPPLLTRYLRIHPQSWEHQIALRMEVLGCEAQDLY

SEQ ID NO: 1663 - DNA, 4371 bp, synthetic construct
  misc_feature 1..4371: note = Variant of human B-domain deleted Factor VIII
  source 1..4371: mol_type = other DNA
atgcagattgaactgtctacctgcttcttcctctgtttgctgaggttctgctttagcgccactagacggtactaccttggcgctgtggagctgtcctgggactatatgcagagtgatttgggagagcttcccgtcgacgcacgatttcctcctcgcgttccaaagtcatttccctttaacacaagccaggtgtacaagaagacgctcttcgtcgaattcaccgatcacctgttcaatatcgccaaacccagaccaccatggatgggtcttttggggcctaccatacaagcggaggtgtatgacacagttgttatcactctcaagaacatggcttctcatccggtaagtcttcacgcagtgggcgtgtcctactggaaagcttcagaaggagccgagtatgatgatcagacatcccagagggagaaagaagacgacaaggtatttccaggtgggtctcatacctatgtgtggcaagtgctcaaagagaatggccctatggcaagcgatccgccgtgtttgacttacagctacctttcacacgttgacctcgtcaaggacctcaactccgggttgattggagccttgttggtatgcagggaaggatctcttgccaaagagaagacacagaccctggccaagtttatccttctctttgctgtgttcgatgagggcaaaagttggcatagcgaaacgaagaattccctcatgcaggatcgcgacgcagccagcgccagagcttggcccaagatgcacactgtgaacggatatgtcaataggacgcttcctggcttgattgggtgtcatcggaaaagtgtctactggcacgtgatcggaatggggacaacaccagaggtccactccatatttctcgaaggccataccttccttgttcgaaaccacagacaggcatccttggggatctctcccattacctttctcactgcccaaacgctccttcgtgacttgggtcagttccttctcttttgccatatcccgtcacaccagcatgatggtatggaagcttatgtgaaagtcgacagttgtcctgaggagccacagttgcgcatgaagaataatgaagaagccgaggattacgacgacgatctcaccgattctgagatggacgtggtgaggtttgatgacgacaactctccctccatcattcaagctcggagcggggcgaagaaacaccccaagacttgggtccactatatagcggcggaagaggaggattgggattacgctcctcttgtattggcaccagatgaccgctcatacaaaagccagtacctcaacaacggaccgcagagaattggccggaagtataagaaagtgcgatttatggcctatacagacgaaacctttaagacaagggaggccatccagcatgagagtgggattttgggacctcttctttacggcgaagttggtgataccctcctcatcatcttcaagaatcaagcttctcgcccctataacatttacccacacgggatcactgacgttaggcctttgtatagcagaagacttcccaaaggcgtgaagcatctcaaagacttccccattttgccaggcgagatctttaagtacaaatggaccattacagtggaagatggaccgactaaatcagaccctcgatgccttacgcggtactattcctccttcgtgaattgggagagagatttggcaagcggactcataggaccactcctcatctgttacaaggaatctgtagaccagaggggtaaccagattatgagtgataaacgcaatgtgatcctttttagcgtcttcgacgagaaccggtcctggtacttgaccgagaatatacaaaggttccttcccaaccccgcaggcgttcagttggaagaccctgagtttcaggccagcaatattatgcactcaatcaacggctatgtgtttgatagtctccagctttctgtttgcctccatgaagtagcctattggtacatcttgtcaattggtgctcaaacagacttcctctccgtcttcttctccggctacacctttaagcacaagggcgtgtatgaggacactctcacactctttccattttctggagaaaccgtgttcatgagcatggagaatccaggcctttggatcttgggttgccacaacagtgattttcgcaatcggggaatgactgctctcctcaaagtcagcagctgtgattggaacacaggcgactattacgaagattcttacgaggacataagtgcctacttcgactccaagaataacgccattgagcccagatcattctcccagaatcctcccgtgcttaaaaggcatcagcgcgaaggtaccagaactactcttcagtctgatcaagaggagattgactatgacgacaccattagcgtggaaatgaagaaggaggatttcgatatctatgacgaagatgagaaccagtctccgcggagctttcagaagaagacgcgacactacttcattgcagcagtcgaaaggctttgggactacggtatgtcatcatcgcctcatgtgttgcgcaatagagctcagagtggaagtgttccacagttcaagaaagtcgtctttcaagagtttacagatggcagcttcacacagcctctctatcggggcgagcttaacgaacatttgggactccttggtccctatatccgagccgaagtggaggacaacattatggttacctttaggaatcaagcctctcgcccctacagcttctactcctccctcatcagttatgaggaggatcagagacaaggcgctgaaccacggaagaactttgtgaaaccgaatgagacgaagacctacttctggaaagtacagcaccacatggcccccacaaaagacgaattcgattgcaaagcatgggcgtatttttcagacgttgacttggagaaagatgtacattcaggacttattggtcctttgttggtgtgtcacactaacactctcaatccagcccatggcaggcaggtgacagtccaggaattcgctcttttctttaccatctttgatgagaccaagtcctggtacttcacggaaaacatggagcgcaattgcagagccccctgtaacatacagatggaggaccctacctttaaggaaaattatcggttccacgcaatcaacggatacattatggatacactccctggccttgtgatggctcaggaccaacgaatcaggtggtacctcctcagcatgggttctaatgagaacatacactccattcacttttcaggacatgtgttcactgtccggaagactgaagagtataagatggccctctacaatttgtatccaggcgtgtttgagaccgttgaaatgcttccctctaaagctggcatctggagagtagagtgcttgatcggagaacatcttcacgcaggtatgagcaccttgttcctcgtgtacagcaacaaatgtcagaatccacttggcatggccagtggacacattcgcgactttcagatcacagcatctggccagtatggacaatgggccccaaagttggctcgcctccattactccggtagcataaatgcgtggtccactaaagaacctttcagctggattaaggtcgatcttcttgcccccatgatcatccacggcattaagacacagggagcgaggcagaaattctcctccctctacatctcacagttcattattatgtatagtttggacggcaagaagtggcaaacttatagaggtaacagtactggaacagacatggtgttcttcggcaacgttgatagctctggcatcaaacacaacatctttaatcctcccataatagctcggtacatcagattgcatccgacccactacagcattaggagtacactccgaatggagcttatgggttgcgacttgaattcctgttcaatgccactcggaatggagtctaaagccatctctgatgcacagataaccgccagtagctactttacgaacatgtttgctacgtggtcaccctctaaggcaaggcttcatttgcaaggccggtctaatgcctggagacctcaggtgaacaacccgaaagaatggctccaggtggactttcagaagaccatgaaagtaacaggtgtcactactcagggagttaagtccttggatactagcatgtatgtgaaggagttccttatttcctcatcacaagatggccaccagtggaccctcttctttcagaatggtaaggtcaaagtgtttcagggcaatcaagacagcttcacacccgtggtgaacagtcttgatcctccactcttgacacgataccttcgaatccatccacagtcttgggagcaccagattgcattgcgcatggaagtacttggatgcgaggctcaggacctctac

SEQ ID NO: 1664 - protein, 1457 aa, synthetic construct
  REGION 1..1457: note = Variant of human B-domain deleted Factor VIII
MQIELSTCFFLCLLRFCFSATRRYYLGAVELSWDYMQSDLGELPVDARFPPRVPKSFPFNTSQVYKKTLFVEFTDHLFNIAKPRPPWMGLLGPTIQAEVYDTVVITLKNMASHPVSLHAVGVSYWKASEGAEYDDQTSQREKEDDKVFPGGSHTYVWQVLKENGPMASDPPCLTYSYLSHVDLVKDLNSGLIGALLVCREGSLAKEKTQTLAKFILLFAVFDEGKSWHSETKNSLMQDRDAASARAWPKMHTVNGYVNRTLPGLIGCHRKSVYWHVIGMGTTPEVHSIFLEGHTFLVRNHRQASLGISPITFLTAQTLLRDLGQFLLFCHIPSHQHDGMEAYVKVDSCPEEPQLRMKNNEEAEDYDDDLTDSEMDVVRFDDDNSPSIIQARSGAKKHPKTWVHYIAAEEEDWDYAPLVLAPDDRSYKSQYLNNGPQRIGRKYKKVRFMAYTDETFKTREAIQHESGILGPLLYGEVGDTLLIIFKNQASRPYNIYPHGITDVRPLYSRRLPKGVKHLKDFPILPGEIFKYKWTITVEDGPTKSDPRCLTRYYSSFVNWERDLASGLIGPLLICYKESVDQRGNQIMSDKRNVILFSVFDENRSWYLTENIQRFLPNPAGVQLEDPEFQASNIMHSINGYVFDSLQLSVCLHEVAYWYILSIGAQTDFLSVFFSGYTFKHKGVYEDTLTLFPFSGETVFMSMENPGLWILGCHNSDFRNRGMTALLKVSSCDWNTGDYYEDSYEDISAYFDSKNNAIEPRSFSQNPPVLKRHQREGTRTTLQSDQEEIDYDDTISVEMKKEDFDIYDEDENQSPRSFQKKTRHYFIAAVERLWDYGMSSSPHVLRNRAQSGSVPQFKKVVFQEFTDGSFTQPLYRGELNEHLGLLGPYIRAEVEDNIMVTFRNQASRPYSFYSSLISYEEDQRQGAEPRKNFVKPNETKTYFWKVQHHMAPTKDEFDCKAWAYFSDVDLEKDVHSGLIGPLLVCHTNTLNPAHGRQVTVQEFALFFTIFDETKSWYFTENMERNCRAPCNIQMEDPTFKENYRFHAINGYIMDTLPGLVMAQDQRIRWYLLSMGSNENIHSIHFSGHVFTVRKTEEYKMALYNLYPGVFETVEMLPSKAGIWRVECLIGEHLHAGMSTLFLVYSNKCQNPLGMASGHIRDFQITASGQYGQWAPKLARLHYSGSINAWSTKEPFSWIKVDLLAPMIIHGIKTQGARQKFSSLYISQFIIMYSLDGKKWQTYRGNSTGTDMVFFGNVDSSGIKHNIFNPPIIARYIRLHPTHYSIRSTLRMELMGCDLNSCSMPLGMESKAISDAQITASSYFTNMFATWSPSKARLHLQGRSNAWRPQVNNPKEWLQVDFQKTMKVTGVTTQGVKSLDTSMYVKEFLISSSQDGHQWTLFFQNGKVKVFQGNQDSFTPVVNSLDPPLLTRYLRIHPQSWEHQIALRMEVLGCEAQDLY

SEQ ID NO: 1665 - DNA, 4371 bp, synthetic construct
  misc_feature 1..4371: note = Variant of human B-domain deleted Factor VIII
  source 1..4371: mol_type = other DNA
atgcagattgaactgtctacctgcttcttcctctgtttgctgaggttctgctttagcgccactagacggtactaccttggcgctgtggagctgtcctgggactatatgcagagtgatttgggagagcttcccgtcgacgcacgatttcctcctcgcgttccaaagtcatttccctttaacacaagccaggtgtacaagaagacgctcttcgtcgaattcaccgatcacctgttcaatatcgccaaacccagaccaccatggatgggtcttttggggcctaccatacaagcggaggtgtatgacacagttgttatcactctcaagaacatggcttctcatccggtaagtcttcacgcagtgggcgtgtcctactggaaagcttcagaaggagccgagtatgatgatcagacatcccagagggagaaagaagacgacaaggtatttccaggtgggtctcatacctatgtgtggcaagtgctcaaagagaatggccctatggcaagcgatccgccgtgtttgacttacagctacctttcacacgttgacctcgtcaaggacctcaactccgggttgattggagccttgttggtatgcagggaaggatctcttgccaaagagaagacacagaccctggccaagtttatccttctctttgctgtgttcgatgagggcaaaagttggcatagcgaaacgaagaattccctcatgcaggatcgcgacgcagccagcgccagagcttggcccaagatgcacactgtgaacggatatgtcaataggacgcttcctggcttgattgggtgtcatcggaaaagtgtctactggcacgtgatcggaatggggacaacaccagaggtccactccatatttctcgaaggccataccttccttgttcgaaaccacagacaggcatccttggggatctctcccattacctttctcactgcccaaacgctccttcgtgacttgggtcagttccttctcttttgccatatcccgtcacaccagcatgatggtatggaagcttatgtgaaagtcgacagttgtcctgaggagccacagttgcgcatgaagaataatgaagaagccgaggattacgacgacgatctcaccgattctgagatggacgtggtgaggtttgatgacgacaactctccctccatcattcaagctcggagcggggcgaagaaacaccccaagacttgggtccactatatagcggcggaagaggaggattgggattacgctcctcttgtattggcaccagatgaccgctcatacaaaagccagtacctcaacaacggaccgcagagaattggccggaagtataagaaagtgcgatttatggcctatacagacgaaacctttaagacaagggaggccatccagcatgagagtgggattttgggacctcttctttacggcgaagttggtgataccctcctcatcatcttcaagaatcaagcttctcgcccctataacatttacccacacgggatcactgacgttaggcctttgtatagcagaagacttcccaaaggcgtgaagcatctcaaagacttccccattttgccaggcgagatctttaagtacaaatggaccattacagtggaagatggaccgactaaatcagaccctcgatgccttacgcggtactattcctccttcgtgaattgggagagagatttggcaagcggactcataggaccactcctcatctgttacaaggaatctgtagaccagaggggtaaccagattatgagtgataaacgcaatgtgatcctttttagcgtcttcgacgagaaccggtcctggtacttgaccgagaatatacaaaggttccttcccaaccccgcaggcgttcagttggaagaccctgagtttcaggccagcaatattatgcactcaatcaacggctatgtgtttgatagtctccagctttctgtttgcatgcatgaagtagcctattggtacatcttgtcaattggtgctcaaacagacttcctctccgtcttcttctccggctacacctttaagcacaagggcgtgtatgaggacactctcacactctttccattttctggagaaaccgtgttcatgagcatggagaatccaggcctttggatcttgggttgccacaacagtgattttcgcaatcggggaatgactgctctcctcaaagtcagcagctgtgattggaacacaggcgactattacgaagattcttacgaggacataagtgcctactttgactccaagaataacgccattgagcccagatcattctcccagaatcctcccgtgcttaaaaggcatcagcgcgaaggtaccagaactactcttcagtctgatcaagaggagattgactatgacgacaccattagcgtggaaatgaagaaggaggatttcgatatctatgacgaagatgagaaccagtctccgcggagctttcagaagaagacgcgacactacttcattgcagcagtcgaaaggctttgggactacggtatgtcatcatcccctcatgtgttgcgcaatagagctcagagtggaagtgttccacagttcaagaaagtcgtctttcaagagtttacagatggcagcttcacacagcctctctatcggggcgagcttaacgaacatttgggactccttggtccctatatccgagccgaagtggaggacaacattatggttacctttaggaatcaagcctctcgcccctacagcttctactcctccctcatcagttatgaggaggatcagagacaaggcgctgaaccacggaagaactttgtgaaaccgaatgagacgaagacctacttctggaaagtacagcaccacatggcccccacaaaagacgaattcgattgcaaagcatgggcgtatttttcagacgttgacttggagaaagatgtacattcaggacttattggtcctttgttggtgtgtcacactaacactctcaatccagcccatggcaggcaggtgacagtccaggaattcgctcttttctttaccatctttgatgagaccaagtcctggtacttcacggaaaacatggagcgcaattgcagagccccctgtaacatacagatggaggaccctacctttaaggaaaattatcggttccacgcaatcaacggatacattatggatacactccctggccttgtgatggctcaggaccaacgaatcaggtggtacctcctcagcatgggttctaatgagaacatacactccattcacttttcaggacatgtgttcactgtccggaagaaagaagagtataagatggccctctacaatttgtatccaggcgtgtttgagaccgttgaaatgcttccctctaaagctggcatctggagagtagagtgcttgatcggagaacatcttcacgcaggtatgagcaccttgttcctcgtgtacagcaacaaatgtcagaatccacttggcatggccagtggacacattcgcgactttcagatcacagcatctggccagtatggacaatgggccccaaagttggctcgcctccattactccggtagcataaatgcgtggtccactaaagaacctttcagctggattaaggtcgatcttcttgcccccatgatcatccacggcattaagacacagggagcgaggcagaaattctcctccctctacatctcacagttcattattatgtatagtttggacggcaagaagtggcaaacttatagaggtaacagtactggaacagacatggtgttcttcggcaacgttgatagctctggcatcaaacacaacatctttaatcctcccataatagctcggtacatcagattgcatccgacccactacagcattaggagtacactccgaatggagcttatgggttgcgacttgaattcctgttcaatgccactcggaatggagtctaaagccatctctgatgcacagataaccgccagtagctactttacgaacatgtttgctacgtggtcaccctctaaggcaaggcttcatttgcaaggccggtctaatgcctggagacctcaggtgaacaacccgaaagaatggctccaggtggactttcagaagaccatgaaagtaacaggtgtcactactcagggagttaagtccttggatactagcatgtatgtgaaggagttccttatttcctcatcacaagatggccaccagtggaccctcttctttcagaatggtaaggtcaaagtgtttcagggcaatcaagacagcttcacacccgtggtgaacagtcttgatcctccactcttgacacgataccttcgaatccatccacagtcttgggagcaccagattgcattgcgcatggaagtacttggatgcgaggctcaggacctctac

SEQ ID NO: 1666 - protein, 1457 aa, synthetic construct
  REGION 1..1457: note = Variant of human B-domain deleted Factor VIII
MQIELSTCFFLCLLRFCFSATRRYYLGAVELSWDYMQSDLGELPVDARFPPRVPKSFPFNTSQVYKKTLFVEFTDHLFNIAKPRPPWMGLLGPTIQAEVYDTVVITLKNMASHPVSLHAVGVSYWKASEGAEYDDQTSQREKEDDKVFPGGSHTYVWQVLKENGPMASDPPCLTYSYLSHVDLVKDLNSGLIGALLVCREGSLAKEKTQTLAKFILLFAVFDEGKSWHSETKNSLMQDRDAASARAWPKMHTVNGYVNRTLPGLIGCHRKSVYWHVIGMGTTPEVHSIFLEGHTFLVRNHRQASLGISPITFLTAQTLLRDLGQFLLFCHIPSHQHDGMEAYVKVDSCPEEPQLRMKNNEEAEDYDDDLTDSEMDVVRFDDDNSPSIIQARSGAKKHPKTWVHYIAAEEEDWDYAPLVLAPDDRSYKSQYLNNGPQRIGRKYKKVRFMAYTDETFKTREAIQHESGILGPLLYGEVGDTLLIIFKNQASRPYNIYPHGITDVRPLYSRRLPKGVKHLKDFPILPGEIFKYKWTITVEDGPTKSDPRCLTRYYSSFVNWERDLASGLIGPLLICYKESVDQRGNQIMSDKRNVILFSVFDENRSWYLTENIQRFLPNPAGVQLEDPEFQASNIMHSINGYVFDSLQLSVCMHEVAYWYILSIGAQTDFLSVFFSGYTFKHKGVYEDTLTLFPFSGETVFMSMENPGLWILGCHNSDFRNRGMTALLKVSSCDWNTGDYYEDSYEDISAYFDSKNNAIEPRSFSQNPPVLKRHQREGTRTTLQSDQEEIDYDDTISVEMKKEDFDIYDEDENQSPRSFQKKTRHYFIAAVERLWDYGMSSSPHVLRNRAQSGSVPQFKKVVFQEFTDGSFTQPLYRGELNEHLGLLGPYIRAEVEDNIMVTFRNQASRPYSFYSSLISYEEDQRQGAEPRKNFVKPNETKTYFWKVQHHMAPTKDEFDCKAWAYFSDVDLEKDVHSGLIGPLLVCHTNTLNPAHGRQVTVQEFALFFTIFDETKSWYFTENMERNCRAPCNIQMEDPTFKENYRFHAINGYIMDTLPGLVMAQDQRIRWYLLSMGSNENIHSIHFSGHVFTVRKKEEYKMALYNLYPGVFETVEMLPSKAGIWRVECLIGEHLHAGMSTLFLVYSNKCQNPLGMASGHIRDFQITASGQYGQWAPKLARLHYSGSINAWSTKEPFSWIKVDLLAPMIIHGIKTQGARQKFSSLYISQFIIMYSLDGKKWQTYRGNSTGTDMVFFGNVDSSGIKHNIFNPPIIARYIRLHPTHYSIRSTLRMELMGCDLNSCSMPLGMESKAISDAQITASSYFTNMFATWSPSKARLHLQGRSNAWRPQVNNPKEWLQVDFQKTMKVTGVTTQGVKSLDTSMYVKEFLISSSQDGHQWTLFFQNGKVKVFQGNQDSFTPVVNSLDPPLLTRYLRIHPQSWEHQIALRMEVLGCEAQDLY

SEQ ID NO: 1667 - DNA, 4371 bp, synthetic construct
  misc_feature 1..4371: note = Variant of human B-domain deleted Factor VIII
  source 1..4371: mol_type = other DNA
atgcagattgaactgtctacctgcttcttcctctgtttgctgaggttctgctttagcgccactagacggtactaccttggcgctgtggagctgtcctgggactatatgcagagtgatttgggagagcttcccgtcgacgcacgatttcctcctcgcgttccaaagtcatttccctttaacacaagccaggtgtacaagaagacgctcttcgtcgaattcaccgatcacctgttcaatatcgccaaacccagaccaccatggatgggtcttttggggcctaccatacaagcggaggtgtatgacacagttgttatcactctcaagaacatggcttctcatccggtaagtcttcacgcagtgggcgtgtcctactggaaagcttcagaaggagccgagtatgatgatcagacatcccagagggagaaagaagacgacaaggtatttccaggtgggtctcatacctatgtgtggcaagtgctcaaagagaatggccctatggcaagcgatccgccgtgtttgacttacagctacctttcacacgttgacctcgtcaaggacctcaactccgggttgattggagccttgttggtatgcagggaaggatctcttgccaaagagaagacacagaccctggccaagtttatccttctctttgctgtgttcgatgagggcaaaagttggcatagcgaaacgaagaattccctcatgcaggatcgcgacgcagccagcgccagagcttggcccaagatgcacactgtgaacggatatgtcaataggacgcttcctggcttgattgggtgtcatcggaaaagtgtctactggcacgtgatcggaatggggacaacaccagaggtccactccatatttctcgaaggccataccttccttgttcgaaaccacatgcaggcatccttggggatctctcccattacctttctcactgcccaaacgctccttcgtgacttgggtcaattccttctcttttgccatatcccgtcacaccagcatgatggtatggaagcttatgtgaaagtcgacagttgtcctgaggagccacagttgcgcatgaagaataatgaagaagccgaggattacgacgacgatctcaccgattctgagatggacgtggtgaggtttgatgacgacaactctccctccatcattcaagctcggagcggggcgaagaaacaccccaagacttgggtccactatatagcggcggaagaggaggattgggattacgctcctcttgtattggcaccagatgaccgctcatacaaaagccagtacctcaacaacggaccgcagagaattggccggaagtataagaaagtgcgatttatggcctatacagacgaaacctttaagacaagggaggccatccagcatgagagtgggattttgggacctcttctttacggcgaagttggtgataccctcctcatcatcttcaagaatcaagcttctcgcccctataacatttacccacacgggatcactgacgttaggcctttgtatagcagaagacttcccaaaggcgtgaagcatctcaaagacttccccattttgccaggcgagatctttaagtacaaatggaccattacagtggaagatggaccgactaaatcagaccctcgatgccttacgcggtactattcctccttcgtgaattgggagagagatttggcaagcggactcataggaccactcctcatctgttacaaggaatctgtagaccagaggggtaaccagattatgagtgataaacgcaatgtgatcctttttagcgtcttcgacgagaaccggtcctggtacttgaccgagaatatacaaaggttccttcccaaccccgcaggcgttcagttggaagaccctgagtttcaggccagcaatattatgcactcaatcaacggctatgtgtttgatagtctccagctttctgtttgcctccatgaagtagcctattggtacatcttgtcaattggtgctcaaacagacttcctctccgtcttcttctccggctacacctttaagcacaagggcgtgtatgaggacactctcacactctttccattttctggagaaaccgtgttcatgagcatggagaatccaggcctttggatcttgggttgccacaacagtgattttcgcaatcggggaatgactgctctcctcaaagtcagcagctgtgattggaacacaggcgactattacgaagattcttacgaggacataagtgcctactttgactccaagaataacgccattgagcccagatcattctcccagaatcctcccgtgcttaaaaggcatcagcgcgaaggtaccagaactactcttcagtctgatcaagaggagattgactatgacgacaccattagcgtggaaatgaagaaggaggatttcgatatctatgacgaagatgagaaccagtctccgcggagctttcagaagaagacgcgacactacttcattgcagcagtcgaaaggctttgggactacggtatgtcatcatcgcctcatgtgttgcgcaatagagctcagagtggaagtgttccacagttcaagaaagtcgtctttcaagagtttacagatggcagcttcacacagcctctctatcggggcgagcttaacgaacatttgggactccttggtccctatatccgagccgaagtggaggacaacattatggttacctttaggaatcaagcctctcgcccctacagcttctactcctccctcatcagttatgaggaggatcagagacaaggcgctgaaccacggaagaactttgtgaaaccgaatgagacgaagacctacttctggaaagtacagcaccacatggcccccacaaaagacgaattcgattgcaaagcatgggcgtatttttcagacgttgacttggagaaagatgtacattcaggacttattggtcctttgttggtgtgtcacactaacactctcaatccagcccatggcaggcaggtgacagtccaggaattcgctcttttctttaccatctttgatgagaccaagtcctggtacttcacggaaaacatggagcgcaattgcagagccccctgtaacatacagatggaggaccctacctttaaggaaaattatcggttccacgcaatcaacggatacattatggatacactccctggccttgtgatggctcaggaccaacgaatcaggtggtacctcctcagcatgggttctaatgagaacatacactccattcacttttcaggacatgtgttcactgtccggaagaaagaagagtataagatggccctctacaatttgtatccaggcgtgtttgagaccgttgaaatgcttccctctaaagctggcatctggagagtagagtgcttgatcggagaacatcttcacgcaggtatgagcaccttgttcctcgtgtacagcaacaaatgtcagaatccacttggcatggccagtggacacattcgcgactttcagatcacagcatctggccagtatggacaatgggccccaaagttggctcgcctccattactccggtagcataaatgcgtggtccactaaagaacctttcagctggattaaggtcgatcttcttgcccccatgatcatccacggcattaagacacagggagcgaggcagaaattctcctccctctacatctcacagttcattattatgtatagtttggacggcaagaagtggcaaacttatagaggtaacagtactggaacagacatggtgttcttcggcaacgttgatagctctggcatcaaacacaacatctttaatcctcccataatagctcggtacatcagattgcatccgacccactacagcattaggagtacactccgaatggagcttatgggttgcgacttgaattcctgttcaatgccactcggaatggagtctaaagccatctctgatgcacagataaccgccagtagctactttacgaacatgtttgctacgtggtcaccctctaaggcaaggcttcatttgcaaggccggtctaatgcctggagacctcaggtgaacaacccgaaagaatggctccaggtggactttcagaagaccatgaaagtaacaggtgtcactactcagggagttaagtccttggatactagcatgtatgtgaaggagttccttatttcctcatcacaagatggccaccagtggaccctcttctttcagaatggtaaggtcaaagtgtttcagggcaatcaagacagcttcacacccgtggtgaacagtcttgatcctccactcttgacacgataccttcgaatccatccacagtcttgggagcaccagattgcattgcgcatggaagtacttggatgcgaggctcaggacctctac

SEQ ID NO: 1668 - protein, 1457 aa, synthetic construct
  REGION 1..1457: note = Variant of human B-domain deleted Factor VIII
MQIELSTCFFLCLLRFCFSATRRYYLGAVELSWDYMQSDLGELPVDARFPPRVPKSFPFNTSQVYKKTLFVEFTDHLFNIAKPRPPWMGLLGPTIQAEVYDTVVITLKNMASHPVSLHAVGVSYWKASEGAEYDDQTSQREKEDDKVFPGGSHTYVWQVLKENGPMASDPPCLTYSYLSHVDLVKDLNSGLIGALLVCREGSLAKEKTQTLAKFILLFAVFDEGKSWHSETKNSLMQDRDAASARAWPKMHTVNGYVNRTLPGLIGCHRKSVYWHVIGMGTTPEVHSIFLEGHTFLVRNHMQASLGISPITFLTAQTLLRDLGQFLLFCHIPSHQHDGMEAYVKVDSCPEEPQLRMKNNEEAEDYDDDLTDSEMDVVRFDDDNSPSIIQARSGAKKHPKTWVHYIAAEEEDWDYAPLVLAPDDRSYKSQYLNNGPQRIGRKYKKVRFMAYTDETFKTREAIQHESGILGPLLYGEVGDTLLIIFKNQASRPYNIYPHGITDVRPLYSRRLPKGVKHLKDFPILPGEIFKYKWTITVEDGPTKSDPRCLTRYYSSFVNWERDLASGLIGPLLICYKESVDQRGNQIMSDKRNVILFSVFDENRSWYLTENIQRFLPNPAGVQLEDPEFQASNIMHSINGYVFDSLQLSVCLHEVAYWYILSIGAQTDFLSVFFSGYTFKHKGVYEDTLTLFPFSGETVFMSMENPGLWILGCHNSDFRNRGMTALLKVSSCDWNTGDYYEDSYEDISAYFDSKNNAIEPRSFSQNPPVLKRHQREGTRTTLQSDQEEIDYDDTISVEMKKEDFDIYDEDENQSPRSFQKKTRHYFIAAVERLWDYGMSSSPHVLRNRAQSGSVPQFKKVVFQEFTDGSFTQPLYRGELNEHLGLLGPYIRAEVEDNIMVTFRNQASRPYSFYSSLISYEEDQRQGAEPRKNFVKPNETKTYFWKVQHHMAPTKDEFDCKAWAYFSDVDLEKDVHSGLIGPLLVCHTNTLNPAHGRQVTVQEFALFFTIFDETKSWYFTENMERNCRAPCNIQMEDPTFKENYRFHAINGYIMDTLPGLVMAQDQRIRWYLLSMGSNENIHSIHFSGHVFTVRKKEEYKMALYNLYPGVFETVEMLPSKAGIWRVECLIGEHLHAGMSTLFLVYSNKCQNPLGMASGHIRDFQITASGQYGQWAPKLARLHYSGSINAWSTKEPFSWIKVDLLAPMIIHGIKTQGARQKFSSLYISQFIIMYSLDGKKWQTYRGNSTGTDMVFFGNVDSSGIKHNIFNPPIIARYIRLHPTHYSIRSTLRMELMGCDLNSCSMPLGMESKAISDAQITASSYFTNMFATWSPSKARLHLQGRSNAWRPQVNNPKEWLQVDFQKTMKVTGVTTQGVKSLDTSMYVKEFLISSSQDGHQWTLFFQNGKVKVFQGNQDSFTPVVNSLDPPLLTRYLRIHPQSWEHQIALRMEVLGCEAQDLY

SEQ ID NO: 1669 - DNA, 4371 bp, synthetic construct
  misc_feature 1..4371: note = Variant of human B-domain deleted Factor VIII
  source 1..4371: mol_type = other DNA
atgcagattgaactgtctacctgcttcttcctctgtttgctgaggttctgctttagcgccactagacggtactaccttggcgctgtggagctgtcctgggactatatgcagagtgatttgggagagcttcccgtcgacgcacgatttcctcctcgcgttccaaagtcatttccctttaacacaagccaggtgtacaagaagacgctcttcgtcgaattcaccgatcacctgttcaatatcgccaaacccagaccaccatggatgggtcttttggggcctaccatacaagcggaggtgtatgacacagttgttatcactctcaagaacatggcttctcatccggtaagtcttcacgcagtgggcgtgtcctactggaaagcttcagaaggagccgagtatgatgatcagacatcccagagggagaaagaagacgacaaggtatttccaggtgggtctcatacctatgtgtggcaagtgctcaaagagaatggccctatggcaagcgatccgccgtgtttgacttacagctacctttcacacgttgacctcgtcaaggacctcaactccgggttgattggagccttgttggtatgcagggaaggatctcttgccaaagagaagacacagaccctggccaagtttatccttctctttgctgtgttcgatgagggcaaaagttggcatagcgaaacgaagaattccctcatgcaggatcgcgacgcagccagcgccagagcttggcccaagatgcacactgtgaacggatatgtcaataggacgcttcctggcttgattgggtgtcatcggaaaagtgtctactggcacgtgatcggaatggggacaacaccagaggtccactccatatttctcgaaggccataccttccttgttcgaaaccacagacaggcatccttggggatctctcccattacctttctcactgcccaaacgctccttcgtgacttgggtcagttccttctcttttgccatatcccgtcacaccagcatgatggtatggaagcttatgtgaaagtcgacagttgtcctgaggagccacagttgcgcatgaagaataatgaagaagccgaggattacgacgacgatctcaccgattctgagatggacgtggtgaggtttgatgacgacaactctccctccatcattcaagctcggagcggggcgaagaaacaccccaagacttgggtccactatatagcggcggaagaggaggattgggattacgctcctcttgtattggcaccagatgaccgctcatacaaaagccagtacctcaacaacggaccgcagagaattggccggaagtataagaaagtgcgatttatggcctatacagacgaaacctttaagacaagggaggccatccagcatgagagtgggattttgggacctcttctttacggcgaagttggtgataccctcctcatcatcttcaagaatcaagcttctcgcccctataacatttacccacacgggatcactgacgttaggcctttgtatagcagaagacttcccaaaggcgtgaagcatctcaaagacttccccattttgccaggcgagatctttaagtacaaatggaccattaatgtggaagatggaccgactaaatcagaccctcgatgccttacgcggtactattcctccttcgtgaattgggagagagatttggcaagcggactcataggaccactcctcatctgttacaaggaatctgtagaccagaggggtaaccagattatgagtgataaacgcaatgtgatcctttttagcgtcttcgacgagaaccggtcctggtacttgaccgagaatatacaaaggttccttcccaaccccgcaggcgttcagttggaagaccctgagtttcaggccagcaatattatgcactcaatcaacggctatgtgtttgatagtctccagctttctgtttgcctccatgaagtagcctattggtacatcttgtcaattggtgctcaaacagacttcctctccgtcttcttctccggctacacctttaagcacaagggcgtgtatgaggacactctcacactctttccattttctggagaaaccgtgttcatgagcatggagaatccaggcctttggatcttgggttgccacaacagtgattttcgcaatcggggaatgactgctctcctcaaagtcagcagctgtgattggaacacaggcgactattacgaagattcttacgaggacataagtgcctactttgactccaagaataacgccattgagcccagatcattctcccagaatcctcccgtgcttaaaaggcatcagcgcgaaggtaccagaactactcttcagtctgatcaagaggagattgactatgacgacaccattagcgtggaaatgaagaaggaggatttcgatatctatgacgaagatgagaaccagtctccgcggagctttcagaagaagacgcgacactacttcattgcagcagtcgaaaggctttgggactacggtatgtcatcatcccctcatgtgttgcgcaatagagctcagagtggaagtgttccacagttcaagaaagtcgtctttcaagagtttacagatggcagcttcacacagcctctctatcggggcgagcttaacgaacatttgggactccttggtccctatatccgagccgaagtggaggacaacattatggttacctttaggaatcaagcctctcgcccctacagcttctactcctccctcatcagttatgaggaggatcagagacaaggcgctgaaccacggaagaactttgtgaaaccgaatgagacgaagacctacttctggaaagtacagcaccacatggcccccacaaaagacgaattcgattgcaaagcatgggcgtatttttcagacgttgacttggagaaagatgtacattcaggacttattggtcctttgttggtgtgtcacactaacactctcaatccagcccatggcaggcaggtgacagtccaggaattcgctcttttctttaccatctttgatgagaccaagtcctggtacttcacggaaaacatggagcgcaattgcagagccccctgtaacatacagatggaggaccctacctttaaggaaaattatcggttccacgcaatcaacggatacattatggatacactccctggccttgtgatggctcaggaccaacgaatcaggtggtacctcctcagcatgggttctaatgagaacatacactccattcacttttcaggacatgtgttcactgtccggaagaaagaagagtataagatggccctctacaatttgtatccaggcgtgtttgagaccgttgaaatgcttccctctaaagctggcatctggagagtagagtgcttgatcggagaacatcttcacgcaggtatgagcaccttgttcctcgtgtacagcaacaaatgtcagaatccacttggcatggccagtggacacattcgcgactttcagatcacagcatctggccagtatggacaatgggccccaaagttggctcgcctccattactccggtagcataaatgcgtggtccactaaagaacctttcagctggattaaggtcgatcttcttgcccccatgatcatccacggcattaagacacagggagcgaggcagaaattctcctccctctacatctcacagttcattattatgtatagtttggacggcaagaagtggcaaacttatagaggtaacagtactggaacagacatggtgttcttcggcaacgttgatagctctggcatcaaacacaacatctttaatcctcccataatagctcggtacatcagattgcatccgacccactacagcattaggagtacactccgaatggagcttatgggttgcgacttgaattcctgttcaatgccactcggaatggagtctaaagccatctctgatgcacagataaccgccagtagctactttacgaacatgtttgctacgtggtcaccctctaaggcaaggcttcatttgcaaggccggtctaatgcctggagacctcaggtgaacaacccgaaagaatggctccaggtggactttcagaagaccatgaaagtaacaggtgtcactactcagggagttaagtccttggatactagcatgtatgtgaaggagttccttatttcctcatcacaagatggccaccagtggaccctcttctttcagaatggtaaggtcaaagtgtttcagggcaatcaagacagcttcacacccgtggtgaacagtcttgatcctccactcttgacacgataccttcgaatccatccacagtcttgggagcaccagattgcattgcgcatggaagtacttggatgcgaggctcaggacctctac

SEQ ID NO: 1670 - protein, 1457 aa, synthetic construct
  REGION 1..1457: note = Variant of human B-domain deleted Factor VIII
MQIELSTCFFLCLLRFCFSATRRYYLGAVELSWDYMQSDLGELPVDARFPPRVPKSFPFNTSQVYKKTLFVEFTDHLFNIAKPRPPWMGLLGPTIQAEVYDTVVITLKNMASHPVSLHAVGVSYWKASEGAEYDDQTSQREKEDDKVFPGGSHTYVWQVLKENGPMASDPPCLTYSYLSHVDLVKDLNSGLIGALLVCREGSLAKEKTQTLAKFILLFAVFDEGKSWHSETKNSLMQDRDAASARAWPKMHTVNGYVNRTLPGLIGCHRKSVYWHVIGMGTTPEVHSIFLEGHTFLVRNHRQASLGISPITFLTAQTLLRDLGQFLLFCHIPSHQHDGMEAYVKVDSCPEEPQLRMKNNEEAEDYDDDLTDSEMDVVRFDDDNSPSIIQARSGAKKHPKTWVHYIAAEEEDWDYAPLVLAPDDRSYKSQYLNNGPQRIGRKYKKVRFMAYTDETFKTREAIQHESGILGPLLYGEVGDTLLIIFKNQASRPYNIYPHGITDVRPLYSRRLPKGVKHLKDFPILPGEIFKYKWTINVEDGPTKSDPRCLTRYYSSFVNWERDLASGLIGPLLICYKESVDQRGNQIMSDKRNVILFSVFDENRSWYLTENIQRFLPNPAGVQLEDPEFQASNIMHSINGYVFDSLQLSVCLHEVAYWYILSIGAQTDFLSVFFSGYTFKHKGVYEDTLTLFPFSGETVFMSMENPGLWILGCHNSDFRNRGMTALLKVSSCDWNTGDYYEDSYEDISAYFDSKNNAIEPRSFSQNPPVLKRHQREGTRTTLQSDQEEIDYDDTISVEMKKEDFDIYDEDENQSPRSFQKKTRHYFIAAVERLWDYGMSSSPHVLRNRAQSGSVPQFKKVVFQEFTDGSFTQPLYRGELNEHLGLLGPYIRAEVEDNIMVTFRNQASRPYSFYSSLISYEEDQRQGAEPRKNFVKPNETKTYFWKVQHHMAPTKDEFDCKAWAYFSDVDLEKDVHSGLIGPLLVCHTNTLNPAHGRQVTVQEFALFFTIFDETKSWYFTENMERNCRAPCNIQMEDPTFKENYRFHAINGYIMDTLPGLVMAQDQRIRWYLLSMGSNENIHSIHFSGHVFTVRKKEEYKMALYNLYPGVFETVEMLPSKAGIWRVECLIGEHLHAGMSTLFLVYSNKCQNPLGMASGHIRDFQITASGQYGQWAPKLARLHYSGSINAWSTKEPFSWIKVDLLAPMIIHGIKTQGARQKFSSLYISQFIIMYSLDGKKWQTYRGNSTGTDMVFFGNVDSSGIKHNIFNPPIIARYIRLHPTHYSIRSTLRMELMGCDLNSCSMPLGMESKAISDAQITASSYFTNMFATWSPSKARLHLQGRSNAWRPQVNNPKEWLQVDFQKTMKVTGVTTQGVKSLDTSMYVKEFLISSSQDGHQWTLFFQNGKVKVFQGNQDSFTPVVNSLDPPLLTRYLRIHPQSWEHQIALRMEVLGCEAQDLY

SEQ ID NO: 1671 - DNA, 4371 bp, synthetic construct
  misc_feature 1..4371: note = Variant of human B-domain deleted Factor VIII
  source 1..4371: mol_type = other DNA
atgcagattgaactgtctacctgcttcttcctctgtttgctgaggttctgctttagcgccactagacggtactaccttggcgctgtggagctgtcctgggactatatgcagagtgatttgggagagcttcccgtcgacgcacgatttcctcctcgcgttccaaagtcatttccctttaacacaagccaggtgtacaagaagacgctcttcgtcgaattcaccgatcacctgttcaatatcgccaaacccagaccaccatggatgggtcttttggggcctaccatacaagcggaggtgtatgacacagttgttatcactctcaagaacatggcttctcatccggtaagtcttcacgcagtgggcgtgtcctactggaaagcttcagaaggagccgagtatgatgatcagacatcccagagggagaaagaagacgacaaggtatttccaggtgggtctcatacctatgtgtggcaagtgctcaaagagaatggccctatggcaagcgatccgccgtgtttgacttacagctacctttcacacgttgacctcgtcaaggacctcaactccgggttgattggagccttgttggtatgcagggaaggatctcttgccaaagagaagacacagaccctggccaagtttatccttctctttgctgtgttcgatgagggcaaaagttggcatagcgaaacgaagaattccctcatgcaggatcgcgacgcagccagcgccagagcttggcccaagatgcacactgtgaacggatatgtcaataggacgcttcctggcttgattgggtgtcatcggaaaagtgtctactggcacgtgatcggaatggggacaacaccagaggtccactccatatttctcgaaggccataccttccttgttcgaaaccacagacaggcatccttggggatctctcccattacctttctcactgcccaaacgctccttcgtgacttgggtcagttccttctcttttgccatatcccgtcacaccagcatgatggtatggaagcttatgtgaaagtcgacagttgtcctgaggagccacagttgcgcatgaagaataatgaagaagccgaggattacgacgacgatctcaccgattctgagatggacgtggtgaggtttgatgacgacaactctccctccatcattcaagctcggagcggggcgaagaaacaccccaagacttgggtccactatatagcggcggaagaggaggattgggattacgctcctcttgtattggcaccagatgaccgctcatacaaaagccagtacctcaacaacggaccgcagagaattggccggaagtataagaaagtgcgatttatggcctatacagacgaaacctttaagacaagggaggccatccagcatgagagtgggattttgggacctcttctttacggcgaagttggtgataccctcctcatcatcttcaagaatcaagcttctcgcccctataacatttacccacacgggatcactgacgttaggcctttgtatagcagaagacttcccaaaggcgtgaagcatctcaaagacttccccattttgccaggcgagatctttaagtacaaatggaccattacagtggaagatggaccgactaaatcagaccctcgatgccttacgcggtactattcctccttcgtgaattgggagagagatttggcaagcggactcataggaccactcctcatctgttacaaggaatctgtagaccagaggggtaaccagattatgagtgataaacgcaatgtgatcctttttagcgtcttcgacgagaaccggtcctggtacttgaccgagaatatacaaaggttccttcccaaccccgcaggcgttcagttggaagaccctgagtttcaggccagcaatattatgcactcaatcaacggctatgtgtttgatagtctccagctttctgtttgcctccatgaagtagcctattggtacatcttgtcaattggtgctcaaacagacttcctctccgtcttcttctccggctacacctttaagcacaagggcgtgtatgaggacactctcacactctttccattttctggagaaaccgtgttcatgagcatggagaatccaggcctttggatcttgggttgccacaacagtgattttcgcaatcggggaatgactgctctcctcaaagtcagcagctgtgattggaacacaggcgactattacgaagattcttacgaggacataagtgcctactttgactccaagaataacgccattgagcccagatcattctcccagaatcctcccgtgcttaaaaggcatcagcgcgaaggtaccagaactactcttcagtctgatcaagaggagattgactatgacgacaccattagcgtggaaatgaagaaggaggatttcgatatctatagggaagatgagaaccagtctccgcggagctttcagaagaagacgcgacactacttcattgcagcagtcgaaaggctttgggactacggtatgtcatcatcccctcatgtgttgcgcaatagagctcagagtggaagtgttccacagttcaagaaagtcgtctttcaagagtttacagatggcagcttcacacagcctctctatcggggcgagcttaacgaacatttgggactccttggtccctatatccgagccgaagtggaggacaacattatggttacctttaggaatcaagcctctcgcccctacagcttctactcctccctcatcagttatgaggaggatcagagacaaggcgctgaaccacggaagaactttgtgaaaccgaatgagacgaagacctacttctggaaagtacagcaccacatggcccccacaaaagacgaattcgattgcaaagcatgggcgtatttttcagacgttgacttggagaaagatgtacattcaggacttattggtcctttgttggtgtgtcacactaacactctcaatccagcccatggcaggcaggtgacagtccaggaattcgctcttttctttaccatctttgatgagaccaagtcctggtacttcacggaaaacatggagcgcaattgcagagccccctgtaacatacagatggaggaccctacctttaaggaaaattatcggttccacgcaatcaacggatacattatggatacactccctggccttgtgatggctcaggaccaacgaatcaggtggtacctcctcagcatgggttctaatgagaacatacactccattcacttttcaggacatgtgttcactgtccggaagaaagaagagtataagatggccctctacaatttgtatccaggcgtgtttgagaccgttgaaatgcttccctctaaagctggcatctggagagtagagtgcttgatcggagaacatcttcacgcaggtatgagcaccttgttcctcgtgtacagcaacaaatgtcagaatccacttggcatggccagtggacacattcgcgactttcagatcacagcatctggccagtatggacaatgggccccaaagttggctcgcctccattactccggtagcataaatgcgtggtccactaaagaacctttcagctggattaaggtcgatcttcttgcccccatgatcatccacggcattaagacacagggagcgaggcagaaattctcctccctctacatctcacagttcattattatgtatagtttggacggcaagaagtggcaaacttatagaggtaacagtactggaacagacatggtgttcttcggcaacgttgatagctctggcatcaaacacaacatctttaatcctcccataatagctcggtacatcagattgcatccgacccactacagcattaggagtacactccgaatggagcttatgggttgcgacttgaattcctgttcaatgccactcggaatggagtctaaagccatctctgatgcacagataaccgccagtagctactttacgaacatgtttgctacgtggtcaccctctaaggcaaggcttcatttgcaaggccggtctaatgcctggagacctcaggtgaacaacccgaaagaatggctccaggtggactttcagaagaccatgaaagtaacaggtgtcactactcagggagttaagtccttggatactagcatgtatgtgaaggagttccttatttcctcatcacaagatggccaccagtggaccctcttctttcagaatggtaaggtcaaagtgtttcagggcaatcaagacagcttcacacccgtggtgaacagtcttgatcctccactcttgacacgataccttcgaatccatccacagtcttgggagcaccagattgcattgcgcatggaagtacttggatgcgaggctcaggacctctac

SEQ ID NO: 1672 - protein, 1457 aa, synthetic construct
  REGION 1..1457: note = Variant of human B-domain deleted Factor VIII
MQIELSTCFFLCLLRFCFSATRRYYLGAVELSWDYMQSDLGELPVDARFPPRVPKSFPFNTSQVYKKTLFVEFTDHLFNIAKPRPPWMGLLGPTIQAEVYDTVVITLKNMASHPVSLHAVGVSYWKASEGAEYDDQTSQREKEDDKVFPGGSHTYVWQVLKENGPMASDPPCLTYSYLSHVDLVKDLNSGLIGALLVCREGSLAKEKTQTLAKFILLFAVFDEGKSWHSETKNSLMQDRDAASARAWPKMHTVNGYVNRTLPGLIGCHRKSVYWHVIGMGTTPEVHSIFLEGHTFLVRNHRQASLGISPITFLTAQTLLRDLGQFLLFCHIPSHQHDGMEAYVKVDSCPEEPQLRMKNNEEAEDYDDDLTDSEMDVVRFDDDNSPSIIQARSGAKKHPKTWVHYIAAEEEDWDYAPLVLAPDDRSYKSQYLNNGPQRIGRKYKKVRFMAYTDETFKTREAIQHESGILGPLLYGEVGDTLLIIFKNQASRPYNIYPHGITDVRPLYSRRLPKGVKHLKDFPILPGEIFKYKWTITVEDGPTKSDPRCLTRYYSSFVNWERDLASGLIGPLLICYKESVDQRGNQIMSDKRNVILFSVFDENRSWYLTENIQRFLPNPAGVQLEDPEFQASNIMHSINGYVFDSLQLSVCLHEVAYWYILSIGAQTDFLSVFFSGYTFKHKGVYEDTLTLFPFSGETVFMSMENPGLWILGCHNSDFRNRGMTALLKVSSCDWNTGDYYEDSYEDISAYFDSKNNAIEPRSFSQNPPVLKRHQREGTRTTLQSDQEEIDYDDTISVEMKKEDFDIYREDENQSPRSFQKKTRHYFIAAVERLWDYGMSSSPHVLRNRAQSGSVPQFKKVVFQEFTDGSFTQPLYRGELNEHLGLLGPYIRAEVEDNIMVTFRNQASRPYSFYSSLISYEEDQRQGAEPRKNFVKPNETKTYFWKVQHHMAPTKDEFDCKAWAYFSDVDLEKDVHSGLIGPLLVCHTNTLNPAHGRQVTVQEFALFFTIFDETKSWYFTENMERNCRAPCNIQMEDPTFKENYRFHAINGYIMDTLPGLVMAQDQRIRWYLLSMGSNENIHSIHFSGHVFTVRKKEEYKMALYNLYPGVFETVEMLPSKAGIWRVECLIGEHLHAGMSTLFLVYSNKCQNPLGMASGHIRDFQITASGQYGQWAPKLARLHYSGSINAWSTKEPFSWIKVDLLAPMIIHGIKTQGARQKFSSLYISQFIIMYSLDGKKWQTYRGNSTGTDMVFFGNVDSSGIKHNIFNPPIIARYIRLHPTHYSIRSTLRMELMGCDLNSCSMPLGMESKAISDAQITASSYFTNMFATWSPSKARLHLQGRSNAWRPQVNNPKEWLQVDFQKTMKVTGVTTQGVKSLDTSMYVKEFLISSSQDGHQWTLFFQNGKVKVFQGNQDSFTPVVNSLDPPLLTRYLRIHPQSWEHQIALRMEVLGCEAQDLY

SEQ ID NO: 1673 - DNA, 4371 bp, synthetic construct
  misc_feature 1..4371: note = Variant of human B-domain deleted Factor VIII
  source 1..4371: mol_type = other DNA
atgcagattgaactgtctacctgcttcttcctctgtttgctgaggttctgctttagcgccactagacggtactaccttggcgctgtggagctgtcctgggactatatgcagagtgatttgggagagcttcccgtcgacgcacgatttcctcctcgcgttccaaagtcatttccctttaacacaagccaggtgtacaagaagacgctcttcgtcgaattcaccgatcacctgttcaatatcgccaaacccagaccaccatggatgggtcttttggggcctaccatacaagcggaggtgtatgacacagttgttatcactctcaagaacatggcttctcatccggtaagtcttcacgcagtgggcgtgtcctactggaaagcttcagaaggagccgagtatgatgatcagacatcccagagggagaaagaagacgacaaggtatttccaggtgggtctcatacctatgtgtggcaagtgctcaaagagaatggccctatggcaagcgatccgccgtgtttgacttacagctacctttcacacgttgacctcgtcaaggacctcaactccgggttgattggagccttgttggtatgcagggaaggatctcttgccaaagagaagacacagaccctggccaagtttatccttctctttgctgtgttcgatgagggcaaaagttggcatagcgaaacgaagaattccctcatgcaggatcgcgacgcagccagcgccagagcttggcccaagatgcacactgtgaacggatatgtcaataggacgcttcctggcttgattgggtgtcatcggaaaagtgtctactggcacgtgatcggaatggggacaacaccagaggtccactccatatttctcgaaggccataccttccttgttcgaaaccacagacaggcatccttggggatctctcccattacctttctcactgcccaaacgctccttcgtgacttgggtcagttccttctcttttgccatatcccgtcacaccagcatgatggtatggaagcttatgtgaaagtcgacagttgtcctgaggagccacagttgcgcatgaagaataatgaagaagccgaggattacgacgacgatctcaccgattctgagatggacgtggtgaggtttgatgacgacaactctccctccatcattcaagctcggagcggggcgaagaaacaccccaagacttgggtccactatatagcggcggaagaggaggattgggattacgctcctcttgtattggcaccagatgaccgctcatacaaaagccagtacctcaacaacggaccgcagagaattggccggaagtataagaaagtgcgatttatggcctatacagacgaaacctttaagacaagggaggccatccagcatgagagtgggattttgggacctcttctttacggcgaagttggtgataccctcctcatcatcttcaagaatcaagcttctcgcccctataacatttacccacacgggatcactgacgttaggcctttgtatagcagaagacttcccaaaggcgtgaagcatctcaaagacttccccattttgccaggcgagatctttaagtacaaatggaccattacagtggaagatggaccgactaaatcagaccctcgatgccttacgcggtactattcctccttcgtgaattgggagagagatttggcaagcggactcataggaccactcctcatctgttacaaggaatctgtagaccagaggggtaaccagattatgagtgataaacgcaatgtgatcctttttagcgtcttcgacgagaaccggtcctggtacttgaccgagaatatacaaaggttccttcccaaccccgcaggcgttcagttggaagaccctgagtttcaggccagcaatattatgcactcaatcaacggctatgtgtttgatagtctccagctttctgtttgcctccatgaagtagcctattggtacatcttgtcaattggtgctcaaacagacttcctctccgtcttcttctccggctacacctttaagcacaagggcgtgtatgaggacactctcacactctttccattttctggagaaaccgtgttcatgagcatggagaatccaggcctttggatcttgggttgccacaacagtgattttcgcaatcggggaatgactgctctcctcaaagtcagcagctgtgattggaacacaggcgactatgaggaagattcttacgaggacataagtgcctactttgactccaagaataacgccattgagcccagatcattctcccagaatcctcccgtgcttaaaaggcatcagcgcgaaggtaccagaactactcttcagtctgatcaagaggagattgactatgacgacaccattagcgtggaaatgaagaaggaggatttcgatatctatgacgaagatgagaaccagtctccgcggagctttcagaagaagacgcgacactacttcattgcagcagtcgaaaggctttgggactacggtatgtcatcatcccctcatgtgttgcgcaatagagctcagagtggaagtgttccacagttcaagaaagtcgtctttcaagagtttacagatggcagcttcacacagcctctctatcggggcgagcttaacgaacatttgggactccttggtccctatatccgagccgaagtggaggacaacattatggttacctttaggaatcaagcctctcgcccctacagcttctactcctccctcatcagttatgaggaggatcagagacaaggcgctgaaccacggaagaactttgtgaaaccgaatgagacgaagacctacttctggaaagtacagcaccacatggcccccacaaaagacgaattcgattgcaaagcatgggcgtatttttcagacgttgacttggagaaagatgtacattcaggacttattggtcctttgttggtgtgtcacactaacactctcaatccagcccatggcaggcaggtgacagtccaggaattcgctcttttctttaccatctttgatgagaccaagtcctggtacttcacggaaaacatggagcgcaattgcagagccccctgtaacatacagatggaggaccctacctttaaggaaaattatcggttccacgcaatcaacggatacattatggatacactccctggccttgtgatggctcaggaccaacgaatcaggtggtacctcctcagcatgggttctaatgagaacatacactccattcacttttcaggacatgtgttcactgtccggaagaaagaagagtataagatggccctctacaatttgtatccaggcgtgtttgagaccgttgaaatgcttccctctaaagctggcatctggagagtagagtgcttgatcggagaacatcttcacgcaggtatgagcaccttgttcctcgtgtacagcaacaaatgtcagaatccacttggcatggccagtggacacattcgcgactttcagatcacagcatctggccagtatggacaatgggccccaaagttggctcgcctccattactccggtagcataaatgcgtggtccactaaagaacctttcagctggattaaggtcgatcttcttgcccccatgatcatccacggcattaagacacagggagcgaggcagaaattctcctccctctacatctcacagttcattattatgtatagtttggacggcaagaagtggcaaacttatagaggtaacagtactggaacagacatggtgttcttcggcaacgttgatagctctggcatcaaacacaacatctttaatcctcccataatagctcggtacatcagattgcatccgacccactacagcattaggagtacactccgaatggagcttatgggttgcgacttgaattcctgttcaatgccactcggaatggagtctaaagccatctctgatgcacagataaccgccagtagctactttacgaacatgtttgctacgtggtcaccctctaaggcaaggcttcatttgcaaggccggtctaatgcctggagacctcaggtgaacaacccgaaagaatggctccaggtggactttcagaagaccatgaaagtaacaggtgtcactactcagggagttaagtccttggatactagcatgtatgtgaaggagttccttatttcctcatcacaagatggccaccagtggaccctcttctttcagaatggtaaggtcaaagtgtttcagggcaatcaagacagcttcacacccgtggtgaacagtcttgatcctccactcttgacacgataccttcgaatccatccacagtcttgggagcaccagattgcattgcgcatggaagtacttggatgcgaggctcaggacctctac

SEQ ID NO: 1674 - protein, 1457 aa, synthetic construct
  REGION 1..1457: note = Variant of human B-domain deleted Factor VIII
MQIELSTCFFLCLLRFCFSATRRYYLGAVELSWDYMQSDLGELPVDARFPPRVPKSFPFNTSQVYKKTLFVEFTDHLFNIAKPRPPWMGLLGPTIQAEVYDTVVITLKNMASHPVSLHAVGVSYWKASEGAEYDDQTSQREKEDDKVFPGGSHTYVWQVLKENGPMASDPPCLTYSYLSHVDLVKDLNSGLIGALLVCREGSLAKEKTQTLAKFILLFAVFDEGKSWHSETKNSLMQDRDAASARAWPKMHTVNGYVNRTLPGLIGCHRKSVYWHVIGMGTTPEVHSIFLEGHTFLVRNHRQASLGISPITFLTAQTLLRDLGQFLLFCHIPSHQHDGMEAYVKVDSCPEEPQLRMKNNEEAEDYDDDLTDSEMDVVRFDDDNSPSIIQARSGAKKHPKTWVHYIAAEEEDWDYAPLVLAPDDRSYKSQYLNNGPQRIGRKYKKVRFMAYTDETFKTREAIQHESGILGPLLYGEVGDTLLIIFKNQASRPYNIYPHGITDVRPLYSRRLPKGVKHLKDFPILPGEIFKYKWTITVEDGPTKSDPRCLTRYYSSFVNWERDLASGLIGPLLICYKESVDQRGNQIMSDKRNVILFSVFDENRSWYLTENIQRFLPNPAGVQLEDPEFQASNIMHSINGYVFDSLQLSVCLHEVAYWYILSIGAQTDFLSVFFSGYTFKHKGVYEDTLTLFPFSGETVFMSMENPGLWILGCHNSDFRNRGMTALLKVSSCDWNTGDYEEDSYEDISAYFDSKNNAIEPRSFSQNPPVLKRHQREGTRTTLQSDQEEIDYDDTISVEMKKEDFDIYDEDENQSPRSFQKKTRHYFIAAVERLWDYGMSSSPHVLRNRAQSGSVPQFKKVVFQEFTDGSFTQPLYRGELNEHLGLLGPYIRAEVEDNIMVTFRNQASRPYSFYSSLISYEEDQRQGAEPRKNFVKPNETKTYFWKVQHHMAPTKDEFDCKAWAYFSDVDLEKDVHSGLIGPLLVCHTNTLNPAHGRQVTVQEFALFFTIFDETKSWYFTENMERNCRAPCNIQMEDPTFKENYRFHAINGYIMDTLPGLVMAQDQRIRWYLLSMGSNENIHSIHFSGHVFTVRKKEEYKMALYNLYPGVFETVEMLPSKAGIWRVECLIGEHLHAGMSTLFLVYSNKCQNPLGMASGHIRDFQITASGQYGQWAPKLARLHYSGSINAWSTKEPFSWIKVDLLAPMIIHGIKTQGARQKFSSLYISQFIIMYSLDGKKWQTYRGNSTGTDMVFFGNVDSSGIKHNIFNPPIIARYIRLHPTHYSIRSTLRMELMGCDLNSCSMPLGMESKAISDAQITASSYFTNMFATWSPSKARLHLQGRSNAWRPQVNNPKEWLQVDFQKTMKVTGVTTQGVKSLDTSMYVKEFLISSSQDGHQWTLFFQNGKVKVFQGNQDSFTPVVNSLDPPLLTRYLRIHPQSWEHQIALRMEVLGCEAQDLY

SEQ ID NO: 1675 - DNA, 4371 bp, synthetic construct
  misc_feature 1..4371: note = Variant of human B-domain deleted Factor VIII
  source 1..4371: mol_type = other DNA
atgcagattgaactgtctacctgcttcttcctctgtttgctgaggttctgctttagcgccactagacggtactaccttggcgctgtggagctgtcctgggactatatgcagagtgatttgggagagcttcccgtcgacgcacgatttcctcctcgcgttccaaagtcatttccctttaacacaagccaggtgtacaagaagacgctcttcgtcgaattcaccgatcacctgttcaatatcgccaaacccagaccaccatggatgggtcttttggggcctaccatacaagcggaggtgtatgacacagttgttatcactctcaagaacatggcttctcatccggtaagtcttcacgcagtgggcgtgtcctactggaaagcttcagaaggagccgagtatgatgatcagacatcccagagggagaaagaagacgacaaggtatttccaggtgggtctcatacctatgtgtggcaagtgctcaaagagaatggccctatggcaagcgatccgccgtgtttgacttacagctacctttcacacgttgacctcgtcaaggacctcaactccgggttgattggagccttgttggtatgcagggaaggatctcttgccaaagagaagacacagaccctggccaagtttatccttctctttgctgtgttcgatgagggcaaaagttggcatagcgaaacgaagaattccctcatgcaggatcgcgacgcagccagcgccagagcttggcccaagatgcacactgtgaacggatatgtcaataggacgcttcctggcttgattgggtgtcatcggaaaagtgtctactggcacgtgatcggaatggggacaacaccagaggtccactccatatttctcgaaggccataccttccttgttcgaaaccacagacaggcatccttggggatctctcccattacctttctcactgcccaaacgctccttcgtgacttgggtcagttccttctcttttgccatatcccgtcacaccagcatgatggtatggaagcttatgtgaaagtcgacagttgtcctgaggagccacagttgcgcatgaagaataatgaagaagccgaggattacgacgacgatctcaccgattctgagatggacgtggtgaggtttgatgacgacaactctccctccatcattcaagctcggagcggggcgaagaaacaccccaagacttgggtccactatatagcggcggaagaggaggattgggattacgctcctcttgtattggcaccagatgaccgctcatacaaaagccagtacctcaacaacggaccgcagagaattggccggaagtataagaaagtgcgatttatggcctatacagacgaaacctttaagacaagggaggccatccagcatgagagtgggattttgggacctcttctttacggcgaagttggtgataccctcctcatcatcttcaagaatcaagcttctcgcccctataacatttacccacacgggatcactgacgttaggcctttgtatagcagaagacttcccaaaggcgtgaagcatctcaaagacttccccattttgccaggcgagatctttaagtacaaatggaccattacagtggaagatggaccgactaaatcagaccctcgatgccttacgcggtactattcctccttcgtgaattgggagagagatttggcaagcggactcataggaccactcctcatctgttacaaggaatctgtagaccagaggggtaaccagattatgagtgataaacgcaatgtgatcctttttagcgtcttcgacgagaaccggtcctggtacttgaccgagaatatacaaaggttccttcccaaccccgcaggcgttcagttggaagaccctgagtttcaggccagcaatattatgcactcaatcaacggctatgtgtttgatagtctccagctttctgtttgcctccatgaagtagcctattggtacatcttgtcaattggtgctcaaacagacttcctctccgtcttcttctccggctacacctttaagcacaagggcgtgtatgaggacactctcacactctttccattttctggagaaaccgtgttcatggagatggagaatccaggcctttggatcttgggttgccacaacagtgattttcgcaatcggggaatgactgctctcctcaaagtcagcagctgtgattggaacacaggcgactattacgaagattcttacgaggacataagtgcctactttgactccaagaataacgccattgagcccagatcattctcccagaatcctcccgtgcttaaaaggcatcagcgcgaaggtaccagaactactcttcagtctgatcaagaggagattgactatgacgacaccattagcgtggaaatgaagaaggaggatttcgatatctatgacgaagatgagaaccagtctccgcggagctttcagaagaagacgcgacactacttcattgcagcagtcgaaaggctttgggactacggtatgtcatcatcccctcatgtgttgcgcaatagagctcagagtggaagtgttccacagttcaagaaagtcgtctttcaagagtttacagatggcagcttcacacagcctctctatcggggcgagcttaacgaacatttgggactccttggtccctatatccgagccgaagtggaggacaacattatggttacctttaggaatcaagcctctcgcccctacagcttctactcctccctcatcagttatgaggaggatcagagacaaggcgctgaaccacggaagaactttgtgaaaccgaatgagacgaagacctacttctggaaagtacagcaccacatggcccccacaaaagacgaattcgattgcaaagcatgggcgtatttttcagacgttgacttggagaaagatgtacattcaggacttattggtcctttgttggtgtgtcacactaacactctcaatccagcccatggcaggcaggtgacagtccaggaattcgctcttttctttaccatctttgatgagaccaagtcctggtacttcacggaaaacatggagcgcaattgcagagccccctgtaacatacagatggaggaccctacctttaaggaaaattatcggttccacgcaatcaacggatacattatggatacactccctggccttgtgatggctcaggaccaacgaatcaggtggtacctcctcagcatgggttctaatgagaacatacactccattcacttttcaggacatgtgttcactgtccggaagaaagaagagtataagatggccctctacaatttgtatccaggcgtgtttgagaccgttgaaatgcttccctctaaagctggcatctggagagtagagtgcttgatcggagaacatcttcacgcaggtatgagcaccttgttcctcgtgtacagcaacaaatgtcagaatccacttggcatggccagtggacacattcgcgactttcagatcacagcatctggccagtatggacaatgggccccaaagttggctcgcctccattactccggtagcataaatgcgtggtccactaaagaacctttcagctggattaaggtcgatcttcttgcccccatgatcatccacggcattaagacacagggagcgaggcagaaattctcctccctctacatctcacagttcattattatgtatagtttggacggcaagaagtggcaaacttatagaggtaacagtactggaacagacatggtgttcttcggcaacgttgatagctctggcatcaaacacaacatctttaatcctcccataatagctcggtacatcagattgcatccgacccactacagcattaggagtacactccgaatggagcttatgggttgcgacttgaattcctgttcaatgccactcggaatggagtctaaagccatctctgatgcacagataaccgccagtagctactttacgaacatgtttgctacgtggtcaccctctaaggcaaggcttcatttgcaaggccggtctaatgcctggagacctcaggtgaacaacccgaaagaatggctccaggtggactttcagaagaccatgaaagtaacaggtgtcactactcagggagttaagtccttggatactagcatgtatgtgaaggagttccttatttcctcatcacaagatggccaccagtggaccctcttctttcagaatggtaaggtcaaagtgtttcagggcaatcaagacagcttcacacccgtggtgaacagtcttgatcctccactcttgacacgataccttcgaatccatccacagtcttgggagcaccagattgcattgcgcatggaagtacttggatgcgaggctcaggacctctac

SEQ ID NO: 1676 - protein, 1457 aa, synthetic construct
  REGION 1..1457: note = Variant of human B-domain deleted Factor VIII
MQIELSTCFFLCLLRFCFSATRRYYLGAVELSWDYMQSDLGELPVDARFPPRVPKSFPFNTSQVYKKTLFVEFTDHLFNIAKPRPPWMGLLGPTIQAEVYDTVVITLKNMASHPVSLHAVGVSYWKASEGAEYDDQTSQREKEDDKVFPGGSHTYVWQVLKENGPMASDPPCLTYSYLSHVDLVKDLNSGLIGALLVCREGSLAKEKTQTLAKFILLFAVFDEGKSWHSETKNSLMQDRDAASARAWPKMHTVNGYVNRTLPGLIGCHRKSVYWHVIGMGTTPEVHSIFLEGHTFLVRNHRQASLGISPITFLTAQTLLRDLGQFLLFCHIPSHQHDGMEAYVKVDSCPEEPQLRMKNNEEAEDYDDDLTDSEMDVVRFDDDNSPSIIQARSGAKKHPKTWVHYIAAEEEDWDYAPLVLAPDDRSYKSQYLNNGPQRIGRKYKKVRFMAYTDETFKTREAIQHESGILGPLLYGEVGDTLLIIFKNQASRPYNIYPHGITDVRPLYSRRLPKGVKHLKDFPILPGEIFKYKWTITVEDGPTKSDPRCLTRYYSSFVNWERDLASGLIGPLLICYKESVDQRGNQIMSDKRNVILFSVFDENRSWYLTENIQRFLPNPAGVQLEDPEFQASNIMHSINGYVFDSLQLSVCLHEVAYWYILSIGAQTDFLSVFFSGYTFKHKGVYEDTLTLFPFSGETVFMEMENPGLWILGCHNSDFRNRGMTALLKVSSCDWNTGDYYEDSYEDISAYFDSKNNAIEPRSFSQNPPVLKRHQREGTRTTLQSDQEEIDYDDTISVEMKKEDFDIYDEDENQSPRSFQKKTRHYFIAAVERLWDYGMSSSPHVLRNRAQSGSVPQFKKVVFQEFTDGSFTQPLYRGELNEHLGLLGPYIRAEVEDNIMVTFRNQASRPYSFYSSLISYEEDQRQGAEPRKNFVKPNETKTYFWKVQHHMAPTKDEFDCKAWAYFSDVDLEKDVHSGLIGPLLVCHTNTLNPAHGRQVTVQEFALFFTIFDETKSWYFTENMERNCRAPCNIQMEDPTFKENYRFHAINGYIMDTLPGLVMAQDQRIRWYLLSMGSNENIHSIHFSGHVFTVRKKEEYKMALYNLYPGVFETVEMLPSKAGIWRVECLIGEHLHAGMSTLFLVYSNKCQNPLGMASGHIRDFQITASGQYGQWAPKLARLHYSGSINAWSTKEPFSWIKVDLLAPMIIHGIKTQGARQKFSSLYISQFIIMYSLDGKKWQTYRGNSTGTDMVFFGNVDSSGIKHNIFNPPIIARYIRLHPTHYSIRSTLRMELMGCDLNSCSMPLGMESKAISDAQITASSYFTNMFATWSPSKARLHLQGRSNAWRPQVNNPKEWLQVDFQKTMKVTGVTTQGVKSLDTSMYVKEFLISSSQDGHQWTLFFQNGKVKVFQGNQDSFTPVVNSLDPPLLTRYLRIHPQSWEHQIALRMEVLGCEAQDLY

SEQ ID NO: 1677 - DNA, 4371 bp, synthetic construct
  misc_feature 1..4371: note = Variant of human B-domain deleted Factor VIII
  source 1..4371: mol_type = other DNA
atgcagattgaactgtctacctgcttcttcctctgtttgctgaggttctgctttagcgccactagacggtactaccttggcgctgtggagctgtcctgggactatatgcagagtgatttgggagagcttcccgtcgacgcacgatttcctcctcgcgttccaaagtcatttccctttaacacaagccaggtgtacaagaagacgctcttcgtcgaattcaccgatcacctgttcaatatcgccaaacccagaccaccatggatgggtcttttggggcctaccatacaagcggaggtgtatgacacagttgttatcactctcaagaacatggcttctcatccggtaagtcttcacgcagtgggcgtgtcctactggaaagcttcagaaggagccaggtatgatgatcagacatcccagagggagaaagaagacgacaaggtatttccaggtgggtctcatacctatgtgtggcaagtgctcaaagagaatggccctatggcaagcgatccgccgtgtttgacttacagctacctttcacacgttgacctcgtcaaggacctcaactccgggttgattggagccttgttggtatgcagggaaggatctcttgccaaagagaagacacagaccctggccaagtttatccttctctttgctgtgttcgatgagggcaaaagttggcatagcgaaacgaagaattccctcatgcaggatcgcgacgcagccagcgccagagcttggcccaagatgcacactgtgaacggatatgtcaataggacgcttcctggcttgattgggtgtcatcggaaaagtgtctactggcacgtgatcggaatggggacaacaccagaggtccactccatatttctcgaaggccataccttccttgttcgaaaccacagacaggcatccttggggatctctcccattacctttctcactgcccaaacgctccttcgtgacttgggtcagttccttctcttttgccatatcccgtcacaccagcatgatggtatggaagcttatgtgaaagtcgacagttgtcctgaggagccacagttgcgcatgaagaataatgaagaagccgaggattacgacgacgatctcaccgattctgagatggacgtggtgaggtttgatgacgacaactctccctccatcattcaagctcggagcggggcgaagaaacaccccaagacttgggtccactatatagcggcggaagaggaggattgggattacgctcctcttgtattggcaccagatgaccgctcatacaaaagccagtacctcaacaacggaccgcagagaattggccggaagtataagaaagtgcgatttatggcctatacagacgaaacctttaagacaagggaggccatccagcatgagagtgggattttgggacctcttctttacggcgaagttggtgataccctcctcatcatcttcaagaatcaagcttctcgcccctataacatttacccacacgggatcactgacgttaggcctttgtatagcagaagacttcccaaaggcgtgaagcatctcaaagacttccccattttgccaggcgagatctttaagtacaaatggaccattacagtggaagatggaccgactaaatcagaccctcgatgccttacgcggtactattcctccttcgtgaattgggagagagatttggcaagcggactcataggaccactcctcatctgttacaaggaatctgtagaccagaggggtaaccagattatgagtgataaacgcaatgtgatcctttttagcgtcttcgacgagaaccggtcctggtacttgaccgagaatatacaaaggttccttcccaaccccgcaggcgttcagttggaagaccctgagtttcaggccagcaatattatgcactcaatcaacggctatgtgtttgatagtctccagctttctgtttgcctccatgaagtagcctattggtacatcttgtcaattggtgctcaaacagacttcctctccgtcttcttctccggctacacctttaagcacaagggcgtgtatgaggacactctcacactctttccattttctggagaaaccgtgttcatgagcatggagaatccaggcctttggatcttgggttgccacaacagtgattttcgcaatcggggaatgactgctctcctcaaagtcagcagctgtgattggaacacaggcgactattacgaagattcttacgaggacataagtgcctactttgactccaagaataacgccattgagcccagatcattctcccagaatcctcccgtgcttaaaaggcatcagcgcgaaggtaccagaactactcttcagtctgatcaagaggagattgactatgacgacaccattagcgtggaaatgaagaaggaggatttcgatatctatgacgaagatgagaaccagtctccgcggagctttcagaagaagacgcgacactacttcattgcagcagtcgaaaggctttgggactacggtatgtcatcatcccctcatgtgttgcgcaatagagctcagagtggaagtgttccacagttcaagaaagtcgtctttcaagagtttacagatggcagcttcacacagcctctctatcggggcgagcttaacgaacatttgggactccttggtccctatatccgagccgaagtggaggacaacattatggttacctttaggaatcaagcctctcgcccctacagcttctactcctccctcatcagttatgaggaggatcagagacaaggcgctgaaccacggaagaactttgtgaaaccgaatgagacgaagacctacttctggaaagtacagcaccacatggcccccacaaaagacgaattcgattgcaaagcatgggcgtatttttcagacgttgacttggagaaagatgtacattcaggacttattggtcctttgttggtgtgtcacactaacactctcaatccagcccatggcaggcaggtgacagtccaggaattcgctcttttctttaccatctttgatgagaccaagtcctggtacttcacggaaaacatggagcgcaattgcagagccccctgtaacatacagatggaggaccctacctttaaggaaaattatcggttccacgcaatcaacggatacattatggatacactccctggccttgtgatggctcaggaccaacgaatcaggtggtacctcctcagcatgggttctaatgagaacatacactccattcacttttcaggacatgtgttcactgtccggaagaaagaagagtataagatggccctctacaatttgtatccaggcgtgtttgagaccgttgaaatgcttccctctaaagctggcatctggagagtagagtgcttgatcggagaacatcttcacgcaggtatgagcaccttgttcctcgtgtacagcaacaaatgtcagaatccacttggcatggccagtggacacattcgcgactttcagatcacagcatctggccagtatggacaatgggccccaaagttggctcgcctccattactccggtagcataaatgcgtggtccactaaagaacctttcagctggattaaggtcgatcttcttgcccccatgatcatccacggcattaagacacagggagcgaggcagaaattctcctccctctacatctcacagttcattattatgtatagtttggacggcaagaagtggcaaacttatagaggtaacagtactggaacagacatggtgttcttcggcaacgttgatagctctggcatcaaacacaacatctttaatcctcccataatagctcggtacatcagattgcatccgacccactacagcattaggagtacactccgaatggagcttatgggttgcgacttgaattcctgttcaatgccactcggaatggagtctaaagccatctctgatgcacagataaccgccagtagctactttacgaacatgtttgctacgtggtcaccctctaaggcaaggcttcatttgcaaggccggtctaatgcctggagacctcaggtgaacaacccgaaagaatggctccaggtggactttcagaagaccatgaaagtaacaggtgtcactactcagggagttaagtccttggatactagcatgtatgtgaaggagttccttatttcctcatcacaagatggccaccagtggaccctcttctttcagaatggtaaggtcaaagtgtttcagggcaatcaagacagcttcacacccgtggtgaacagtcttgatcctccactcttgacacgataccttcgaatccatccacagtcttgggagcaccagattgcattgcgcatggaagtacttggatgcgaggctcaggacctctac

SEQ ID NO: 1678 - protein, 1457 aa, synthetic construct
  REGION 1..1457: note = Variant of human B-domain deleted Factor VIII
MQIELSTCFFLCLLRFCFSATRRYYLGAVELSWDYMQSDLGELPVDARFPPRVPKSFPFNTSQVYKKTLFVEFTDHLFNIAKPRPPWMGLLGPTIQAEVYDTVVITLKNMASHPVSLHAVGVSYWKASEGARYDDQTSQREKEDDKVFPGGSHTYVWQVLKENGPMASDPPCLTYSYLSHVDLVKDLNSGLIGALLVCREGSLAKEKTQTLAKFILLFAVFDEGKSWHSETKNSLMQDRDAASARAWPKMHTVNGYVNRTLPGLIGCHRKSVYWHVIGMGTTPEVHSIFLEGHTFLVRNHRQASLGISPITFLTAQTLLRDLGQFLLFCHIPSHQHDGMEAYVKVDSCPEEPQLRMKNNEEAEDYDDDLTDSEMDVVRFDDDNSPSIIQARSGAKKHPKTWVHYIAAEEEDWDYAPLVLAPDDRSYKSQYLNNGPQRIGRKYKKVRFMAYTDETFKTREAIQHESGILGPLLYGEVGDTLLIIFKNQASRPYNIYPHGITDVRPLYSRRLPKGVKHLKDFPILPGEIFKYKWTITVEDGPTKSDPRCLTRYYSSFVNWERDLASGLIGPLLICYKESVDQRGNQIMSDKRNVILFSVFDENRSWYLTENIQRFLPNPAGVQLEDPEFQASNIMHSINGYVFDSLQLSVCLHEVAYWYILSIGAQTDFLSVFFSGYTFKHKGVYEDTLTLFPFSGETVFMSMENPGLWILGCHNSDFRNRGMTALLKVSSCDWNTGDYYEDSYEDISAYFDSKNNAIEPRSFSQNPPVLKRHQREGTRTTLQSDQEEIDYDDTISVEMKKEDFDIYDEDENQSPRSFQKKTRHYFIAAVERLWDYGMSSSPHVLRNRAQSGSVPQFKKVVFQEFTDGSFTQPLYRGELNEHLGLLGPYIRAEVEDNIMVTFRNQASRPYSFYSSLISYEEDQRQGAEPRKNFVKPNETKTYFWKVQHHMAPTKDEFDCKAWAYFSDVDLEKDVHSGLIGPLLVCHTNTLNPAHGRQVTVQEFALFFTIFDETKSWYFTENMERNCRAPCNIQMEDPTFKENYRFHAINGYIMDTLPGLVMAQDQRIRWYLLSMGSNENIHSIHFSGHVFTVRKKEEYKMALYNLYPGVFETVEMLPSKAGIWRVECLIGEHLHAGMSTLFLVYSNKCQNPLGMASGHIRDFQITASGQYGQWAPKLARLHYSGSINAWSTKEPFSWIKVDLLAPMIIHGIKTQGARQKFSSLYISQFIIMYSLDGKKWQTYRGNSTGTDMVFFGNVDSSGIKHNIFNPPIIARYIRLHPTHYSIRSTLRMELMGCDLNSCSMPLGMESKAISDAQITASSYFTNMFATWSPSKARLHLQGRSNAWRPQVNNPKEWLQVDFQKTMKVTGVTTQGVKSLDTSMYVKEFLISSSQDGHQWTLFFQNGKVKVFQGNQDSFTPVVNSLDPPLLTRYLRIHPQSWEHQIALRMEVLGCEAQDLY

SEQ ID NO: 1679 - DNA, 4371 bp, synthetic construct
  misc_feature 1..4371: note = Variant of human B-domain deleted Factor VIII
  source 1..4371: mol_type = other DNA
atgcagattgaactgtctacctgcttcttcctctgtttgctgaggttctgctttagcgccactagacggtactaccttggcgctgtggagctgtcctgggactatatgcagagtgatttgggagagcttcccgtcgacgcacgatttcctcctcgcgttccaaagtcatttccctttaacacaagccaggtgtacaagaagacgctcttcgtcgaattcaccgatcacctgttcaatatcgccaaacccagaccaccatggatgggtcttttggggcctaccatacaagcggaggtgtatgacacagttgttatcactctcaagaacatggcttctcatccggtaagtcttcacgcagtgggcgtgtcctactggaaagcttcagaaggagccgagtatgatgatcagacatcccagagggagaaagaagacgacaaggtatttccaggtgggtctcatacctatgtgtggcaagtgctcaaagagaatggccctatggcaagcgatccgccgtgtttgacttacagctacctttcacacgttgacctcgtcaaggacctcaactccgggttgattggagccttgttggtatgcagggaaggatctcttgccaaagagaagacacagaccctggccaagtttatccttctctttgctgtgttcgatgagggcaaaagttggcatagcgaaacgaagaattccctcatgcaggatcgcgacgcagccagcgccagagcttggcccaagatgcacactgtgaacggatatgtcaataggacgcttcctggcttgattgggtgtcatcggaaaagtgtctactggcacgtgatcggaatggggacaacaccagaggtccactccatatttctcgaaggccataccttccttgttcgaaaccacagacaggcatccttggggatctctcccattacctttctcactgcccaaacgctccttcgtgacttgggtcagttccttctcttttgccatatcccgtcacaccagcatgatggtatggaagcttatgtgaaagtcgacagttgtcctgaggagccacagttgcgcatgaagaataatgaagaagccgaggattacgacgacgatctcaccgattctgagatggacgtggtgaggtttgatgacgacaactctccctccatcattcaagctcggagcggggcgaagaaacaccccaagacttgggtccactatatagcggcggaagaggaggattgggattacgctcctcttgtattggcaccagatgaccgctcatacaaaagccagtacctcaacaacggaccgcagagaattggccggaagtataagaaagtgcgatttatggcctatacagacgaaacctttaagacaagggaggccatccagcatgagagtgggattttgggacctcttctttacggcgaagttggtgataccctcctcatcatcttcaagaatcaagcttctcgcccctataacatttacccacacgggatcactgacgttaggcctttgtatagcagaagacttcccaaaggcgtgaagcatctcaaagacttccccattttgccaggcgagatctttaagtacaaatggaccattacagtggaagatggaccgactaaatcagaccctcgatgccttacgcggtactattcctccttcgtgaattgggagagagatttggcaagcggactcataggaccactcctcatctgttacaaggaatctgtagaccagaggggtaaccagattatgagtgataaacgcaatgtgatcctttttagcgtcttcgacgagaaccggtcctggtacttgaccgagaatatacaaaggttccttcccaaccccgcaggcgttcagttggaagaccctgagtttcaggccagcaatattatgcactcaatcaacggctatgtgtttgatagtctccagctttctgtttgcctccatgaagtagcctattggtacatcttgtcaattggtgctcaaacagacttcctctccgtcttcttctccggctacacctttaagcacaagggcgtgtatgaggacactctcacactctttccattttctggagaaaccgtgttcatgagcatggagaatccaggcctttggatcttgggttgccacaacagtgattttcgcaatcggggaatgactgctctcctcaaagtcagcagctgtgattggaacacaggcgactattacgaagattcttacgaggacataagtgcctactttgactccaagaataacgccattgagcccagatcattctcccagaatcctcccgtgcttaaaaggcatcagcgcgaaggtaccagaactactcttcagtctgatcaagaggagattgactatgacgacaccattagcgtggaaatgaagaaggaggatttcgatatctatgacgaagatgagaaccagtctccgcggagctttcagaagaagacgcgacactacttcattgcagcagtcgaaaggctttgggactacggtatgtcatcatcccctcatgtgttgcgcaatagagctcagagtggaagtgttccacagttcaagaaagtcgtctttcaagagtttacagatggcagcttcacacagcctctctatcggggcgagcttaacgaacatttgggactccttggtccctatatccgagccgaagtggaggacaacattatggttacctttaggaatcaagcctctcgcccctacagcttctactcctccctcatcagttatgaggaggatcagagacaaggcgctgaaccacggaagaactttgtgaaaccgaatgagacgaagacctacttctggaaagtacagcaccacatggcccccacaaaagacgaattcgattgcaaagcatgggcgtatttttcagacgttgacttggagaaagatgtacattcaggacttattggtcctttgttggtgtgtcacactaacactctcaatccagcccatggcaggcaggtgacagtccaggaattcgctcttttctttaccatctttgatgagaccaagtcctggtacttcacggaaaacatggagcgcaattgcagagccccctgtaacatacagatggaggaccctacctttaaggaaaattatcggttccacgcaatcaacggatacattatggatacactccctggccttgtgatggctcaggaccaacgaatcaggtggtacctcctcagcatgggttctaatgggaacatacactccattcacttttcaggacatgtgttcactgtccggaagaaagaagagtataagatggccctctacaatttgtatccaggcgtgtttgagaccgttgaaatgcttccctctaaagctggcatctggagagtagagtgcttgatcggagaacatcttcacgcaggtatgagcaccttgttcctcgtgtacagcaacaaatgtcagaatccacttggcatggccagtggacacattcgcgactttcagatcacagcatctggccagtatggacaatgggccccaaagttggctcgcctccattactccggtagcataaatgcgtggtccactaaagaacctttcagctggattaaggtcgatcttcttgcccccatgatcatccacggcattaagacacagggagcgaggcagaaattctcctccctctacatctcacagttcattattatgtatagtttggacggcaagaagtggcaaacttatagaggtaacagtactggaacagacatggtgttcttcggcaacgttgatagctctggcatcaaacacaacatctttaatcctcccataatagctcggtacatcagattgcatccgacccactacagcattaggagtacactccgaatggagcttatgggttgcgacttgaattcctgttcaatgccactcggaatggagtctaaagccatctctgatgcacagataaccgccagtagctactttacgaacatgtttgctacgtggtcaccctctaaggcaaggcttcatttgcaaggccggtctaatgcctggagacctcaggtgaacaacccgaaagaatggctccaggtggactttcagaagaccatgaaagtaacaggtgtcactactcagggagttaagtccttggatactagcatgtatgtgaaggagttccttatttcctcatcacaagatggccaccagtggaccctcttctttcagaatggtaaggtcaaagtgtttcagggcaatcaagacagcttcacacccgtggtgaacagtcttgatcctccactcttgacacgataccttcgaatccatccacagtcttgggagcaccagattgcattgcgcatggaagtacttggatgcgaggctcaggacctctac

SEQ ID NO: 1680 - protein, 1457 aa, synthetic construct
  REGION 1..1457: note = Variant of human B-domain deleted Factor VIII
MQIELSTCFFLCLLRFCFSATRRYYLGAVELSWDYMQSDLGELPVDARFPPRVPKSFPFNTSQVYKKTLFVEFTDHLFNIAKPRPPWMGLLGPTIQAEVYDTVVITLKNMASHPVSLHAVGVSYWKASEGAEYDDQTSQREKEDDKVFPGGSHTYVWQVLKENGPMASDPPCLTYSYLSHVDLVKDLNSGLIGALLVCREGSLAKEKTQTLAKFILLFAVFDEGKSWHSETKNSLMQDRDAASARAWPKMHTVNGYVNRTLPGLIGCHRKSVYWHVIGMGTTPEVHSIFLEGHTFLVRNHRQASLGISPITFLTAQTLLRDLGQFLLFCHIPSHQHDGMEAYVKVDSCPEEPQLRMKNNEEAEDYDDDLTDSEMDVVRFDDDNSPSIIQARSGAKKHPKTWVHYIAAEEEDWDYAPLVLAPDDRSYKSQYLNNGPQRIGRKYKKVRFMAYTDETFKTREAIQHESGILGPLLYGEVGDTLLIIFKNQASRPYNIYPHGITDVRPLYSRRLPKGVKHLKDFPILPGEIFKYKWTITVEDGPTKSDPRCLTRYYSSFVNWERDLASGLIGPLLICYKESVDQRGNQIMSDKRNVILFSVFDENRSWYLTENIQRFLPNPAGVQLEDPEFQASNIMHSINGYVFDSLQLSVCLHEVAYWYILSIGAQTDFLSVFFSGYTFKHKGVYEDTLTLFPFSGETVFMSMENPGLWILGCHNSDFRNRGMTALLKVSSCDWNTGDYYEDSYEDISAYFDSKNNAIEPRSFSQNPPVLKRHQREGTRTTLQSDQEEIDYDDTISVEMKKEDFDIYDEDENQSPRSFQKKTRHYFIAAVERLWDYGMSSSPHVLRNRAQSGSVPQFKKVVFQEFTDGSFTQPLYRGELNEHLGLLGPYIRAEVEDNIMVTFRNQASRPYSFYSSLISYEEDQRQGAEPRKNFVKPNETKTYFWKVQHHMAPTKDEFDCKAWAYFSDVDLEKDVHSGLIGPLLVCHTNTLNPAHGRQVTVQEFALFFTIFDETKSWYFTENMERNCRAPCNIQMEDPTFKENYRFHAINGYIMDTLPGLVMAQDQRIRWYLLSMGSNGNIHSIHFSGHVFTVRKKEEYKMALYNLYPGVFETVEMLPSKAGIWRVECLIGEHLHAGMSTLFLVYSNKCQNPLGMASGHIRDFQITASGQYGQWAPKLARLHYSGSINAWSTKEPFSWIKVDLLAPMIIHGIKTQGARQKFSSLYISQFIIMYSLDGKKWQTYRGNSTGTDMVFFGNVDSSGIKHNIFNPPIIARYIRLHPTHYSIRSTLRMELMGCDLNSCSMPLGMESKAISDAQITASSYFTNMFATWSPSKARLHLQGRSNAWRPQVNNPKEWLQVDFQKTMKVTGVTTQGVKSLDTSMYVKEFLISSSQDGHQWTLFFQNGKVKVFQGNQDSFTPVVNSLDPPLLTRYLRIHPQSWEHQIALRMEVLGCEAQDLY

SEQ ID NO: 1681 - DNA, 4371 bp, synthetic construct
  misc_feature 1..4371: note = Variant of human B-domain deleted Factor VIII
  source 1..4371: mol_type = other DNA
atgcagattgaactgtctacctgcttcttcctctgtttgctgaggttctgctttagcgccactagacggtactaccttggcgctgtggagctgtcctgggactatatgcagagtgatttgggagagcttcccgtcgacgcacgatttcctcctcgcgttccaaagtcatttccctttaacacaagccaggtgtacaagaagacgctcttcgtcgaattcaccgatcacctgttcaatatcgccaaacccagaccaccatggatgggtcttttggggcctaccatacaagcggaggtgtatgacacagttgttatcactctcaagaacatggcttctcatccggtaagtcttcacgcagtgggcgtgtcctactggaaagcttcagaaggagccgagtatgatgatcagacatcccagagggagaaagaagacgacaaggtatttccaggtgggtctcatacctatgtgtggcaagtgctcaaagagaatggccctatggcaagcgatccgccgtgtttgacttacagctacctttcacacgttgacctcgtcaaggacctcaactccgggttgattggagccttgttggtatgcagggaaggatctcttgccaaagagaagacacagaccctggccaagtttatccttctctttgctgtgttcgatgagggcaaaagttggcatagcgaaacgaagaattccctcatgcaggatcgcgacgcagccagcgccagagcttggcccaagatgcacactgtgaacggatatgtcaataggacgcttcctggcttgattgggtgtcatcggaaaagtgtctactggcacgtgatcggaatggggacaacaccagaggtccactccatatttctcgaaggccataccttccttgttcgaaaccacagacaggcatccttggggatctctcccattacctttctcactgcccaaacgctccttcgtgacttgggtcagttccttctcttttgccatatcccgtcacaccagcatgatggtatggaagcttatgtgaaagtcgacagttgtcctgaggagccacagttgcgcatgaagaataatgaagaagccgaggattacgacgacgatctcaccgattctgagatggacgtggtgaggtttgatgacgacaactctccctccatcattcaagctcggagcggggcgaagaaacaccccaagacttgggtccactatatagcggcggaagaggaggattgggattacgctcctcttgtattggcaccagatgaccgctcatacaaaagccagtacctcaacaacggaccgcagagaattggccggaagtataagaaagtgcgatttatggcctatacagacgaaacctttaagacaagggaggccatccagcatgagagtgggattttgggacctcttctttacggcgaagttggtgataccctcctcatcatcttcaagaatcaagcttctcgcccctataacatttacccacacgggatcactgacgttaggcctttgtatagcagaagacttcccaaaggcgtgaagcatctcaaagacttccccattttgccaggcgagatctttaagtacaaatggaccattacagtggaagatggaccgactaaatcagaccctcgatgccttacgcggtactattcctccttcgtgaattgggagagagatttggcaagcggactcataggaccactcctcatctgttacaaggaatctgtagaccagaggggtaaccagattatgagtgataaacgcaatgtgatcctttttagcgtcttcgacgagaaccggtcctggtacttgaccgagaatatacaaaggttccttcccaaccccgcaggcgttcagttggaagaccctgagtttcaggccagcaatattatgcactcaatcaacggctatgtgtttgatagtctccagctttctgtttgcctccatgaagtagcctattggtacatcttgtcaattggtgctcaaacagacttcctctccgtcttcttctccggctacacctttaagcacaagggcgtgtatgaggacactctcacactctttccattttctggagaaaccgtgttcatgagcatggagaatccaggcctttggatcttgggttgccacaacagtgattttcgcaatcggggaatgactgctctcctcaaagtcagcagctgtgattggaacacaggcgactattacgaagattcttacgaggacataagtgcctactttgactccaagaataacgccattgagcccagatcattctcccagaatcctcccgtgcttaaaaggcatcagcgcgaaggtaccagaactactcttcagtctgatcaagaggagattgactatgacgacaccattagcgtggaaatgaagaaggaggatttcgatatctatgacgaagatgagaaccagtctccgcggagctttcagaagaagacgcgacactacttcattgcagcagtcgaaaggctttgggactacggtatgtcatcatcccctcatgtgttgcgcaatagagctcagagtggaagtgttccacagttcaagaaagtcgtctttcaagagtttacagatggcagcttcacacagcctctctatcggggcgagcttaacgaacatttgggactccttggtccctatatccgagccgaagtggaggacaacattatggttacctttaggaatcaagcctctcgcccctacagcttctactcctccctcatcagttatgaggaggatcagagacaaggcgctgaaccacggaagaactttgtgaaaccgaatgagacgaagacctacttctggaaagtacagcaccacatggcccccacaaaagacgaattcgattgcaaagcatgggcgtatttttcagacgttgacttggagaaagatgtacattcaggacttattggtcctttgttggtgtgtcacactaacactctcaatccagcccatggcaggcaggtgacagtccaggaattcgctcttttctttaccatctttgatgagaccaagtcctggtacttcacggaaaacatggagcgcaattgcagagccccctgtaacatacagatggaggaccctacctttaaggaaaattatcggttccacgcaatcaacggatacattatggatacactccctggccttgtgatggctcaggaccaacgaatcaggtggtacctcctcagcatgggttctaatgagaacatacactccattcactttctgggacatgtgttcactgtccggaagaaagaagagtataagatggccctctacaatttgtatccaggcgtgtttgagaccgttgaaatgcttccctctaaagctggcatctggagagtagagtgcttgatcggagaacatcttcacgcaggtatgagcaccttgttcctcgtgtacagcaacaaatgtcagaatccacttggcatggccagtggacacattcgcgactttcagatcacagcatctggccagtatggacaatgggccccaaagttggctcgcctccattactccggtagcataaatgcgtggtccactaaagaacctttcagctggattaaggtcgatcttcttgcccccatgatcatccacggcattaagacacagggagcgaggcagaaattctcctccctctacatctcacagttcattattatgtatagtttggacggcaagaagtggcaaacttatagaggtaacagtactggaacagacatggtgttcttcggcaacgttgatagctctggcatcaaacacaacatctttaatcctcccataatagctcggtacatcagattgcatccgacccactacagcattaggagtacactccgaatggagcttatgggttgcgacttgaattcctgttcaatgccactcggaatggagtctaaagccatctctgatgcacagataaccgccagtagctactttacgaacatgtttgctacgtggtcaccctctaaggcaaggcttcatttgcaaggccggtctaatgcctggagacctcaggtgaacaacccgaaagaatggctccaggtggactttcagaagaccatgaaagtaacaggtgtcactactcagggagttaagtccttggatactagcatgtatgtgaaggagttccttatttcctcatcacaagatggccaccagtggaccctcttctttcagaatggtaaggtcaaagtgtttcagggcaatcaagacagcttcacacccgtggtgaacagtcttgatcctccactcttgacacgataccttcgaatccatccacagtcttgggagcaccagattgcattgcgcatggaagtacttggatgcgaggctcaggacctctac

SEQ ID NO: 1682 - protein, 1457 aa, synthetic construct
  REGION 1..1457: note = Variant of human B-domain deleted Factor VIII
MQIELSTCFFLCLLRFCFSATRRYYLGAVELSWDYMQSDLGELPVDARFPPRVPKSFPFNTSQVYKKTLFVEFTDHLFNIAKPRPPWMGLLGPTIQAEVYDTVVITLKNMASHPVSLHAVGVSYWKASEGAEYDDQTSQREKEDDKVFPGGSHTYVWQVLKENGPMASDPPCLTYSYLSHVDLVKDLNSGLIGALLVCREGSLAKEKTQTLAKFILLFAVFDEGKSWHSETKNSLMQDRDAASARAWPKMHTVNGYVNRTLPGLIGCHRKSVYWHVIGMGTTPEVHSIFLEGHTFLVRNHRQASLGISPITFLTAQTLLRDLGQFLLFCHIPSHQHDGMEAYVKVDSCPEEPQLRMKNNEEAEDYDDDLTDSEMDVVRFDDDNSPSIIQARSGAKKHPKTWVHYIAAEEEDWDYAPLVLAPDDRSYKSQYLNNGPQRIGRKYKKVRFMAYTDETFKTREAIQHESGILGPLLYGEVGDTLLIIFKNQASRPYNIYPHGITDVRPLYSRRLPKGVKHLKDFPILPGEIFKYKWTITVEDGPTKSDPRCLTRYYSSFVNWERDLASGLIGPLLICYKESVDQRGNQIMSDKRNVILFSVFDENRSWYLTENIQRFLPNPAGVQLEDPEFQASNIMHSINGYVFDSLQLSVCLHEVAYWYILSIGAQTDFLSVFFSGYTFKHKGVYEDTLTLFPFSGETVFMSMENPGLWILGCHNSDFRNRGMTALLKVSSCDWNTGDYYEDSYEDISAYFDSKNNAIEPRSFSQNPPVLKRHQREGTRTTLQSDQEEIDYDDTISVEMKKEDFDIYDEDENQSPRSFQKKTRHYFIAAVERLWDYGMSSSPHVLRNRAQSGSVPQFKKVVFQEFTDGSFTQPLYRGELNEHLGLLGPYIRAEVEDNIMVTFRNQASRPYSFYSSLISYEEDQRQGAEPRKNFVKPNETKTYFWKVQHHMAPTKDEFDCKAWAYFSDVDLEKDVHSGLIGPLLVCHTNTLNPAHGRQVTVQEFALFFTIFDETKSWYFTENMERNCRAPCNIQMEDPTFKENYRFHAINGYIMDTLPGLVMAQDQRIRWYLLSMGSNENIHSIHFLGHVFTVRKKEEYKMALYNLYPGVFETVEMLPSKAGIWRVECLIGEHLHAGMSTLFLVYSNKCQNPLGMASGHIRDFQITASGQYGQWAPKLARLHYSGSINAWSTKEPFSWIKVDLLAPMIIHGIKTQGARQKFSSLYISQFIIMYSLDGKKWQTYRGNSTGTDMVFFGNVDSSGIKHNIFNPPIIARYIRLHPTHYSIRSTLRMELMGCDLNSCSMPLGMESKAISDAQITASSYFTNMFATWSPSKARLHLQGRSNAWRPQVNNPKEWLQVDFQKTMKVTGVTTQGVKSLDTSMYVKEFLISSSQDGHQWTLFFQNGKVKVFQGNQDSFTPVVNSLDPPLLTRYLRIHPQSWEHQIALRMEVLGCEAQDLY

SEQ ID NO: 1683 - DNA, 4371 bp, synthetic construct
  misc_feature 1..4371: note = Variant of human B-domain deleted Factor VIII
  source 1..4371: mol_type = other DNA
atgcagattgaactgtctacctgcttcttcctctgtttgctgaggttctgctttagcgccactagacggtactaccttggcgctgtggagctgtcctgggactatatgcagagtgatttgggagagcttcccgtcgacgcacgatttcctcctcgcgttccaaagtcatttccctttaacacaagccaggtgtacaagaagacgctcttcgtcgaattcaccgatcacctgttcaatatcgccaaacccagaccaccatggatgggtcttttggggcctaccatacaagcggaggtgtatgacacagttgttatcactctcaagaacatggcttctcatccggtaagtcttcacgcagtgggcgtgtcctactggaaagcttcagaaggagccgagtatgatgatcagacatcccagagggagaaagaagacgacaaggtatttccaggtgggtctcatacctatgtgtggcaagtgctcaaagagaatggccctatggcaagcgatccgccgtgtttgacttacagctacctttcacacgttgacctcgtcaaggacctcaactccgggttgattggagccttgttggtatgcagggaaggatctcttgccaaagagaagacacagaccctggccaagtttatccttctctttgctgtgttcgatgagggcaaaagttggcatagcgaaacgaagaattccctcatgcaggatcgcgacgcagccagcgccagagcttggcccaagatgcacactgtgaacggatatgtcaataggacgcttcctggcttgattgggtgtcatcggaaaagtgtctactggcacgtgatcggaatggggacaacaccagaggtccactccatatttctcgaaggccataccttccttgttcgaaaccacagacaggcatccttggggatctctcccattacctttctcactgcccaaacgctccttcgtgacttgggtcagttccttctcttttgccatatcccgtcacaccagcatgatggtatggaagcttatgtgaaagtcgacagttgtcctgaggagccacagttgcgcatgaagaataatgaagaagccgaggattacgacgacgatctcaccgattctgagatggacgtggtgaggtttgatgacgacaactctccctccatcattcaagctcggagcggggcgaagaaacaccccaagacttgggtccactatatagcggcggaagaggaggattgggattacgctcctcttgtattggcaccagatgaccgctcatacaaaagccagtacctcaacaacggaccgcagagaattggccggaagtataagaaagtgcgatttatggcctatacagacgaaacctttaagacaagggaggccatccagcatgagagtgggattttgggacctcttctttacggcgaagttggtgataccctcctcatcatcttcaagaatcaagcttctcgcccctataacatttacccacacgcgatcactgacgttaggcctttgtatagcagaagacttcccaaaggcgtgaagcatctcaaagacttccccattttgccaggcgagatctttaagtacaaatggaccattacagtggaagatggaccgactaaatcagaccctcgatgccttacgcggtactattcctccttcgtgaattgggagagagatttggcaagcggactcataggaccactcctcatctgttacaaggaatctgtagaccagaggggtaaccagattatgagtgataaacgcaatgtgatcctttttagcgtcttcgacgagaaccggtcctggtacttgaccgagaatatacaaaggttccttcccaaccccgcaggcgttcagttggaagaccctgagtttcaggccagcaatattatgcactcaatcaacggctatgtgtttgatagtctccagctttctgtttgcctccatgaagtagcctattggtacatcttgtcaattggtgctcaaacagacttcctctccgtcttcttctccggctacacctttaagcacaagggcgtgtatgaggacactctcacactctttccattttctggagaaaccgtgttcatgagcatggagaatccaggcctttggatcttgggttgccacaacagtgattttcgcaatcggggaatgactgctctcctcaaagtcagcagctgtgattggaacacaggcgactattacgaagattcttacgaggacataagtgcctactttgactccaagaataacgccattgagcccagatcattctcccagaatcctcccgtgcttaaaaggcatcagcgcgaaggtaccagaactactcttcagtctgatcaagaggagattgactatgacgacaccattagcgtggaaatgaagaaggaggatttcgatatctatgacgaagatgagaaccagtctccgcggagctttcagaagaagacgcgacactacttcattgcagcagtcgaaaggctttgggactacggtatgtcatcatcccctcatgtgttgcgcaatagagctcagagtggaagtgttccacagttcaagaaagtcgtctttcaagagtttacagatggcagcttcacacagcctctctatcggggcgagcttaacgaacatttgggactccttggtccctatatccgagccgaagtggaggacaacattatggttacctttaggaatcaagcctctcgcccctacagcttctactcctccctcatcagttatgaggaggatcagagacaaggcgctgaaccacggaagaactttgtgaaaccgaatgagacgaagacctacttctggaaagtacagcaccacatggcccccacaaaagacgaattcgattgcaaagcatgggcgtatttttcagacgttgacttggagaaagatgtacattcaggacttattggtcctttgttggtgtgtcacactaacactctcaatccagcccatggcaggcaggtgacagtccaggaattcgctcttttctttaccatctttgatgagaccaagtcctggtacttcacggaaaacatggagcgcaattgcagagccccctgtaacatacagatggaggaccctacctttaaggaaaattatcggttccacgcaatcaacggatacattatggatacactccctggccttgtgatggctcaggaccaacgaatcaggtggtacctcctcagcatgggttctaatgagaacatacactccattcacttttcaggacatgtgttcactgtccggaagaaagaagagtataagatggccctctacaatttgtatccaggcgtgtttgagaccgttgaaatgcttccctctaaagctggcatctggagagtagagtgcttgatcggagaacatcttcacgcaggtatgagcaccttgttcctcgtgtacagcaacaaatgtcagaatccacttggcatggccagtggacacattcgcgactttcagatcacagcatctggccagtatggacaatgggccccaaagttggctcgcctccattactccggtagcataaatgcgtggtccactaaagaacctttcagctggattaaggtcgatcttcttgcccccatgatcatccacggcattaagacacagggagcgaggcagaaattctcctccctctacatctcacagttcattattatgtatagtttggacggcaagaagtggcaaacttatagaggtaacagtactggaacagacatggtgttcttcggcaacgttgatagctctggcatcaaacacaacatctttaatcctcccataatagctcggtacatcagattgcatccgacccactacagcattaggagtacactccgaatggagcttatgggttgcgacttgaattcctgttcaatgccactcggaatggagtctaaagccatctctgatgcacagataaccgccagtagctactttacgaacatgtttgctacgtggtcaccctctaaggcaaggcttcatttgcaaggccggtctaatgcctggagacctcaggtgaacaacccgaaagaatggctccaggtggactttcagaagaccatgaaagtaacaggtgtcactactcagggagttaagtccttggatactagcatgtatgtgaaggagttccttatttcctcatcacaagatggccaccagtggaccctcttctttcagaatggtaaggtcaaagtgtttcagggcaatcaagacagcttcacacccgtggtgaacagtcttgatcctccactcttgacacgataccttcgaatccatccacagtcttgggagcaccagattgcattgcgcatggaagtacttggatgcgaggctcaggacctctac

SEQ ID NO: 1684 - protein, 1457 aa, synthetic construct
  REGION 1..1457: note = Variant of human B-domain deleted Factor VIII
MQIELSTCFFLCLLRFCFSATRRYYLGAVELSWDYMQSDLGELPVDARFPPRVPKSFPFNTSQVYKKTLFVEFTDHLFNIAKPRPPWMGLLGPTIQAEVYDTVVITLKNMASHPVSLHAVGVSYWKASEGAEYDDQTSQREKEDDKVFPGGSHTYVWQVLKENGPMASDPPCLTYSYLSHVDLVKDLNSGLIGALLVCREGSLAKEKTQTLAKFILLFAVFDEGKSWHSETKNSLMQDRDAASARAWPKMHTVNGYVNRTLPGLIGCHRKSVYWHVIGMGTTPEVHSIFLEGHTFLVRNHRQASLGISPITFLTAQTLLRDLGQFLLFCHIPSHQHDGMEAYVKVDSCPEEPQLRMKNNEEAEDYDDDLTDSEMDVVRFDDDNSPSIIQARSGAKKHPKTWVHYIAAEEEDWDYAPLVLAPDDRSYKSQYLNNGPQRIGRKYKKVRFMAYTDETFKTREAIQHESGILGPLLYGEVGDTLLIIFKNQASRPYNIYPHAITDVRPLYSRRLPKGVKHLKDFPILPGEIFKYKWTITVEDGPTKSDPRCLTRYYSSFVNWERDLASGLIGPLLICYKESVDQRGNQIMSDKRNVILFSVFDENRSWYLTENIQRFLPNPAGVQLEDPEFQASNIMHSINGYVFDSLQLSVCLHEVAYWYILSIGAQTDFLSVFFSGYTFKHKGVYEDTLTLFPFSGETVFMSMENPGLWILGCHNSDFRNRGMTALLKVSSCDWNTGDYYEDSYEDISAYFDSKNNAIEPRSFSQNPPVLKRHQREGTRTTLQSDQEEIDYDDTISVEMKKEDFDIYDEDENQSPRSFQKKTRHYFIAAVERLWDYGMSSSPHVLRNRAQSGSVPQFKKVVFQEFTDGSFTQPLYRGELNEHLGLLGPYIRAEVEDNIMVTFRNQASRPYSFYSSLISYEEDQRQGAEPRKNFVKPNETKTYFWKVQHHMAPTKDEFDCKAWAYFSDVDLEKDVHSGLIGPLLVCHTNTLNPAHGRQVTVQEFALFFTIFDETKSWYFTENMERNCRAPCNIQMEDPTFKENYRFHAINGYIMDTLPGLVMAQDQRIRWYLLSMGSNENIHSIHFSGHVFTVRKKEEYKMALYNLYPGVFETVEMLPSKAGIWRVECLIGEHLHAGMSTLFLVYSNKCQNPLGMASGHIRDFQITASGQYGQWAPKLARLHYSGSINAWSTKEPFSWIKVDLLAPMIIHGIKTQGARQKFSSLYISQFIIMYSLDGKKWQTYRGNSTGTDMVFFGNVDSSGIKHNIFNPPIIARYIRLHPTHYSIRSTLRMELMGCDLNSCSMPLGMESKAISDAQITASSYFTNMFATWSPSKARLHLQGRSNAWRPQVNNPKEWLQVDFQKTMKVTGVTTQGVKSLDTSMYVKEFLISSSQDGHQWTLFFQNGKVKVFQGNQDSFTPVVNSLDPPLLTRYLRIHPQSWEHQIALRMEVLGCEAQDLY

SEQ ID NO: 1685 - DNA, 4371 bp, synthetic construct
  misc_feature 1..4371: note = Variant of human B-domain deleted Factor VIII
  source 1..4371: mol_type = other DNA
atgcagattgaactgtctacctgcttcttcctctgtttgctgaggttctgctttagcgccactagacggtactaccttggcgctgtggagctgtcctgggactatatgcagagtgatttgggagagcttcccgtcgacgcacgatttcctcctcgcgttccaaagtcatttccctttaacacaagccaggtgtacaagaagacgctcttcgtcgaattcaccgatcacctgttcaatatcgccaaacccagaccaccatggatgggtcttttggggcctaccatacaagcggaggtgtatgacacagttgttatcactctcaagaacatggcttctcatccggtaagtcttcacgcagtgggcgtgtcctactggaaagcttcagaaggagccgagtatgatgatcagacatcccagagggagaaagaagacgacaaggtatttccaggtgggtctcatacctatgtgtggcaagtgctcaaagagaatggccctatggcaagcgatccgccgtgtttgacttacagctacctttcacacgttgacctcgtcaaggacctcaactccgggttgattggagccttgttggtatgcagggaaggatctcttgccaaagagaagacacagaccctggccaagtttatccttctctttgctgtgttcgatgagggcaaaagttggcatagcgaaacgaagaattccctcatgcaggatcgcgacgcagccagcgccagagcttggcccaagatgcacactgtgaacggatatgtcaataggacgcttcctggcttgattgggtgtcatcggaaaagtgtctactggcacgtgatcggaatggggacaacaccagaggtccactccatatttctcgaaggccataccttccttgttcgaaaccacagacaggcatccttggggatctctcccattacctttctcactgcccaaacgctccttcgtgacttgggtcagttccttctcttttgccatatcccgtcacaccagcatgatggtatggaagcttatgtgaaagtcgacagttgtcctgaggagccacagttgcgcatgaagaataatgaagaagccgaggattacgacgacgatctcaccgattctgagatggacgtggtgaggtttgatgacgacaactctccctccatcattcaagctcggagcggggcgaagaaacaccccaagacttgggtccactatatagcggcggaagaggaggattgggattacgctcctcttgtattggcaccagatgaccgctcatacaaaagccagtacctcaacaacggaccgcagagaattggccggaagtataagaaagtgcgatttatggcctatacagacgaaacctttaagacaagggaggccatccagcatgagagtgggattttgggacctcttctttacggcgaagttggtgataccctcctcatcatcttcaagaatcaagcttctcgcccctataacatttacccacacgggatcactgacgttaggcctttgtatagcagaagacttcccaaaggcgtgaagcatctcaaagacttccccattttgccaggcgagatctttaagtacaaatggaccattacagtggaagatggaccgactaaatcagaccctcgatgccttacgcggtactattcctccttcgtgaattgggagagagatttggcaagcggactcataggaccactcctcatctgttacaaggaatctgtagaccagaggggtaaccagattatgagtgataaacgcaatgtgatcctttttagcgtcttcgacgagaaccggtcctggtacttgaccgagaatatacaaaggttccttcccaaccccgcaggcgttcagttggaagaccctgagtttcaggccagcaatattatgcactcaatcaacggctatgtgtttgatagtctccagctttctgtttgcctccatgaagtagcctattggtacatcttgtcaattggtgctcaaacagacttcctctccgtcttcttctccggctacacctttaagcacaagggcgtgtatgaggacactctcacactctttccattttctggagaaaccgtgttcatgagcatggagaatccaggcctttggatcttgggttgccacaacagtgattttcgcaatcggggaatgactgctctcctcaaagtcagcagctgtgattggaacacaggcgactattacgaagattcttacgaggacataagtgcctactttgactccaagaataacgccattgagcccagatcattctcccagaatcctcccgtgcttaaaaggcatcagcgcgaaggtaccagaactactcttcagtctgatcaagagttgattgactatgacgacaccattagcgtggaaatgaagaaggaggatttcgatatctatgacgaagatgagaaccagtctccgcggagctttcagaagaagacgcgacactacttcattgcagcagtcgaaaggctttgggactacggtatgtcatcatcccctcatgtgttgcgcaatagagctcagagtggaagtgttccacagttcaagaaagtcgtctttcaagagtttacagatggcagcttcacacagcctctctatcggggcgagcttaacgaacatttgggactccttggtccctatatccgagccgaagtggaggacaacattatggttacctttaggaatcaagcctctcgcccctacagcttctactcctccctcatcagttatgaggaggatcagagacaaggcgctgaaccacggaagaactttgtgaaaccgaatgagacgaagacctacttctggaaagtacagcaccacatggcccccacaaaagacgaattcgattgcaaagcatgggcgtatttttcagacgttgacttggagaaagatgtacattcaggacttattggtcctttgttggtgtgtcacactaacactctcaatccagcccatggcaggcaggtgacagtccaggaattcgctcttttctttaccatctttgatgagaccaagtcctggtacttcacggaaaacatggagcgcaattgcagagccccctgtaacatacagatggaggaccctacctttaaggaaaattatcggttccacgcaatcaacggatacattatggatacactccctggccttgtgatggctcaggaccaacgaatcaggtggtacctcctcagcatgggttctaatgagaacatacactccattcacttttcaggacatgtgttcactgtccggaagaaagaagagtataagatggccctctacaatttgtatccaggcgtgtttgagaccgttgaaatgcttccctctaaagctggcatctggagagtagagtgcttgatcggagaacatcttcacgcaggtatgagcaccttgttcctcgtgtacagcaacaaatgtcagaatccacttggcatggccagtggacacattcgcgactttcagatcacagcatctggccagtatggacaatgggccccaaagttggctcgcctccattactccggtagcataaatgcgtggtccactaaagaacctttcagctggattaaggtcgatcttcttgcccccatgatcatccacggcattaagacacagggagcgaggcagaaattctcctccctctacatctcacagttcattattatgtatagtttggacggcaagaagtggcaaacttatagaggtaacagtactggaacagacatggtgttcttcggcaacgttgatagctctggcatcaaacacaacatctttaatcctcccataatagctcggtacatcagattgcatccgacccactacagcattaggagtacactccgaatggagcttatgggttgcgacttgaattcctgttcaatgccactcggaatggagtctaaagccatctctgatgcacagataaccgccagtagctactttacgaacatgtttgctacgtggtcaccctctaaggcaaggcttcatttgcaaggccggtctaatgcctggagacctcaggtgaacaacccgaaagaatggctccaggtggactttcagaagaccatgaaagtaacaggtgtcactactcagggagttaagtccttggatactagcatgtatgtgaaggagttccttatttcctcatcacaagatggccaccagtggaccctcttctttcagaatggtaaggtcaaagtgtttcagggcaatcaagacagcttcacacccgtggtgaacagtcttgatcctccactcttgacacgataccttcgaatccatccacagtcttgggagcaccagattgcattgcgcatggaagtacttggatgcgaggctcaggacctctac

SEQ ID NO: 1686 - protein, 1457 aa, synthetic construct
  REGION 1..1457: note = Variant of human B-domain deleted Factor VIII
MQIELSTCFFLCLLRFCFSATRRYYLGAVELSWDYMQSDLGELPVDARFPPRVPKSFPFNTSQVYKKTLFVEFTDHLFNIAKPRPPWMGLLGPTIQAEVYDTVVITLKNMASHPVSLHAVGVSYWKASEGAEYDDQTSQREKEDDKVFPGGSHTYVWQVLKENGPMASDPPCLTYSYLSHVDLVKDLNSGLIGALLVCREGSLAKEKTQTLAKFILLFAVFDEGKSWHSETKNSLMQDRDAASARAWPKMHTVNGYVNRTLPGLIGCHRKSVYWHVIGMGTTPEVHSIFLEGHTFLVRNHRQASLGISPITFLTAQTLLRDLGQFLLFCHIPSHQHDGMEAYVKVDSCPEEPQLRMKNNEEAEDYDDDLTDSEMDVVRFDDDNSPSIIQARSGAKKHPKTWVHYIAAEEEDWDYAPLVLAPDDRSYKSQYLNNGPQRIGRKYKKVRFMAYTDETFKTREAIQHESGILGPLLYGEVGDTLLIIFKNQASRPYNIYPHGITDVRPLYSRRLPKGVKHLKDFPILPGEIFKYKWTITVEDGPTKSDPRCLTRYYSSFVNWERDLASGLIGPLLICYKESVDQRGNQIMSDKRNVILFSVFDENRSWYLTENIQRFLPNPAGVQLEDPEFQASNIMHSINGYVFDSLQLSVCLHEVAYWYILSIGAQTDFLSVFFSGYTFKHKGVYEDTLTLFPFSGETVFMSMENPGLWILGCHNSDFRNRGMTALLKVSSCDWNTGDYYEDSYEDISAYFDSKNNAIEPRSFSQNPPVLKRHQREGTRTTLQSDQELIDYDDTISVEMKKEDFDIYDEDENQSPRSFQKKTRHYFIAAVERLWDYGMSSSPHVLRNRAQSGSVPQFKKVVFQEFTDGSFTQPLYRGELNEHLGLLGPYIRAEVEDNIMVTFRNQASRPYSFYSSLISYEEDQRQGAEPRKNFVKPNETKTYFWKVQHHMAPTKDEFDCKAWAYFSDVDLEKDVHSGLIGPLLVCHTNTLNPAHGRQVTVQEFALFFTIFDETKSWYFTENMERNCRAPCNIQMEDPTFKENYRFHAINGYIMDTLPGLVMAQDQRIRWYLLSMGSNENIHSIHFSGHVFTVRKKEEYKMALYNLYPGVFETVEMLPSKAGIWRVECLIGEHLHAGMSTLFLVYSNKCQNPLGMASGHIRDFQITASGQYGQWAPKLARLHYSGSINAWSTKEPFSWIKVDLLAPMIIHGIKTQGARQKFSSLYISQFIIMYSLDGKKWQTYRGNSTGTDMVFFGNVDSSGIKHNIFNPPIIARYIRLHPTHYSIRSTLRMELMGCDLNSCSMPLGMESKAISDAQITASSYFTNMFATWSPSKARLHLQGRSNAWRPQVNNPKEWLQVDFQKTMKVTGVTTQGVKSLDTSMYVKEFLISSSQDGHQWTLFFQNGKVKVFQGNQDSFTPVVNSLDPPLLTRYLRIHPQSWEHQIALRMEVLGCEAQDLY

SEQ ID NO: 1687 - DNA, 4371 bp, synthetic construct
  misc_feature 1..4371: note = Variant of human B-domain deleted Factor VIII
  source 1..4371: mol_type = other DNA
atgcagattgaactgtctacctgcttcttcctctgtttgctgaggttctgctttagcgccactagacggtactaccttggcgctgtggagctgtcctgggactatatgcagagtgatttgggagagcttcccgtcgacgcacgatttcctcctcgcgttccaaagtcatttccctttaacacaagccaggtgtacaagaagacgctcttcgtcgaattcaccgatcacctgttcaatatcgccaaacccagaccaccatggatgggtcttttggggcctaccatacaagcggaggtgtatgacacagttgttatcactctcaagaacatggcttctcatccggtaagtcttcacgcagtgggcgtgtcctactggaaagcttcagaaggagccgagtatgatgatcagacatcccagagggagaaagaagacgacaaggtatttccaggtgggtctcatacctatgtgtggcaagtgctcaaagagaatggccctatggcaagcgatccgccgtgtttgacttacagctacctttcacacgttgacctcgtcaaggacctcaactccgggttgattggagccttgttggtatgcagggaaggatctcttgccaaagagaagacacagaccctggccaagtttatccttctctttgctgtgttcgatgagggcaaaagttggcatagcgaaacgaagaattccctcatgcaggatcgcgacgcagccagcgccagagcttggcccaagatgcacactgtgaacggatatgtcaataggacgcttcctggcttgattgggtgtcatcggaaaagtgtctactggcacgtgatcggaatggggacaacaccagaggtccactccatatttctcgaaggccataccttccttgttcgaaaccacagacaggcatccttggggatctctcccattacctttctcactgcccaaacgctccttcgtgacttgggtcagttccttctcttttgccatatcccgtcacaccagcatgatggtatggaagcttatgtgaaagtcgacagttgtcctgaggagccacagttgcgcatgaagaataatgaagaagccgaggattacgacgacgatctcaccgattctgagatggacgtggtgaggtttgatgacgacaactctccctccatcattcaagctcggagcggggcgaagaaacaccccaagacttgggtccactatatagcggcggaagaggaggattgggattacgctcctcttgtattggcaccagatgaccgctcatacaaaagccagtacctcaacaacggaccgcagagaattggccggaagtataagaaagtgcgatttatggcctatacagacgaaacctttaagacaagggaggccatccagcatgagagtgggattttgggacctcttctttacggcgaagttggtgataccctcctcatcatcttcaagaatcaagcttctcgcccctataacatttacccacacgggatcactgacgttaggcctttgtatagcagaagacttcccaaaggcgtgaagcatctcaaagacttccccattttgccaggcgagatctttaagtacaaatggaccattacagtggaagatggaccgactaaatcagaccctcgatgccttacgcggtactattcctccttcgtgaattgggagagagatttggcaagcggactcataggaccactcctcatctgttacaaggaatctgtagaccagaggggtaaccagattatgagtgataaacgcaatgtgatcctttttagcgtcttcgacgagaaccggtcctggtacttgaccgagaatatacaaaggttccttcccaaccccgcaggcgttcagttggaagaccctgagtttcaggccagcaatattatgcactcaatcaacggctatgtgtttgatagtctccagctttctgtttgcctccatgaagtagcctattggtacatcttgtcaattggtgctcaaacagacttcctctccgtcttcttctccggctacacctttaagcacaagggcgtgtatgaggacactctcacactctttccattttctggagaaaccgtgttcatgagcatggagaatccaggcctttggatcttgggttgccacaacagtgattttcgcaatcggggaatgactgctctcctcaaagtcagcagctgtgattggaacacaggcgactattttgaagattcttacgaggacataagtgcctactttgactccaagaataacgccattgagcccagatcattctcccagaatcctcccgtgcttaaaaggcatcagcgcgaaggtaccagaactactcttcagtctgatcaagaggagattgactatgacgacaccattagcgtggaaatgaagaaggaggatttcgatatctatgacgaagatgagaaccagtctccgcggagctttcagaagaagacgcgacactacttcattgcagcagtcgaaaggctttgggactacggtatgtcatcatcccctcatgtgttgcgcaatagagctcagagtggaagtgttccacagttcaagaaagtcgtctttcaagagtttacagatggcagcttcacacagcctctctatcggggcgagcttaacgaacatttgggactccttggtccctatatccgagccgaagtggaggacaacattatggttacctttaggaatcaagcctctcgcccctacagcttctactcctccctcatcagttatgaggaggatcagagacaaggcgctgaaccacggaagaactttgtgaaaccgaatgagacgaagacctacttctggaaagtacagcaccacatggcccccacaaaagacgaattcgattgcaaagcatgggcgtatttttcagacgttgacttggagaaagatgtacattcaggacttattggtcctttgttggtgtgtcacactaacactctcaatccagcccatggcaggcaggtgacagtccaggaattcgctcttttctttaccatctttgatgagaccaagtcctggtacttcacggaaaacatggagcgcaattgcagagccccctgtaacatacagatggaggaccctacctttaaggaaaattatcggttccacgcaatcaacggatacattatggatacactccctggccttgtgatggctcaggaccaacgaatcaggtggtacctcctcagcatgggttctaatgagaacatacactccattcacttttcaggacatgtgttcactgtccggaagaaagaagagtataagatggccctctacaatttgtatccaggcgtgtttgagaccgttgaaatgcttccctctaaagctggcatctggagagtagagtgcttgatcggagaacatcttcacgcaggtatgagcaccttgttcctcgtgtacagcaacaaatgtcagaatccacttggcatggccagtggacacattcgcgactttcagatcacagcatctggccagtatggacaatgggccccaaagttggctcgcctccattactccggtagcataaatgcgtggtccactaaagaacctttcagctggattaaggtcgatcttcttgcccccatgatcatccacggcattaagacacagggagcgaggcagaaattctcctccctctacatctcacagttcattattatgtatagtttggacggcaagaagtggcaaacttatagaggtaacagtactggaacagacatggtgttcttcggcaacgttgatagctctggcatcaaacacaacatctttaatcctcccataatagctcggtacatcagattgcatccgacccactacagcattaggagtacactccgaatggagcttatgggttgcgacttgaattcctgttcaatgccactcggaatggagtctaaagccatctctgatgcacagataaccgccagtagctactttacgaacatgtttgctacgtggtcaccctctaaggcaaggcttcatttgcaaggccggtctaatgcctggagacctcaggtgaacaacccgaaagaatggctccaggtggactttcagaagaccatgaaagtaacaggtgtcactactcagggagttaagtccttggatactagcatgtatgtgaaggagttccttatttcctcatcacaagatggccaccagtggaccctcttctttcagaatggtaaggtcaaagtgtttcagggcaatcaagacagcttcacacccgtggtgaacagtcttgatcctccactcttgacacgataccttcgaatccatccacagtcttgggagcaccagattgcattgcgcatggaagtacttggatgcgaggctcaggacctctac

SEQ ID NO: 1688 - protein, 1457 aa, synthetic construct
  REGION 1..1457: note = Variant of human B-domain deleted Factor VIII
MQIELSTCFFLCLLRFCFSATRRYYLGAVELSWDYMQSDLGELPVDARFPPRVPKSFPFNTSQVYKKTLFVEFTDHLFNIAKPRPPWMGLLGPTIQAEVYDTVVITLKNMASHPVSLHAVGVSYWKASEGAEYDDQTSQREKEDDKVFPGGSHTYVWQVLKENGPMASDPPCLTYSYLSHVDLVKDLNSGLIGALLVCREGSLAKEKTQTLAKFILLFAVFDEGKSWHSETKNSLMQDRDAASARAWPKMHTVNGYVNRTLPGLIGCHRKSVYWHVIGMGTTPEVHSIFLEGHTFLVRNHRQASLGISPITFLTAQTLLRDLGQFLLFCHIPSHQHDGMEAYVKVDSCPEEPQLRMKNNEEAEDYDDDLTDSEMDVVRFDDDNSPSIIQARSGAKKHPKTWVHYIAAEEEDWDYAPLVLAPDDRSYKSQYLNNGPQRIGRKYKKVRFMAYTDETFKTREAIQHESGILGPLLYGEVGDTLLIIFKNQASRPYNIYPHGITDVRPLYSRRLPKGVKHLKDFPILPGEIFKYKWTITVEDGPTKSDPRCLTRYYSSFVNWERDLASGLIGPLLICYKESVDQRGNQIMSDKRNVILFSVFDENRSWYLTENIQRFLPNPAGVQLEDPEFQASNIMHSINGYVFDSLQLSVCLHEVAYWYILSIGAQTDFLSVFFSGYTFKHKGVYEDTLTLFPFSGETVFMSMENPGLWILGCHNSDFRNRGMTALLKVSSCDWNTGDYFEDSYEDISAYFDSKNNAIEPRSFSQNPPVLKRHQREGTRTTLQSDQEEIDYDDTISVEMKKEDFDIYDEDENQSPRSFQKKTRHYFIAAVERLWDYGMSSSPHVLRNRAQSGSVPQFKKVVFQEFTDGSFTQPLYRGELNEHLGLLGPYIRAEVEDNIMVTFRNQASRPYSFYSSLISYEEDQRQGAEPRKNFVKPNETKTYFWKVQHHMAPTKDEFDCKAWAYFSDVDLEKDVHSGLIGPLLVCHTNTLNPAHGRQVTVQEFALFFTIFDETKSWYFTENMERNCRAPCNIQMEDPTFKENYRFHAINGYIMDTLPGLVMAQDQRIRWYLLSMGSNENIHSIHFSGHVFTVRKKEEYKMALYNLYPGVFETVEMLPSKAGIWRVECLIGEHLHAGMSTLFLVYSNKCQNPLGMASGHIRDFQITASGQYGQWAPKLARLHYSGSINAWSTKEPFSWIKVDLLAPMIIHGIKTQGARQKFSSLYISQFIIMYSLDGKKWQTYRGNSTGTDMVFFGNVDSSGIKHNIFNPPIIARYIRLHPTHYSIRSTLRMELMGCDLNSCSMPLGMESKAISDAQITASSYFTNMFATWSPSKARLHLQGRSNAWRPQVNNPKEWLQVDFQKTMKVTGVTTQGVKSLDTSMYVKEFLISSSQDGHQWTLFFQNGKVKVFQGNQDSFTPVVNSLDPPLLTRYLRIHPQSWEHQIALRMEVLGCEAQDLY

SEQ ID NO: 1689 - DNA, 4371 bp, synthetic construct
  misc_feature 1..4371: note = Variant of human B-domain deleted Factor VIII
  source 1..4371: mol_type = other DNA
atgcagattgaactgtctacctgcttcttcctctgtttgctgaggttctgctttagcgccactagacggtactaccttggcgctgtggagctgtcctgggactatatgcagagtgatttgggagagcttcccgtcgacgcacgatttcctcctcgcgttccaaagtcatttccctttaacacaagccaggtgtacaagaagacgctcttcgtcgaattcaccgatcacctgttcaatatcgccaaacccagaccaccatggatgggtcttttggggcctaccatacaagcggaggtgtatgacacagttgttatcactctcaagaacatggcttctcatccggtaagtcttcacgcagtgggcgtgtcctactggaaagcttcagaaggagccgagtatgatgatcagacatcccagagggagaaagaagacgacaaggtatttccaggtgggtctcatacctatgtgtggcaagtgctcaaagagaatggccctatggcaagcgatccgccgtgtttgacttacagctacctttcacacgttgacctcgtcaaggacctcaactccgggttgattggagccttgttggtatgcagggaaggatctcttgccaaagagaagacacagaccctggccaagtttatccttctctttgctgtgttcgatgagggcaaaagttggcatagcgaaacgaagaattccctcatgcaggatcgcgacgcagccagcgccagagcttggcccaagatgcacactgtgaacggatatgtcaataggacgcttcctggcttgattgggtgtcatcggaaaagtgtctactggcacgtgatcggaatggggacaacaccagaggtccactccatatttctcgaaggccataccttccttgttcgaaaccacagacaggcatccttggggatctctcccattacctttctcactgcccaaacgctccttcgtgacttgggtcagttccttctcttttgccatatcccgtcacaccagcatgatggtatggaagcttatgtgaaagtcgacagttgtcctgaggagccacagttgcgcatgaagaataatgaagaagccgaggattacgacgacgatctcaccgattctgagatggacgtggtgaggtttgatgacgacaactctccctccatcattcaagctcggagcggggcgaagaaacaccccaagacttgggtccactatatagcggcggaagaggaggattgggattacgctcctcttgtattggcaccagatgaccgctcatacaaaagccagtacctcaacaacggaccgcagagaattggccggaagtataagaaagtgcgatttatggcctatacagacgaaacctttaagacaagggaggccatccagcatgagagtgggattttgggacctcttctttacggcgaagttggtgataccctcctcatcatcttcaagaatcaagcttctcgcccctataacatttacccacacgggatcactgacgttaggcctttgtatagcagaagacttcccaaaggcgtgaagcatctcaaagacttccccattttgccaggcgagatctttaagtacaaatggaccattggggtggaagatggaccgactaaatcagaccctcgatgccttacgcggtactattcctccttcgtgaattgggagagagatttggcaagcggactcataggaccactcctcatctgttacaaggaatctgtagaccagaggggtaaccagattatgagtgataaacgcaatgtgatcctttttagcgtcttcgacgagaaccggtcctggtacttgaccgagaatatacaaaggttccttcccaaccccgcaggcgttcagttggaagaccctgagtttcaggccagcaatattatgcactcaatcaacggctatgtgtttgatagtctccagctttctgtttgcctccatgaagtagcctattggtacatcttgtcaattggtgctcaaacagacttcctctccgtcttcttctccggctacacctttaagcacaagggcgtgtatgaggacactctcacactctttccattttctggagaaaccgtgttcatgagcatggagaatccaggcctttggatcttgggttgccacaacagtgattttcgcaatcggggaatgactgctctcctcaaagtcagcagctgtgattggaacacaggcgactattacgaagattcttacgaggacataagtgcctactttgactccaagaataacgccattgagcccagatcattctcccagaatcctcccgtgcttaaaaggcatcagcgcgaaggtaccagaactactcttcagtctgatcaagaggagattgactatgacgacaccattagcgtggaaatgaagaaggaggatttcgatatctatgacgaagatgagaaccagtctccgcggagctttcagaagaagacgcgacactacttcattgcagcagtcgaaaggctttgggactacggtatgtcatcatcccctcatgtgttgcgcaatagagctcagagtggaagtgttccacagttcaagaaagtcgtctttcaagagtttacagatggcagcttcacacagcctctctatcggggcgagcttaacgaacatttgggactccttggtccctatatccgagccgaagtggaggacaacattatggttacctttaggaatcaagcctctcgcccctacagcttctactcctccctcatcagttatgaggaggatcagagacaaggcgctgaaccacggaagaactttgtgaaaccgaatgagacgaagacctacttctggaaagtacagcaccacatggcccccacaaaagacgaattcgattgcaaagcatgggcgtatttttcagacgttgacttggagaaagatgtacattcaggacttattggtcctttgttggtgtgtcacactaacactctcaatccagcccatggcaggcaggtgacagtccaggaattcgctcttttctttaccatctttgatgagaccaagtcctggtacttcacggaaaacatggagcgcaattgcagagccccctgtaacatacagatggaggaccctacctttaaggaaaattatcggttccacgcaatcaacggatacattatggatacactccctggccttgtgatggctcaggaccaacgaatcaggtggtacctcctcagcatgggttctaatgagaacatacactccattcacttttcaggacatgtgttcactgtccggaagaaagaagagtataagatggccctctacaatttgtatccaggcgtgtttgagaccgttgaaatgcttccctctaaagctggcatctggagagtagagtgcttgatcggagaacatcttcacgcaggtatgagcaccttgttcctcgtgtacagcaacaaatgtcagaatccacttggcatggccagtggacacattcgcgactttcagatcacagcatctggccagtatggacaatgggccccaaagttggctcgcctccattactccggtagcataaatgcgtggtccactaaagaacctttcagctggattaaggtcgatcttcttgcccccatgatcatccacggcattaagacacagggagcgaggcagaaattctcctccctctacatctcacagttcattattatgtatagtttggacggcaagaagtggcaaacttatagaggtaacagtactggaacagacatggtgttcttcggcaacgttgatagctctggcatcaaacacaacatctttaatcctcccataatagctcggtacatcagattgcatccgacccactacagcattaggagtacactccgaatggagcttatgggttgcgacttgaattcctgttcaatgccactcggaatggagtctaaagccatctctgatgcacagataaccgccagtagctactttacgaacatgtttgctacgtggtcaccctctaaggcaaggcttcatttgcaaggccggtctaatgcctggagacctcaggtgaacaacccgaaagaatggctccaggtggactttcagaagaccatgaaagtaacaggtgtcactactcagggagttaagtccttggatactagcatgtatgtgaaggagttccttatttcctcatcacaagatggccaccagtggaccctcttctttcagaatggtaaggtcaaagtgtttcagggcaatcaagacagcttcacacccgtggtgaacagtcttgatcctccactcttgacacgataccttcgaatccatccacagtcttgggagcaccagattgcattgcgcatggaagtacttggatgcgaggctcaggacctctac

SEQ ID NO: 1690 - protein, 1457 aa, synthetic construct
  REGION 1..1457: note = Variant of human B-domain deleted Factor VIII
MQIELSTCFFLCLLRFCFSATRRYYLGAVELSWDYMQSDLGELPVDARFPPRVPKSFPFNTSQVYKKTLFVEFTDHLFNIAKPRPPWMGLLGPTIQAEVYDTVVITLKNMASHPVSLHAVGVSYWKASEGAEYDDQTSQREKEDDKVFPGGSHTYVWQVLKENGPMASDPPCLTYSYLSHVDLVKDLNSGLIGALLVCREGSLAKEKTQTLAKFILLFAVFDEGKSWHSETKNSLMQDRDAASARAWPKMHTVNGYVNRTLPGLIGCHRKSVYWHVIGMGTTPEVHSIFLEGHTFLVRNHRQASLGISPITFLTAQTLLRDLGQFLLFCHIPSHQHDGMEAYVKVDSCPEEPQLRMKNNEEAEDYDDDLTDSEMDVVRFDDDNSPSIIQARSGAKKHPKTWVHYIAAEEEDWDYAPLVLAPDDRSYKSQYLNNGPQRIGRKYKKVRFMAYTDETFKTREAIQHESGILGPLLYGEVGDTLLIIFKNQASRPYNIYPHGITDVRPLYSRRLPKGVKHLKDFPILPGEIFKYKWTIGVEDGPTKSDPRCLTRYYSSFVNWERDLASGLIGPLLICYKESVDQRGNQIMSDKRNVILFSVFDENRSWYLTENIQRFLPNPAGVQLEDPEFQASNIMHSINGYVFDSLQLSVCLHEVAYWYILSIGAQTDFLSVFFSGYTFKHKGVYEDTLTLFPFSGETVFMSMENPGLWILGCHNSDFRNRGMTALLKVSSCDWNTGDYYEDSYEDISAYFDSKNNAIEPRSFSQNPPVLKRHQREGTRTTLQSDQEEIDYDDTISVEMKKEDFDIYDEDENQSPRSFQKKTRHYFIAAVERLWDYGMSSSPHVLRNRAQSGSVPQFKKVVFQEFTDGSFTQPLYRGELNEHLGLLGPYIRAEVEDNIMVTFRNQASRPYSFYSSLISYEEDQRQGAEPRKNFVKPNETKTYFWKVQHHMAPTKDEFDCKAWAYFSDVDLEKDVHSGLIGPLLVCHTNTLNPAHGRQVTVQEFALFFTIFDETKSWYFTENMERNCRAPCNIQMEDPTFKENYRFHAINGYIMDTLPGLVMAQDQRIRWYLLSMGSNENIHSIHFSGHVFTVRKKEEYKMALYNLYPGVFETVEMLPSKAGIWRVECLIGEHLHAGMSTLFLVYSNKCQNPLGMASGHIRDFQITASGQYGQWAPKLARLHYSGSINAWSTKEPFSWIKVDLLAPMIIHGIKTQGARQKFSSLYISQFIIMYSLDGKKWQTYRGNSTGTDMVFFGNVDSSGIKHNIFNPPIIARYIRLHPTHYSIRSTLRMELMGCDLNSCSMPLGMESKAISDAQITASSYFTNMFATWSPSKARLHLQGRSNAWRPQVNNPKEWLQVDFQKTMKVTGVTTQGVKSLDTSMYVKEFLISSSQDGHQWTLFFQNGKVKVFQGNQDSFTPVVNSLDPPLLTRYLRIHPQSWEHQIALRMEVLGCEAQDLY

SEQ ID NO: 1691 - DNA, 4371 bp, synthetic construct
  misc_feature 1..4371: note = Variant of human B-domain deleted Factor VIII
  source 1..4371: mol_type = other DNA
atgcagattgaactgtctacctgcttcttcctctgtttgctgaggttctgctttagcgccactagacggtactaccttggcgctgtggagctgtcctgggactatatgcagagtgatttgggagagcttcccgtcgacgcacgatttcctcctcgcgttccaaagtcatttccctttaacacaagccaggtgtacaagaagacgctcttcgtcgaattcaccgatcacctgttcaatatcgccaaacccagaccaccatggatgggtcttttggggcctaccatacaagcggaggtgtatgacacagttgttatcactctcaagaacatggcttctcatccggtaagtcttcacgcagtgggcgtgtcctactggaaagcttcagaaggagccgagtatgatgatcagacatcccagagggagaaagaagacgacaaggtatttccaggtgggtctcatacctatgtgtggcaagtgctcaaagagaatggccctatggcaagcgatccgccgtgtttgacttacagctacctttcacacgttgacctcgtcaaggacctcaactccgggttgattggagccttgttggtatgcagggaaggatctcttgccaaagagaagacacagaccctggccaagtttatccttctctttgctgtgttcgatgagggcaaaagttggcatagcgaaacgaagaattccctcatgcaggatcgcgacgcagccagcgccagagcttggcccaagatgcacactgtgaacggatatgtcaataggacgcttcctggcttgattgggtgtcatcggaaaagtgtctactggcacgtgatcggaatggggacaacaccagaggtccactccatatttctcgaaggccataccttccttgttcgaaaccacagacaggcatccttggggatctctcccattacctttctcactgcccaaacgctccttcgtgacttgggtcagttccttctcttttgccatatcccgtcacaccagcatgatggtatggaagcttatgtgaaagtcgacagttgtcctgaggagccacagttgcgcatgaagaataatgaagaagccgaggattacgacgacgatctcaccgattctgagatggacgtggtgaggtttgatgacgacaactctccctccatcattcaagctcggagcggggcgaagaaacaccccaagacttgggtccactatatagcggcggaagaggaggattgggattacgctcctcttgtattggcaccagatgaccgctcatacaaaagccagtacctcaacaacggaccgcagagaattggccggaagtataagaaagtgcgatttatggcctatacagacgaaacctttaagacaagggaggccatccagcatgagagtgggattttgggacctcttctttacggcgaagttggtgataccctcctcatcatcttcaagaatcaagcttctcgcccctataacatttacccacacgggatcactgacgttaggcctttgtatagcagaagacttcccaaaggcgtgaagcatctcaaagacttccccattttgccaggcgagatctttaagtacaaatggaccattacagtggaagatggaccgactaaatcagaccctcgatgccttacgcggtactattcctccttcgtgaattgggagagagatttggcaagcggactcataggaccactcctcatctgttacaaggaatctgtagaccagaggggtaaccagattatgagtgataaacgcaatgtgatcctttttagcgtcttcgacgagaaccggtcctggtacttgaccgagaatatacaaaggttccttcccaaccccgcaggcgttcagttggaagaccctgagtttcaggccagcaatattatgcactcaatcaacggctatgtgtttgatagtctccagctttctgtttgcctccatgaagtagcctattggtacatcttgtcaattggtgctcaaacagacttcctctccgtcttcttctccggctacacctttaagcacaagggcgtgtatgaggacactctcacactctttccattttctggagaaaccgtgttcatgagcatggagaatccaggcctttggatcttgggttgccacaacagtgattttcgcaatcggggaatgactgctctcctcaaagtcagcagctgtgattggaacacaggcgactattacgaagattcttacgaggacataagtgcctactttgactccaagaataacgccattgagcccagatcattctcccagaatcctcccgtgcttaaaaggcatcagcgcgaaggtaccagaactactcttcagtctgatcaagaggagattgactatgacgacaccattagcgtggaaatgaagaaggaggatttcgatatctatgaggaagatgagaaccagtctccgcggagctttcagaagaagacgcgacactacttcattgcagcagtcgaaaggctttgggactacggtatgtcatcatcccctcatgtgttgcgcaatagagctcagagtggaagtgttccacagttcaagaaagtcgtctttcaagagtttacagatggcagcttcacacagcctctctatcggggcgagcttaacgaacatttgggactccttggtccctatatccgagccgaagtggaggacaacattatggttacctttaggaatcaagcctctcgcccctacagcttctactcctccctcatcagttatgaggaggatcagagacaaggcgctgaaccacggaagaactttgtgaaaccgaatgagacgaagacctacttctggaaagtacagcaccacatggcccccacaaaagacgaattcgattgcaaagcatgggcgtatttttcagacgttgacttggagaaagatgtacattcaggacttattggtcctttgttggtgtgtcacactaacactctcaatccagcccatggcaggcaggtgacagtccaggaattcgctcttttctttaccatctttgatgagaccaagtcctggtacttcacggaaaacatggagcgcaattgcagagccccctgtaacatacagatggaggaccctacctttaaggaaaattatcggttccacgcaatcaacggatacattatggatacactccctggccttgtgatggctcaggaccaacgaatcaggtggtacctcctcagcatgggttctaatgagaacatacactccattcacttttcaggacatgtgttcactgtccggaagaaagaagagtataagatggccctctacaatttgtatccaggcgtgtttgagaccgttgaaatgcttccctctaaagctggcatctggagagtagagtgcttgatcggagaacatcttcacgcaggtatgagcaccttgttcctcgtgtacagcaacaaatgtcagaatccacttggcatggccagtggacacattcgcgactttcagatcacagcatctggccagtatggacaatgggccccaaagttggctcgcctccattactccggtagcataaatgcgtggtccactaaagaacctttcagctggattaaggtcgatcttcttgcccccatgatcatccacggcattaagacacagggagcgaggcagaaattctcctccctctacatctcacagttcattattatgtatagtttggacggcaagaagtggcaaacttatagaggtaacagtactggaacagacatggtgttcttcggcaacgttgatagctctggcatcaaacacaacatctttaatcctcccataatagctcggtacatcagattgcatccgacccactacagcattaggagtacactccgaatggagcttatgggttgcgacttgaattcctgttcaatgccactcggaatggagtctaaagccatctctgatgcacagataaccgccagtagctactttacgaacatgtttgctacgtggtcaccctctaaggcaaggcttcatttgcaaggccggtctaatgcctggagacctcaggtgaacaacccgaaagaatggctccaggtggactttcagaagaccatgaaagtaacaggtgtcactactcagggagttaagtccttggatactagcatgtatgtgaaggagttccttatttcctcatcacaagatggccaccagtggaccctcttctttcagaatggtaaggtcaaagtgtttcagggcaatcaagacagcttcacacccgtggtgaacagtcttgatcctccactcttgacacgataccttcgaatccatccacagtcttgggagcaccagattgcattgcgcatggaagtacttggatgcgaggctcaggacctctac

SEQ ID NO: 1692 - protein, 1457 aa, synthetic construct
  REGION 1..1457: note = Variant of human B-domain deleted Factor VIII
MQIELSTCFFLCLLRFCFSATRRYYLGAVELSWDYMQSDLGELPVDARFPPRVPKSFPFNTSQVYKKTLFVEFTDHLFNIAKPRPPWMGLLGPTIQAEVYDTVVITLKNMASHPVSLHAVGVSYWKASEGAEYDDQTSQREKEDDKVFPGGSHTYVWQVLKENGPMASDPPCLTYSYLSHVDLVKDLNSGLIGALLVCREGSLAKEKTQTLAKFILLFAVFDEGKSWHSETKNSLMQDRDAASARAWPKMHTVNGYVNRTLPGLIGCHRKSVYWHVIGMGTTPEVHSIFLEGHTFLVRNHRQASLGISPITFLTAQTLLRDLGQFLLFCHIPSHQHDGMEAYVKVDSCPEEPQLRMKNNEEAEDYDDDLTDSEMDVVRFDDDNSPSIIQARSGAKKHPKTWVHYIAAEEEDWDYAPLVLAPDDRSYKSQYLNNGPQRIGRKYKKVRFMAYTDETFKTREAIQHESGILGPLLYGEVGDTLLIIFKNQASRPYNIYPHGITDVRPLYSRRLPKGVKHLKDFPILPGEIFKYKWTITVEDGPTKSDPRCLTRYYSSFVNWERDLASGLIGPLLICYKESVDQRGNQIMSDKRNVILFSVFDENRSWYLTENIQRFLPNPAGVQLEDPEFQASNIMHSINGYVFDSLQLSVCLHEVAYWYILSIGAQTDFLSVFFSGYTFKHKGVYEDTLTLFPFSGETVFMSMENPGLWILGCHNSDFRNRGMTALLKVSSCDWNTGDYYEDSYEDISAYFDSKNNAIEPRSFSQNPPVLKRHQREGTRTTLQSDQEEIDYDDTISVEMKKEDFDIYEEDENQSPRSFQKKTRHYFIAAVERLWDYGMSSSPHVLRNRAQSGSVPQFKKVVFQEFTDGSFTQPLYRGELNEHLGLLGPYIRAEVEDNIMVTFRNQASRPYSFYSSLISYEEDQRQGAEPRKNFVKPNETKTYFWKVQHHMAPTKDEFDCKAWAYFSDVDLEKDVHSGLIGPLLVCHTNTLNPAHGRQVTVQEFALFFTIFDETKSWYFTENMERNCRAPCNIQMEDPTFKENYRFHAINGYIMDTLPGLVMAQDQRIRWYLLSMGSNENIHSIHFSGHVFTVRKKEEYKMALYNLYPGVFETVEMLPSKAGIWRVECLIGEHLHAGMSTLFLVYSNKCQNPLGMASGHIRDFQITASGQYGQWAPKLARLHYSGSINAWSTKEPFSWIKVDLLAPMIIHGIKTQGARQKFSSLYISQFIIMYSLDGKKWQTYRGNSTGTDMVFFGNVDSSGIKHNIFNPPIIARYIRLHPTHYSIRSTLRMELMGCDLNSCSMPLGMESKAISDAQITASSYFTNMFATWSPSKARLHLQGRSNAWRPQVNNPKEWLQVDFQKTMKVTGVTTQGVKSLDTSMYVKEFLISSSQDGHQWTLFFQNGKVKVFQGNQDSFTPVVNSLDPPLLTRYLRIHPQSWEHQIALRMEVLGCEAQDLY

SEQ ID NO: 1693 - DNA, 4371 bp, synthetic construct
  misc_feature 1..4371: note = Variant of human B-domain deleted Factor VIII
  source 1..4371: mol_type = other DNA
atgcagattgaactgtctacctgcttcttcctctgtttgctgaggttctgctttagcgccactagacggtactaccttggcgctgtggagctgtcctgggactatatgcagagtgatttgggagagcttcccgtcgacgcacgatttcctcctcgcgttccaaagtcatttccctttaacacaagccaggtgtacaagaagacgctcttcgtcgaattcaccgatcacctgttcaatatcgccaaacccagaccaccatggatgggtcttttggggcctaccatacaagcggaggtgtatgacacagttgttatcactctcaagaacatggcttctcatccggtaagtcttcacgcagtgggcgtgtcctactggaaagcttcagaaggagccgagtatgatgatcagacatcccagagggagaaagaagacgacaaggtatttccaggtgggtctcatacctatgtgtggcaagtgctcaaagagaatggccctatggcaagcgatccgccgtgtttgacttacagctacctttcacacgttgacctcgtcaaggacctcaactccgggttgattggagccttgttggtatgcagggaaggatctcttgccaaagagaagacacagaccctggccaagtttatccttctctttgctgtgttcgatgagggcaaaagttggcatagcgaaacgaagaattccctcatgcaggatcgcgacgcagccagcgccagagcttggcccaagatgcacactgtgaacggatatgtcaataggacgcttcctggcttgattgggtgtcatcggaaaagtgtctactggcacgtgatcggaatggggacaacaccagaggtccactccatatttctcgaaggccataccttccttgttcgaaaccacagacaggcatccttggggatctctcccattacctttctcactgcccaaacgctccttcgtgacttgggtcagttccttctcttttgccatatcccgtcacaccagcatgatggtatggaagcttatgtgaaagtcgacagttgtcctgaggagccacagttgcgcatgaagaataatgaagaagccgaggattacgacgacgatctcaccgattctgagatggacgtggtgaggtttgatgacgacaactctccctccatcattcaagctcggagcggggcgaagaaacaccccaagacttgggtccactatatagcggcggaagaggaggattgggattacgctcctcttgtattggcaccagatgaccgctcatacaaaagccagtacctcaacaacggaccgcagagaattggccggaagtataagaaagtgcgatttatggcctatacagacgaaacctttaagacaagggaggccatccagcatgagagtgggattttgggacctcttctttacggcgaagttggtgataccctcctcatcatcttcaagaatcaagcttctcgcccctataacatttacccacacgggatcactgacgttaggcctttgtatagcagaagacttcccaaaggcgtgaagcatctcaaagacttccccattttgccaggcgagatctttaagtacaaatggaccattacagtggaagatggaccgactaaatcagaccctcgatgccttacgcggtactattcctccttcgtgaattgggagagagatttggcaagcggactcataggaccactcctcatctgttacaaggaatctgtagaccagaggggtaaccagattatgagtgataaacgcaatgtgatcctttttagcgtcttcgacgagaaccggtcctggtacttgaccgagaatatacaaaggttccttcccaaccccgcaggcgttcagttggaagaccctgagtttcaggccagcaatattatgcactcaatcaacggctatgtgtttgatagtctccagctttctgtttgcctccatgaagtagcctattggtacatcttgtcaattggtgctcaaacagacttcctctccgtcttcttctccggctacacctttaagcacaagggcgtgtatgaggacactctcacactctttccattttctggagaaaccgtgttcatgagcatggagaatccaggcctttggatcttgggttgccacaacagtgattttcgcaatcggggaatgactgctctcctcaaagtcagcagctgtgattggaacacaggcgactattacgaagattcttacgaggacataagtgcctactttgactccaagaataacgccggggagcccagatcattctcccagaatcctcccgtgcttaaaaggcatcagcgcgaaggtaccagaactactcttcagtctgatcaagaggagattgactatgacgacaccattagcgtggaaatgaagaaggaggatttcgatatctatgacgaagatgagaaccagtctccgcggagctttcagaagaagacgcgacactacttcattgcagcagtcgaaaggctttgggactacggtatgtcatcatcccctcatgtgttgcgcaatagagctcagagtggaagtgttccacagttcaagaaagtcgtctttcaagagtttacagatggcagcttcacacagcctctctatcggggcgagcttaacgaacatttgggactccttggtccctatatccgagccgaagtggaggacaacattatggttacctttaggaatcaagcctctcgcccctacagcttctactcctccctcatcagttatgaggaggatcagagacaaggcgctgaaccacggaagaactttgtgaaaccgaatgagacgaagacctacttctggaaagtacagcaccacatggcccccacaaaagacgaattcgattgcaaagcatgggcgtatttttcagacgttgacttggagaaagatgtacattcaggacttattggtcctttgttggtgtgtcacactaacactctcaatccagcccatggcaggcaggtgacagtccaggaattcgctcttttctttaccatctttgatgagaccaagtcctggtacttcacggaaaacatggagcgcaattgcagagccccctgtaacatacagatggaggaccctacctttaaggaaaattatcggttccacgcaatcaacggatacattatggatacactccctggccttgtgatggctcaggaccaacgaatcaggtggtacctcctcagcatgggttctaatgagaacatacactccattcacttttcaggacatgtgttcactgtccggaagaaagaagagtataagatggccctctacaatttgtatccaggcgtgtttgagaccgttgaaatgcttccctctaaagctggcatctggagagtagagtgcttgatcggagaacatcttcacgcaggtatgagcaccttgttcctcgtgtacagcaacaaatgtcagaatccacttggcatggccagtggacacattcgcgactttcagatcacagcatctggccagtatggacaatgggccccaaagttggctcgcctccattactccggtagcataaatgcgtggtccactaaagaacctttcagctggattaaggtcgatcttcttgcccccatgatcatccacggcattaagacacagggagcgaggcagaaattctcctccctctacatctcacagttcattattatgtatagtttggacggcaagaagtggcaaacttatagaggtaacagtactggaacagacatggtgttcttcggcaacgttgatagctctggcatcaaacacaacatctttaatcctcccataatagctcggtacatcagattgcatccgacccactacagcattaggagtacactccgaatggagcttatgggttgcgacttgaattcctgttcaatgccactcggaatggagtctaaagccatctctgatgcacagataaccgccagtagctactttacgaacatgtttgctacgtggtcaccctctaaggcaaggcttcatttgcaaggccggtctaatgcctggagacctcaggtgaacaacccgaaagaatggctccaggtggactttcagaagaccatgaaagtaacaggtgtcactactcagggagttaagtccttggatactagcatgtatgtgaaggagttccttatttcctcatcacaagatggccaccagtggaccctcttctttcagaatggtaaggtcaaagtgtttcagggcaatcaagacagcttcacacccgtggtgaacagtcttgatcctccactcttgacacgataccttcgaatccatccacagtcttgggagcaccagattgcattgcgcatggaagtacttggatgcgaggctcaggacctctac

SEQ ID NO: 1694 - protein, 1457 aa, synthetic construct
  REGION 1..1457: note = Variant of human B-domain deleted Factor VIII
MQIELSTCFFLCLLRFCFSATRRYYLGAVELSWDYMQSDLGELPVDARFPPRVPKSFPFNTSQVYKKTLFVEFTDHLFNIAKPRPPWMGLLGPTIQAEVYDTVVITLKNMASHPVSLHAVGVSYWKASEGAEYDDQTSQREKEDDKVFPGGSHTYVWQVLKENGPMASDPPCLTYSYLSHVDLVKDLNSGLIGALLVCREGSLAKEKTQTLAKFILLFAVFDEGKSWHSETKNSLMQDRDAASARAWPKMHTVNGYVNRTLPGLIGCHRKSVYWHVIGMGTTPEVHSIFLEGHTFLVRNHRQASLGISPITFLTAQTLLRDLGQFLLFCHIPSHQHDGMEAYVKVDSCPEEPQLRMKNNEEAEDYDDDLTDSEMDVVRFDDDNSPSIIQARSGAKKHPKTWVHYIAAEEEDWDYAPLVLAPDDRSYKSQYLNNGPQRIGRKYKKVRFMAYTDETFKTREAIQHESGILGPLLYGEVGDTLLIIFKNQASRPYNIYPHGITDVRPLYSRRLPKGVKHLKDFPILPGEIFKYKWTITVEDGPTKSDPRCLTRYYSSFVNWERDLASGLIGPLLICYKESVDQRGNQIMSDKRNVILFSVFDENRSWYLTENIQRFLPNPAGVQLEDPEFQASNIMHSINGYVFDSLQLSVCLHEVAYWYILSIGAQTDFLSVFFSGYTFKHKGVYEDTLTLFPFSGETVFMSMENPGLWILGCHNSDFRNRGMTALLKVSSCDWNTGDYYEDSYEDISAYFDSKNNAGEPRSFSQNPPVLKRHQREGTRTTLQSDQEEIDYDDTISVEMKKEDFDIYDEDENQSPRSFQKKTRHYFIAAVERLWDYGMSSSPHVLRNRAQSGSVPQFKKVVFQEFTDGSFTQPLYRGELNEHLGLLGPYIRAEVEDNIMVTFRNQASRPYSFYSSLISYEEDQRQGAEPRKNFVKPNETKTYFWKVQHHMAPTKDEFDCKAWAYFSDVDLEKDVHSGLIGPLLVCHTNTLNPAHGRQVTVQEFALFFTIFDETKSWYFTENMERNCRAPCNIQMEDPTFKENYRFHAINGYIMDTLPGLVMAQDQRIRWYLLSMGSNENIHSIHFSGHVFTVRKKEEYKMALYNLYPGVFETVEMLPSKAGIWRVECLIGEHLHAGMSTLFLVYSNKCQNPLGMASGHIRDFQITASGQYGQWAPKLARLHYSGSINAWSTKEPFSWIKVDLLAPMIIHGIKTQGARQKFSSLYISQFIIMYSLDGKKWQTYRGNSTGTDMVFFGNVDSSGIKHNIFNPPIIARYIRLHPTHYSIRSTLRMELMGCDLNSCSMPLGMESKAISDAQITASSYFTNMFATWSPSKARLHLQGRSNAWRPQVNNPKEWLQVDFQKTMKVTGVTTQGVKSLDTSMYVKEFLISSSQDGHQWTLFFQNGKVKVFQGNQDSFTPVVNSLDPPLLTRYLRIHPQSWEHQIALRMEVLGCEAQDLY

SEQ ID NO: 1695 - DNA, 4371 bp, synthetic construct
  misc_feature 1..4371: note = Variant of human B-domain deleted Factor VIII
  source 1..4371: mol_type = other DNA
atgcagattgaactgtctacctgcttcttcctctgtttgctgaggttctgctttagcgccactagacggtactaccttggcgctgtggagctgtcctgggactatatgcagagtgatttgggagagcttcccgtcgacgcacgatttcctcctcgcgttccaaagtcatttccctttaacacaagccaggtgtacaagaagacgctcttcgtcgaattcaccgatcacctgttcaatatcgccaaacccagaccaccatggatgggtcttttggggcctaccatacaagcggaggtgtatgacacagttgttatcactctcaagaacatggcttctcatccggtaagtcttcacgcagtgggcgtgtcctactggaaagcttcagaaggagccgagtatgatgatcagacatcccagagggagaaagaagacgacaaggtatttccaggtgggtctcatacctatgtgtggcaagtgctcaaagagaatggccctatggcaagcgatccgccgtgtttgacttacagctacctttcacacgttgacctcgtcaaggacctcaactccgggttgattggagccttgttggtatgcagggaaggatctcttgccaaagagaagacacagaccctggccaagtttatccttctctttgctgtgttcgatgagggcaaaagttggcatagcgaaacgaagaattccctcatgcaggatcgcgacgcagccagcgccagagcttggcccaagatgcacactgtgaacggatatgtcaataggacgcttcctggcttgattgggtgtcatcggaaaagtgtctactggcacgtgatcggaatggggacaacaccagaggtccactccatatttctcgaaggccataccttccttgttcgaaaccacagacaggcatccttggggatctctcccattacctttctcactgcccaaacgctccttcgtgacttgggtcagttccttctcttttgccatatcccgtcacaccagcatgatggtatggaagcttatgtgaaagtcgacagttgtcctgaggagccacagttgcgcatgaagaataatgaagaagccgaggattacgacgacgatctcaccgattctgagatggacgtggtgaggtttgatgacgacaactctccctccatcattcaagctcggagcggggcgaagaaacaccccaagacttgggtccactatatagcggcggaagaggaggattgggattacgctcctcttgtattggcaccagatgaccgctcatacaaaagccagtacctcaacaacggaccgcagagaattggccggaagtataagaaagtgcgatttatggcctatacagacgaaacctttaagacaagggaggccatccagcatgagagtgggattttgggacctcttctttacggcgaagttggtgataccctcctcatcatcttcaagaatcaagcttctcgcccctataacatttacccacacgggatcactgacgttaggcctttgtatagcagaagacttcccaaaggcgtgaagcatctcaaagacttccccattttgccaggcgagatctttaagtacaaatggaccattacagtggaagatggaccgactaaatcagaccctcgatgccttacgcggtactattcctccttcgtgaattgggagagagatttggcaagcggactcataggaccactcctcatctgttacaaggaatctgtagaccagaggggtaaccagattatgagtgataaacgcaatgtgatcctttttagcgtcttcgacgagaaccggtcctggtacttgaccgagaatatacaaaggttccttcccaaccccgcaggcgttcagttggaagaccctgagtttcaggccagcaatattatgcactcaatcaacggctatgtgtttgatagtctccagctttctgtttgcctccatgaagtagcctattggtacatcttgtcaattggtgctcaaacagacttcctctccgtcttcttctccggctacacctttaagcacaagggcgtgtatgaggacactctcacactctttccattttctggagaaaccgtgttcatgagcatggagaatccaggcctttggatcttgggttgccacaacagtgattttcgcaatcggggaatgactgctctcctcaaagtcagcagctgtgattggaacacaggcgactattacgaagattcttacgaggacataagtgcctactttgactccaagaataacgccattgagcccagatcattctcccagaatcctcccgtgcttaaaaggcatcagcgcgaaggtaccagaactactcttcagtctgatcaagaggagattgactatgacgacaccattagcgtggaaatgaagaaggaggatttcgatatctatgacgaagatgagaaccagtctccgcggagctttcagaagaagacgcgacactacttcattgcagcagtcgaaaggctttgggactacggtatgtcatcatcccctcatgtgttgcgcaatagagctcagagtggaagtgttccacagttcaagaaagtcgtctttcaagagtttacagatggcagcttcacacagcctctctatcggggcgagcttaacgaacatttgggactccttggtccctatatccgagccgaagtggaggacaacattatggttacctttaggaatcaagcctctcgcccctacagcttctactcctccctcatcagttatgaggaggatcagagacaaggcgctgaaccacggaagaactttgtgaaaccgaatgagacgaagacctacttctggaaagtacagcaccacatggcccccacaaaagacgaattcgattgcaaagcatgggcgtatttttcagacgttgacttggagaaagatgtacattcaggacttattggtcctttgttggtgtgtcacactaacactctcaatccagcccatggcaggcaggtgacagtccaggaattcgctcttttctttaccatctttgatgagaccaagtcctggtacttcacggaaaacatggagcgcaattgcagagccccctgtaacatacagatggaggaccctacctttaaggaaaattatcggttccacgcaatcaacggatacattatggatacactccctggccttgtgatggctcaggaccaacgaatcaggtggtacctcctcagcatgggttctaatgagaacatacactccattcacttttcaggacatgtgttcactgtccggaagaaagaagagtataagatggccctctacaatttgtatccaggcgtgagtgagaccgttgaaatgcttccctctaaagctggcatctggagagtagagtgcttgatcggagaacatcttcacgcaggtatgagcaccttgttcctcgtgtacagcaacaaatgtcagaatccacttggcatggccagtggacacattcgcgactttcagatcacagcatctggccagtatggacaatgggccccaaagttggctcgcctccattactccggtagcataaatgcgtggtccactaaagaacctttcagctggattaaggtcgatcttcttgcccccatgatcatccacggcattaagacacagggagcgaggcagaaattctcctccctctacatctcacagttcattattatgtatagtttggacggcaagaagtggcaaacttatagaggtaacagtactggaacagacatggtgttcttcggcaacgttgatagctctggcatcaaacacaacatctttaatcctcccataatagctcggtacatcagattgcatccgacccactacagcattaggagtacactccgaatggagcttatgggttgcgacttgaattcctgttcaatgccactcggaatggagtctaaagccatctctgatgcacagataaccgccagtagctactttacgaacatgtttgctacgtggtcaccctctaaggcaaggcttcatttgcaaggccggtctaatgcctggagacctcaggtgaacaacccgaaagaatggctccaggtggactttcagaagaccatgaaagtaacaggtgtcactactcagggagttaagtccttggatactagcatgtatgtgaaggagttccttatttcctcatcacaagatggccaccagtggaccctcttctttcagaatggtaaggtcaaagtgtttcagggcaatcaagacagcttcacacccgtggtgaacagtcttgatcctccactcttgacacgataccttcgaatccatccacagtcttgggagcaccagattgcattgcgcatggaagtacttggatgcgaggctcaggacctctac

SEQ ID NO: 1696 - protein, 1457 aa, synthetic construct
  REGION 1..1457: note = Variant of human B-domain deleted Factor VIII
MQIELSTCFFLCLLRFCFSATRRYYLGAVELSWDYMQSDLGELPVDARFPPRVPKSFPFNTSQVYKKTLFVEFTDHLFNIAKPRPPWMGLLGPTIQAEVYDTVVITLKNMASHPVSLHAVGVSYWKASEGAEYDDQTSQREKEDDKVFPGGSHTYVWQVLKENGPMASDPPCLTYSYLSHVDLVKDLNSGLIGALLVCREGSLAKEKTQTLAKFILLFAVFDEGKSWHSETKNSLMQDRDAASARAWPKMHTVNGYVNRTLPGLIGCHRKSVYWHVIGMGTTPEVHSIFLEGHTFLVRNHRQASLGISPITFLTAQTLLRDLGQFLLFCHIPSHQHDGMEAYVKVDSCPEEPQLRMKNNEEAEDYDDDLTDSEMDVVRFDDDNSPSIIQARSGAKKHPKTWVHYIAAEEEDWDYAPLVLAPDDRSYKSQYLNNGPQRIGRKYKKVRFMAYTDETFKTREAIQHESGILGPLLYGEVGDTLLIIFKNQASRPYNIYPHGITDVRPLYSRRLPKGVKHLKDFPILPGEIFKYKWTITVEDGPTKSDPRCLTRYYSSFVNWERDLASGLIGPLLICYKESVDQRGNQIMSDKRNVILFSVFDENRSWYLTENIQRFLPNPAGVQLEDPEFQASNIMHSINGYVFDSLQLSVCLHEVAYWYILSIGAQTDFLSVFFSGYTFKHKGVYEDTLTLFPFSGETVFMSMENPGLWILGCHNSDFRNRGMTALLKVSSCDWNTGDYYEDSYEDISAYFDSKNNAIEPRSFSQNPPVLKRHQREGTRTTLQSDQEEIDYDDTISVEMKKEDFDIYDEDENQSPRSFQKKTRHYFIAAVERLWDYGMSSSPHVLRNRAQSGSVPQFKKVVFQEFTDGSFTQPLYRGELNEHLGLLGPYIRAEVEDNIMVTFRNQASRPYSFYSSLISYEEDQRQGAEPRKNFVKPNETKTYFWKVQHHMAPTKDEFDCKAWAYFSDVDLEKDVHSGLIGPLLVCHTNTLNPAHGRQVTVQEFALFFTIFDETKSWYFTENMERNCRAPCNIQMEDPTFKENYRFHAINGYIMDTLPGLVMAQDQRIRWYLLSMGSNENIHSIHFSGHVFTVRKKEEYKMALYNLYPGVSETVEMLPSKAGIWRVECLIGEHLHAGMSTLFLVYSNKCQNPLGMASGHIRDFQITASGQYGQWAPKLARLHYSGSINAWSTKEPFSWIKVDLLAPMIIHGIKTQGARQKFSSLYISQFIIMYSLDGKKWQTYRGNSTGTDMVFFGNVDSSGIKHNIFNPPIIARYIRLHPTHYSIRSTLRMELMGCDLNSCSMPLGMESKAISDAQITASSYFTNMFATWSPSKARLHLQGRSNAWRPQVNNPKEWLQVDFQKTMKVTGVTTQGVKSLDTSMYVKEFLISSSQDGHQWTLFFQNGKVKVFQGNQDSFTPVVNSLDPPLLTRYLRIHPQSWEHQIALRMEVLGCEAQDLY

SEQ ID NO: 1697 - DNA, 4371 bp, synthetic construct
  misc_feature 1..4371: note = Variant of human B-domain deleted Factor VIII
  source 1..4371: mol_type = other DNA
atgcagattgaactgtctacctgcttcttcctctgtttgctgaggttctgctttagcgccactagacggtactaccttggcgctgtggagctgtcctgggactatatgcagagtgatttgggagagcttcccgtcgacgcacgatttcctcctcgcgttccaaagtcatttccctttaacacaagccaggtgtacaagaagacgctcttcgtcgaattcaccgatcacctgttcaatatcgccaaacccagaccaccatggatgggtcttttggggcctaccatacaagcggaggtgtatgacacagttgttatcactctcaagaacatggcttctcatccggtaagtcttcacgcagtgggcgtgtcctactggaaagcttcagaaggagccgagtatgatgatcagacatcccagagggagaaagaagacgacaaggtatttccaggtgggtctcatacctatgtgtggcaagtgctcaaagagaatggccctatggcaagcgatccgccgtgtttgacttacagctacctttcacacgttgacctcgtcaaggacctcaactccgggttgattggagccttgttggtatgcagggaaggatctcttgccaaagagaagacacagaccctggccaagtttatccttctctttgctgtgttcgatgagggcaaaagttggcatagcgaaacgaagaattccctcatgcaggatcgcgacgcagccagcgccagagcttggcccaagatgcacactgtgaacggatatgtcaataggacgcttcctggcttgattgggtgtcatcggaaaagtgtctactggcacgtgatcggaatggggacaacaccagaggtccactccatatttctcgaaggccataccttccttgttcgaaaccacagacaggcatccttggggatctctcccattacctttctcactgcccaaacgctccttcgtgacttgggtcagttccttctcttttgccatatcccgtcacaccagcatgatggtatggaagcttatgtgaaagtcgacagttgtcctgaggagccacagttgcgcatgaagaataatgaagaagccgaggattacgacgacgatctcaccgattctgagatggacgtggtgaggtttgatgacgacaactctccctccatcattcaagctcggagcggggcgaagaaacaccccaagacttgggtccactatatagcggcggaagaggaggattgggattacgctcctcttgtattggcaccagatgaccgctcatacaaaagccagtacctcaacaacggaccgcagagaattggccggaagtataagaaagtgcgatttatggcctatacagacgaaacctttaagacaagggaggccatccagcatgagagtgggattttgggacctcttctttacggcgaagttggtgataccctcctcatcatcttcaagaatcaagcttctcgcccctataacatttacccacacgggatcactgacgttaggcctttgtatagcagaagacttcccaaaggcgtgaagcatctcaaagacttccccattttgccaggcgagatctttaagtacaaatggaccattacagtggaagatggaccgactaaatcagaccctcgatgccttacgcggtactattcctccttcgtgaattgggagagagatttggcaagcggactcataggaccactcctcatctgttacaaggaatctgtagaccagaggggtaaccagattatgagtgataaacgcaatgtgatcctttttagcgtcttcgacgagaaccggtcctggtacttgaccgagaatatacaaaggttccttcccaaccccgcaggcgttcagttggaagaccctgagtttcaggccagcaatattatgcactcaatcaacggctatgtgtttgatagtctccagctttctgtttgcctccatgaagtagcctattggtacatcttgtcaattggtgctcaaacagacttcctctccgtcttcttctccggctacacctttaagcacaagggcgtgtatgaggacactctcacactctttccattttctggagaaaccgtgttcatgagcatggagaatccaggcctttggatcttgggttgccacaacagtgattttcgcaatcggggaatgactgctctcctcaaagtcagcagctgtgattggaacacaggcgactattacgaagattcttacgaggacataagtgcctactttgactccaagaataacgccattgagcccagatcattctcccagaatcctcccgtgcttaaaaggcatcagcgcgaaggtaccagaactactcttcagtctgatcaagaggagattgactatgacgacaccattagcgtggaaatgaagaaggaggatttcgatatctatgacgaagatgagaaccagtctccgcggagctttcagaagaagacgcgacactacttcattgcagcagtcgaaaggctttgggactacggtatgtcatcatcccctcatgtgttgcgcaatagagctcagagtggaagtgttccacagttcaagaaagtcgtctttcaagagtttacagatggcagcttcacacagcctctctatcggggcgagcttaacgaacatttgggactccttggtccctatatccgagccgaagtggaggacaacattatggttacctttaggaatcaagcctctcgcccctacagcttctactcctccctcatcagttatgaggaggatcagagacaaggcgctgaaccacggaagaactttgtgaaaccgaatgagacgaagacctacttctggaaagtacagcaccacatggcccccacaaaagacgaattcgattgcaaagcatgggcgtatttttcagacgttgacttggagaaagatgtacattcaggacttattggtcctttgttggtgtgtcacactaacactctcaatccagcccatggcaggcaggtgacagtccaggaattcgctcttttctttaccatctttgatgagaccaagtcctggtacttcacggaaaacatggagcgcaattgcagagccccctgtaacatacagatggaggaccctacctttaaggaaaattatcggttccacgcaatcaacggatacattatggatacactccctggccttgtgatggctcaggaccaacgaatcaggtggtacctcctcagcatgggttctaatgagaacatacactccattcacttttcaggacatgtgttcactgtccggaaggtggaagagtataagatggccctctacaatttgtatccaggcgtgtttgagaccgttgaaatgcttccctctaaagctggcatctggagagtagagtgcttgatcggagaacatcttcacgcaggtatgagcaccttgttcctcgtgtacagcaacaaatgtcagaatccacttggcatggccagtggacacattcgcgactttcagatcacagcatctggccagtatggacaatgggccccaaagttggctcgcctccattactccggtagcataaatgcgtggtccactaaagaacctttcagctggattaaggtcgatcttcttgcccccatgatcatccacggcattaagacacagggagcgaggcagaaattctcctccctctacatctcacagttcattattatgtatagtttggacggcaagaagtggcaaacttatagaggtaacagtactggaacagacatggtgttcttcggcaacgttgatagctctggcatcaaacacaacatctttaatcctcccataatagctcggtacatcagattgcatccgacccactacagcattaggagtacactccgaatggagcttatgggttgcgacttgaattcctgttcaatgccactcggaatggagtctaaagccatctctgatgcacagataaccgccagtagctactttacgaacatgtttgctacgtggtcaccctctaaggcaaggcttcatttgcaaggccggtctaatgcctggagacctcaggtgaacaacccgaaagaatggctccaggtggactttcagaagaccatgaaagtaacaggtgtcactactcagggagttaagtccttggatactagcatgtatgtgaaggagttccttatttcctcatcacaagatggccaccagtggaccctcttctttcagaatggtaaggtcaaagtgtttcagggcaatcaagacagcttcacacccgtggtgaacagtcttgatcctccactcttgacacgataccttcgaatccatccacagtcttgggagcaccagattgcattgcgcatggaagtacttggatgcgaggctcaggacctctac

SEQ ID NO: 1698 - protein, 1457 aa, synthetic construct
  REGION 1..1457: note = Variant of human B-domain deleted Factor VIII
MQIELSTCFFLCLLRFCFSATRRYYLGAVELSWDYMQSDLGELPVDARFPPRVPKSFPFNTSQVYKKTLFVEFTDHLFNIAKPRPPWMGLLGPTIQAEVYDTVVITLKNMASHPVSLHAVGVSYWKASEGAEYDDQTSQREKEDDKVFPGGSHTYVWQVLKENGPMASDPPCLTYSYLSHVDLVKDLNSGLIGALLVCREGSLAKEKTQTLAKFILLFAVFDEGKSWHSETKNSLMQDRDAASARAWPKMHTVNGYVNRTLPGLIGCHRKSVYWHVIGMGTTPEVHSIFLEGHTFLVRNHRQASLGISPITFLTAQTLLRDLGQFLLFCHIPSHQHDGMEAYVKVDSCPEEPQLRMKNNEEAEDYDDDLTDSEMDVVRFDDDNSPSIIQARSGAKKHPKTWVHYIAAEEEDWDYAPLVLAPDDRSYKSQYLNNGPQRIGRKYKKVRFMAYTDETFKTREAIQHESGILGPLLYGEVGDTLLIIFKNQASRPYNIYPHGITDVRPLYSRRLPKGVKHLKDFPILPGEIFKYKWTITVEDGPTKSDPRCLTRYYSSFVNWERDLASGLIGPLLICYKESVDQRGNQIMSDKRNVILFSVFDENRSWYLTENIQRFLPNPAGVQLEDPEFQASNIMHSINGYVFDSLQLSVCLHEVAYWYILSIGAQTDFLSVFFSGYTFKHKGVYEDTLTLFPFSGETVFMSMENPGLWILGCHNSDFRNRGMTALLKVSSCDWNTGDYYEDSYEDISAYFDSKNNAIEPRSFSQNPPVLKRHQREGTRTTLQSDQEEIDYDDTISVEMKKEDFDIYDEDENQSPRSFQKKTRHYFIAAVERLWDYGMSSSPHVLRNRAQSGSVPQFKKVVFQEFTDGSFTQPLYRGELNEHLGLLGPYIRAEVEDNIMVTFRNQASRPYSFYSSLISYEEDQRQGAEPRKNFVKPNETKTYFWKVQHHMAPTKDEFDCKAWAYFSDVDLEKDVHSGLIGPLLVCHTNTLNPAHGRQVTVQEFALFFTIFDETKSWYFTENMERNCRAPCNIQMEDPTFKENYRFHAINGYIMDTLPGLVMAQDQRIRWYLLSMGSNENIHSIHFSGHVFTVRKVEEYKMALYNLYPGVFETVEMLPSKAGIWRVECLIGEHLHAGMSTLFLVYSNKCQNPLGMASGHIRDFQITASGQYGQWAPKLARLHYSGSINAWSTKEPFSWIKVDLLAPMIIHGIKTQGARQKFSSLYISQFIIMYSLDGKKWQTYRGNSTGTDMVFFGNVDSSGIKHNIFNPPIIARYIRLHPTHYSIRSTLRMELMGCDLNSCSMPLGMESKAISDAQITASSYFTNMFATWSPSKARLHLQGRSNAWRPQVNNPKEWLQVDFQKTMKVTGVTTQGVKSLDTSMYVKEFLISSSQDGHQWTLFFQNGKVKVFQGNQDSFTPVVNSLDPPLLTRYLRIHPQSWEHQIALRMEVLGCEAQDLY

SEQ ID NO: 1699 - DNA, 4371 bp, synthetic construct
  misc_feature 1..4371: note = Variant of human B-domain deleted Factor VIII
  source 1..4371: mol_type = other DNA
atgcagattgaactgtctacctgcttcttcctctgtttgctgaggttctgctttagcgccactagacggtactaccttggcgctgtggagctgtcctgggactatatgcagagtgatttgggagagcttcccgtcgacgcacgatttcctcctcgcgttccaaagtcatttccctttaacacaagccaggtgtacaagaagacgctcttcgtcgaattcaccgatcacctgttcaatatcgccaaacccagaccaccatggatgggtcttttggggcctaccatacaagcggaggtgtatgacacagttgttatcactctcaagaacatggcttctcatccggtaagtcttcacgcagtgggcgtgtcctactggaaagcttcagaaggagccgagtatgatgatcagacatcccagagggagaaagaagacgacaaggtatttccaggtgggtctcatacctatgtgtggcaagtgctcaaagagaatggccctatggcaagcgatccgccgtgtttgacttacagctacctttcacacgttgacctcgtcaaggacctcaactccgggttgattggagccttgttggtatgcagggaaggatctcttgccaaagagaagacacagaccctggccaagtttatccttctctttgctgtgttcgatgagggcaaaagttggcatagcgaaacgaagaattccctcatgcaggatcgcgacgcagccagcgccagagcttggcccaagatgcacactgtgaacggatatgtcaataggacgcttcctggcttgattgggtgtcatcggaaaagtgtctactggcacgtgatcggaatggggacaacaccagaggtccactccatatttctcgaaggccataccttccttgttcgaaaccacagacaggcatccttggggatctctcccattacctttctcactgcccaaacgctccttcgtgacttgggtcagttccttctcttttgccatatcccgtcacaccagcatgatggtatggaagcttatgtgaaagtcgacagttgtcctgaggagccacagttgcgcatgaagaataatgaagaagccgaggattacgacgacgatctcaccgattctgagatggacgtggtgaggtttgatgacgacaactctccctccatcattcaagctcggagcggggcgaagaaacaccccaagacttgggtccactatatagcggcggaagaggaggattgggattacgctcctcttgtattggcaccagatgaccgctcatacaaaagccagtacctcaacaacggaccgcagagaattggccggaagtataagaaagtgcgatttatggcctatacagacgaaacctttaagacaagggaggccatccagcatgagagtgggattttgggacctcttctttacggcgaagttggtgataccctcctcatcatcttcaagaatcaagcttctcgcccctataacatttacccacacgggatcactgacgttaggcctttgtatagcagaagacttcccaaaggcgtgaagcatctcaaagacttccccattttgccaggcgagatctttaagtacaaatggaccattacagtggaagatggaccgactaaatcagaccctcgatgccttacgcggtactattcctccttcgtgaattgggagagagatttggcaagcggactcataggaccactcctcatctgttacaaggaatctgtagaccagaggggtaaccagattatgagtgataaacgcaatgtgatcctttttagcgtcttcgacgagaaccggtcctggtacttgaccgagaatatacaaaggttccttcccaaccccgcaggcgttcagttggaagaccctgagtttcaggccagcaatattatgcactcaatcaacggctatgtgtttgatagtctccagctttctgtttgcctccatgaagtagcctattggtacatcttgtcaattggtgctcaaacagacttcctctccgtcttcttctccggctacacctttaagcacaagggcgtgtatgaggacactctcacactctttccattttctggagaaaccgtgttcatgagcatggagaatccaggcctttggatcttgggttgccacaacagtgattttcgcaatcggggaatgactgctctcctcaaagtcagcagctgtgattggaacacaggcgactattacgaagattcttacgaggacatacctgcctactttgactccaagaataacgccattgagcccagatcattctcccagaatcctcccgtgcttaaaaggcatcagcgcgaaggtaccagaactactcttcagtctgatcaagaggagattgactatgacgacaccattagcgtggaaatgaagaaggaggatttcgatatctatgacgaagatgagaaccagtctccgcggagctttcagaagaagacgcgacactacttcattgcagcagtcgaaaggctttgggactacggtatgtcatcatcccctcatgtgttgcgcaatagagctcagagtggaagtgttccacagttcaagaaagtcgtctttcaagagtttacagatggcagcttcacacagcctctctatcggggcgagcttaacgaacatttgggactccttggtccctatatccgagccgaagtggaggacaacattatggttacctttaggaatcaagcctctcgcccctacagcttctactcctccctcatcagttatgaggaggatcagagacaaggcgctgaaccacggaagaactttgtgaaaccgaatgagacgaagacctacttctggaaagtacagcaccacatggcccccacaaaagacgaattcgattgcaaagcatgggcgtatttttcagacgttgacttggagaaagatgtacattcaggacttattggtcctttgttggtgtgtcacactaacactctcaatccagcccatggcaggcaggtgacagtccaggaattcgctcttttctttaccatctttgatgagaccaagtcctggtacttcacggaaaacatggagcgcaattgcagagccccctgtaacatacagatggaggaccctacctttaaggaaaattatcggttccacgcaatcaacggatacattatggatacactccctggccttgtgatggctcaggaccaacgaatcaggtggtacctcctcagcatgggttctaatgagaacatacactccattcacttttcaggacatgtgttcactgtccggaagaaagaagagtataagatggccctctacaatttgtatccaggcgtgtttgagaccgttgaaatgcttccctctaaagctggcatctggagagtagagtgcttgatcggagaacatcttcacgcaggtatgagcaccttgttcctcgtgtacagcaacaaatgtcagaatccacttggcatggccagtggacacattcgcgactttcagatcacagcatctggccagtatggacaatgggccccaaagttggctcgcctccattactccggtagcataaatgcgtggtccactaaagaacctttcagctggattaaggtcgatcttcttgcccccatgatcatccacggcattaagacacagggagcgaggcagaaattctcctccctctacatctcacagttcattattatgtatagtttggacggcaagaagtggcaaacttatagaggtaacagtactggaacagacatggtgttcttcggcaacgttgatagctctggcatcaaacacaacatctttaatcctcccataatagctcggtacatcagattgcatccgacccactacagcattaggagtacactccgaatggagcttatgggttgcgacttgaattcctgttcaatgccactcggaatggagtctaaagccatctctgatgcacagataaccgccagtagctactttacgaacatgtttgctacgtggtcaccctctaaggcaaggcttcatttgcaaggccggtctaatgcctggagacctcaggtgaacaacccgaaagaatggctccaggtggactttcagaagaccatgaaagtaacaggtgtcactactcagggagttaagtccttggatactagcatgtatgtgaaggagttccttatttcctcatcacaagatggccaccagtggaccctcttctttcagaatggtaaggtcaaagtgtttcagggcaatcaagacagcttcacacccgtggtgaacagtcttgatcctccactcttgacacgataccttcgaatccatccacagtcttgggagcaccagattgcattgcgcatggaagtacttggatgcgaggctcaggacctctac

SEQ ID NO: 1700 - protein, 1457 aa, synthetic construct
  REGION 1..1457: note = Variant of human B-domain deleted Factor VIII
MQIELSTCFFLCLLRFCFSATRRYYLGAVELSWDYMQSDLGELPVDARFPPRVPKSFPFNTSQVYKKTLFVEFTDHLFNIAKPRPPWMGLLGPTIQAEVYDTVVITLKNMASHPVSLHAVGVSYWKASEGAEYDDQTSQREKEDDKVFPGGSHTYVWQVLKENGPMASDPPCLTYSYLSHVDLVKDLNSGLIGALLVCREGSLAKEKTQTLAKFILLFAVFDEGKSWHSETKNSLMQDRDAASARAWPKMHTVNGYVNRTLPGLIGCHRKSVYWHVIGMGTTPEVHSIFLEGHTFLVRNHRQASLGISPITFLTAQTLLRDLGQFLLFCHIPSHQHDGMEAYVKVDSCPEEPQLRMKNNEEAEDYDDDLTDSEMDVVRFDDDNSPSIIQARSGAKKHPKTWVHYIAAEEEDWDYAPLVLAPDDRSYKSQYLNNGPQRIGRKYKKVRFMAYTDETFKTREAIQHESGILGPLLYGEVGDTLLIIFKNQASRPYNIYPHGITDVRPLYSRRLPKGVKHLKDFPILPGEIFKYKWTITVEDGPTKSDPRCLTRYYSSFVNWERDLASGLIGPLLICYKESVDQRGNQIMSDKRNVILFSVFDENRSWYLTENIQRFLPNPAGVQLEDPEFQASNIMHSINGYVFDSLQLSVCLHEVAYWYILSIGAQTDFLSVFFSGYTFKHKGVYEDTLTLFPFSGETVFMSMENPGLWILGCHNSDFRNRGMTALLKVSSCDWNTGDYYEDSYEDIPAYFDSKNNAIEPRSFSQNPPVLKRHQREGTRTTLQSDQEEIDYDDTISVEMKKEDFDIYDEDENQSPRSFQKKTRHYFIAAVERLWDYGMSSSPHVLRNRAQSGSVPQFKKVVFQEFTDGSFTQPLYRGELNEHLGLLGPYIRAEVEDNIMVTFRNQASRPYSFYSSLISYEEDQRQGAEPRKNFVKPNETKTYFWKVQHHMAPTKDEFDCKAWAYFSDVDLEKDVHSGLIGPLLVCHTNTLNPAHGRQVTVQEFALFFTIFDETKSWYFTENMERNCRAPCNIQMEDPTFKENYRFHAINGYIMDTLPGLVMAQDQRIRWYLLSMGSNENIHSIHFSGHVFTVRKKEEYKMALYNLYPGVFETVEMLPSKAGIWRVECLIGEHLHAGMSTLFLVYSNKCQNPLGMASGHIRDFQITASGQYGQWAPKLARLHYSGSINAWSTKEPFSWIKVDLLAPMIIHGIKTQGARQKFSSLYISQFIIMYSLDGKKWQTYRGNSTGTDMVFFGNVDSSGIKHNIFNPPIIARYIRLHPTHYSIRSTLRMELMGCDLNSCSMPLGMESKAISDAQITASSYFTNMFATWSPSKARLHLQGRSNAWRPQVNNPKEWLQVDFQKTMKVTGVTTQGVKSLDTSMYVKEFLISSSQDGHQWTLFFQNGKVKVFQGNQDSFTPVVNSLDPPLLTRYLRIHPQSWEHQIALRMEVLGCEAQDLY

SEQ ID NO: 1701 - DNA, 4371 bp, synthetic construct
  misc_feature 1..4371: note = Variant of human B-domain deleted Factor VIII
  source 1..4371: mol_type = other DNA
atgcagattgaactgtctacctgcttcttcctctgtttgctgaggttctgctttagcgccactagacggtactaccttggcgctgtggagctgtcctgggactatatgcagagtgatttgggagagcttcccgtcgacgcacgatttcctcctcgcgttccaaagtcatttccctttaacacaagccaggtgtacaagaagacgctcttcgtcgaattcaccgatcacctgttcaatatcgccaaacccagaccaccatggatgggtcttttggggcctaccatacaagcggaggtgtatgacacagttgttatcactctcaagaacatggcttctcatccggtaagtcttcacgcagtgggcgtgtcctactggaaagcttcagaaggagccgagtatgatgatcagacatcccagagggagaaagaagacgacaaggtatttccaggtgggtctcatacctatgtgtggcaagtggagaaagagaatggccctatggcaagcgatccgccgtgtttgacttacagctacctttcacacgttgacctcgtcaaggacctcaactccgggttgattggagccttgttggtatgcagggaaggatctcttgccaaagagaagacacagaccctggccaagtttatccttctctttgctgtgttcgatgagggcaaaagttggcatagcgaaacgaagaattccctcatgcaggatcgcgacgcagccagcgccagagcttggcccaagatgcacactgtgaacggatatgtcaataggacgcttcctggcttgattgggtgtcatcggaaaagtgtctactggcacgtgatcggaatggggacaacaccagaggtccactccatatttctcgaaggccataccttccttgttcgaaaccacagacaggcatccttggggatctctcccattacctttctcactgcccaaacgctccttcgtgacttgggtcagttccttctcttttgccatatcccgtcacaccagcatgatggtatggaagcttatgtgaaagtcgacagttgtcctgaggagccacagttgcgcatgaagaataatgaagaagccgaggattacgacgacgatctcaccgattctgagatggacgtggtgaggtttgatgacgacaactctccctccatcattcaagctcggagcggggcgaagaaacaccccaagacttgggtccactatatagcggcggaagaggaggattgggattacgctcctcttgtattggcaccagatgaccgctcatacaaaagccagtacctcaacaacggaccgcagagaattggccggaagtataagaaagtgcgatttatggcctatacagacgaaacctttaagacaagggaggccatccagcatgagagtgggattttgggacctcttctttacggcgaagttggtgataccctcctcatcatcttcaagaatcaagcttctcgcccctataacatttacccacacgggatcactgacgttaggcctttgtatagcagaagacttcccaaaggcgtgaagcatctcaaagacttccccattttgccaggcgagatctttaagtacaaatggaccattacagtggaagatggaccgactaaatcagaccctcgatgccttacgcggtactattcctccttcgtgaattgggagagagatttggcaagcggactcataggaccactcctcatctgttacaaggaatctgtagaccagaggggtaaccagattatgagtgataaacgcaatgtgatcctttttagcgtcttcgacgagaaccggtcctggtacttgaccgagaatatacaaaggttccttcccaaccccgcaggcgttcagttggaagaccctgagtttcaggccagcaatattatgcactcaatcaacggctatgtgtttgatagtctccagctttctgtttgcctccatgaagtagcctattggtacatcttgtcaattggtgctcaaacagacttcctctccgtcttcttctccggctacacctttaagcacaagggcgtgtatgaggacactctcacactctttccattttctggagaaaccgtgttcatgagcatggagaatccaggcctttggatcttgggttgccacaacagtgattttcgcaatcggggaatgactgctctcctcaaagtcagcagctgtgattggaacacaggcgactattacgaagattcttacgaggacataagtgcctactttgactccaagaataacgccattgagcccagatcattctcccagaatcctcccgtgcttaaaaggcatcagcgcgaaggtaccagaactactcttcagtctgatcaagaggagattgactatgacgacaccattagcgtggaaatgaagaaggaggatttcgatatctatgacgaagatgagaaccagtctccgcggagctttcagaagaagacgcgacactacttcattgcagcagtcgaaaggctttgggactacggtatgtcatcatcccctcatgtgttgcgcaatagagctcagagtggaagtgttccacagttcaagaaagtcgtctttcaagagtttacagatggcagcttcacacagcctctctatcggggcgagcttaacgaacatttgggactccttggtccctatatccgagccgaagtggaggacaacattatggttacctttaggaatcaagcctctcgcccctacagcttctactcctccctcatcagttatgaggaggatcagagacaaggcgctgaaccacggaagaactttgtgaaaccgaatgagacgaagacctacttctggaaagtacagcaccacatggcccccacaaaagacgaattcgattgcaaagcatgggcgtatttttcagacgttgacttggagaaagatgtacattcaggacttattggtcctttgttggtgtgtcacactaacactctcaatccagcccatggcaggcaggtgacagtccaggaattcgctcttttctttaccatctttgatgagaccaagtcctggtacttcacggaaaacatggagcgcaattgcagagccccctgtaacatacagatggaggaccctacctttaaggaaaattatcggttccacgcaatcaacggatacattatggatacactccctggccttgttatggctcaggaccaacgaatcaggtggtacctcctcagcatgggttctaatgagaacatacactccattcacttttcaggacatgtgttcactgtccggaagaaagaagagtataagatggccctctacaatttgtatccaggcgtgtttgagaccgttgaaatgcttccctctaaagctggcatctggagagtagagtgcttgatcggagaacatcttcacgcaggtatgagcaccttgttcctcgtgtacagcaacaaatgtcagaatccacttggcatggccagtggacacattcgcgactttcagatcacagcatctggccagtatggacaatgggccccaaagttggctcgcctccattactccggtagcataaatgcgtggtccactaaagaacctttcagctggattaaggtcgatcttcttgcccccatgatcatccacggcattaagacacagggagcgaggcagaaattctcctccctctacatctcacagttcattattatgtatagtttggacggcaagaagtggcaaacttatagaggtaacagtactggaacagacatggtgttcttcggcaacgttgatagctctggcatcaaacacaacatctttaatcctcccataatagctcggtacatcagattgcatccgacccactacagcattaggagtacactccgaatggagcttatgggttgcgacttgaattcctgttcaatgccactcggaatggagtctaaagccatctctgatgcacagataaccgccagtagctactttacgaacatgtttgctacgtggtcaccctctaaggcaaggcttcatttgcaaggccggtctaatgcctggagacctcaggtgaacaacccgaaagaatggctccaggtggactttcagaagaccatgaaagtaacaggtgtcactactcagggagttaagtccttggatactagcatgtatgtgaaggagttccttatttcctcatcacaagatggccaccagtggaccctcttctttcagaatggtaaggtcaaagtgtttcagggcaatcaagacagcttcacacccgtggtgaacagtcttgatcctccactcttgacacgataccttcgaatccatccacagtcttgggagcaccagattgcattgcgcatggaagtacttggatgcgaggctcaggacctctac

SEQ ID NO: 1702 - protein, 1457 aa, synthetic construct
  REGION 1..1457: note = Variant of human B-domain deleted Factor VIII
MQIELSTCFFLCLLRFCFSATRRYYLGAVELSWDYMQSDLGELPVDARFPPRVPKSFPFNTSQVYKKTLFVEFTDHLFNIAKPRPPWMGLLGPTIQAEVYDTVVITLKNMASHPVSLHAVGVSYWKASEGAEYDDQTSQREKEDDKVFPGGSHTYVWQVEKENGPMASDPPCLTYSYLSHVDLVKDLNSGLIGALLVCREGSLAKEKTQTLAKFILLFAVFDEGKSWHSETKNSLMQDRDAASARAWPKMHTVNGYVNRTLPGLIGCHRKSVYWHVIGMGTTPEVHSIFLEGHTFLVRNHRQASLGISPITFLTAQTLLRDLGQFLLFCHIPSHQHDGMEAYVKVDSCPEEPQLRMKNNEEAEDYDDDLTDSEMDVVRFDDDNSPSIIQARSGAKKHPKTWVHYIAAEEEDWDYAPLVLAPDDRSYKSQYLNNGPQRIGRKYKKVRFMAYTDETFKTREAIQHESGILGPLLYGEVGDTLLIIFKNQASRPYNIYPHGITDVRPLYSRRLPKGVKHLKDFPILPGEIFKYKWTITVEDGPTKSDPRCLTRYYSSFVNWERDLASGLIGPLLICYKESVDQRGNQIMSDKRNVILFSVFDENRSWYLTENIQRFLPNPAGVQLEDPEFQASNIMHSINGYVFDSLQLSVCLHEVAYWYILSIGAQTDFLSVFFSGYTFKHKGVYEDTLTLFPFSGETVFMSMENPGLWILGCHNSDFRNRGMTALLKVSSCDWNTGDYYEDSYEDISAYFDSKNNAIEPRSFSQNPPVLKRHQREGTRTTLQSDQEEIDYDDTISVEMKKEDFDIYDEDENQSPRSFQKKTRHYFIAAVERLWDYGMSSSPHVLRNRAQSGSVPQFKKVVFQEFTDGSFTQPLYRGELNEHLGLLGPYIRAEVEDNIMVTFRNQASRPYSFYSSLISYEEDQRQGAEPRKNFVKPNETKTYFWKVQHHMAPTKDEFDCKAWAYFSDVDLEKDVHSGLIGPLLVCHTNTLNPAHGRQVTVQEFALFFTIFDETKSWYFTENMERNCRAPCNIQMEDPTFKENYRFHAINGYIMDTLPGLVMAQDQRIRWYLLSMGSNENIHSIHFSGHVFTVRKKEEYKMALYNLYPGVFETVEMLPSKAGIWRVECLIGEHLHAGMSTLFLVYSNKCQNPLGMASGHIRDFQITASGQYGQWAPKLARLHYSGSINAWSTKEPFSWIKVDLLAPMIIHGIKTQGARQKFSSLYISQFIIMYSLDGKKWQTYRGNSTGTDMVFFGNVDSSGIKHNIFNPPIIARYIRLHPTHYSIRSTLRMELMGCDLNSCSMPLGMESKAISDAQITASSYFTNMFATWSPSKARLHLQGRSNAWRPQVNNPKEWLQVDFQKTMKVTGVTTQGVKSLDTSMYVKEFLISSSQDGHQWTLFFQNGKVKVFQGNQDSFTPVVNSLDPPLLTRYLRIHPQSWEHQIALRMEVLGCEAQDLY

SEQ ID NO: 1703 - DNA, 4371 bp, synthetic construct
  misc_feature 1..4371: note = Variant of human B-domain deleted Factor VIII
  source 1..4371: mol_type = other DNA
atgcagattgaactgtctacctgcttcttcctctgtttgctgaggttctgctttagcgccactagacggtactaccttggcgctgtggagctgtcctgggactatatgcagagtgatttgggagagcttcccgtcgacgcacgatttcctcctcgcgttccaaagtcatttccctttaacacaagccaggtgtacaagaagacgctcttcgtcgaattcaccgatcacctgttcaatatcgccaaacccagaccaccatggatgggtcttttggggcctaccatacaagcggaggtgtatgacacagttgttatcactctcaagaacatggcttctcatccggtaagtcttcacgcagtgggcgtgtcctactggaaagcttcagaaggagccgagtatgatgatcagacatcccagagggagaaagaagacgacaaggtatttccaggtgggtctcatacctatgtgtggcaagtgacgaaagagaatggccctatggcaagcgatccgccgtgtttgacttacagctacctttcacacgttgacctcgtcaaggacctcaactccgggttgattggagccttgttggtatgcagggaaggatctcttgccaaagagaagacacagaccctggccaagtttatccttctctttgctgtgttcgatgagggcaaaagttggcatagcgaaacgaagaattccctcatgcaggatcgcgacgcagccagcgccagagcttggcccaagatgcacactgtgaacggatatgtcaataggacgcttcctggcttgattgggtgtcatcggaaaagtgtctactggcacgtgatcggaatggggacaacaccagaggtccactccatatttctcgaaggccataccttccttgttcgaaaccacagacaggcatccttggggatctctcccattacctttctcactgcccaaacgctccttcgtgacttgggtcagttccttctcttttgccatatcccgtcacaccagcatgatggtatggaagcttatgtgaaagtcgacagttgtcctgaggagccacagttgcgcatgaagaataatgaagaagccgaggattacgacgacgatctcaccgattctgagatggacgtggtgaggtttgatgacgacaactctccctccatcattcaagctcggagcggggcgaagaaacaccccaagacttgggtccactatatagcggcggaagaggaggattgggattacgctcctcttgtattggcaccagatgaccgctcatacaaaagccagtacctcaacaacggaccgcagagaattggccggaagtataagaaagtgcgatttatggcctatacagacgaaacctttaagacaagggaggccatccagcatgagagtgggattttgggacctcttctttacggcgaagttggtgataccctcctcatcatcttcaagaatcaagcttctcgcccctataacatttacccacacgggatcactgacgttaggcctttgtatagcagaagacttcccaaaggcgtgaagcatctcaaagacttccccattttgccaggcgagatctttaagtacaaatggaccattacagtggaagatggaccgactaaatcagaccctcgatgccttacgcggtactattcctccttcgtgaattgggagagagatttggcaagcggactcataggaccactcctcatctgttacaaggaatctgtagaccagaggggtaaccagattatgagtgataaacgcaatgtgatcctttttagcgtcttcgacgagaaccggtcctggtacttgaccgagaatatacaaaggttccttcccaaccccgcaggcgttcagttggaagaccctgagtttcaggccagcaatattatgcactcaatcaacggctatgtgtttgatagtctccagctttctgtttgcctccatgaagtagcctattggtacatcttgtcaattggtgctcaaacagacttcctctccgtcttcttctccggctacacctttaagcacaagggcgtgtatgaggacactctcacactctttccattttctggagaaaccgtgttcatgagcatggagaatccaggcctttggatcttgggttgccacaacagtgattttcgcaatcggggaatgactgctctcctcaaagtcagcagctgtgattggaacacaggcgactattacgaagattcttacgaggacataagtgcctactttgactccaagaataacgccattgagcccagatcattctcccagaatcctcccgtgcttaaaaggcatcagcgcgaaggtaccagaactactcttcagtctgatcaagaggagattgactatgacgacaccattagcgtggaaatgaagaaggaggatttcgatatctatgacgaagatgagaaccagtctccgcggagctttcagaagaagacgcgacactacttcattgcagcagtcgaaaggctttgggactacggtatgtcatcatcccctcatgtgttgcgcaatagagctcagagtggaagtgttccacagttcaagaaagtcgtctttcaagagtttacagatggcagcttcacacagcctctctatcggggcgagcttaacgaacatttgggactccttggtccctatatccgagccgaagtggaggacaacattatggttacctttaggaatcaagcctctcgcccctacagcttctactcctccctcatcagttatgaggaggatcagagacaaggcgctgaaccacggaagaactttgtgaaaccgaatgagacgaagacctacttctggaaagtacagcaccacatggcccccacaaaagacgaattcgattgcaaagcatgggcgtatttttcagacgttgacttggagaaagatgtacattcaggacttattggtcctttgttggtgtgtcacactaacactctcaatccagcccatggcaggcaggtgacagtccaggaattcgctcttttctttaccatctttgatgagaccaagtcctggtacttcacggaaaacatggagcgcaattgcagagccccctgtaacatacagatggaggaccctacctttaaggaaaattatcggttccacgcaatcaacggatacattatggatacactccctggccttgtgatggctcaggaccaacgaatcaggtggtacctcctcagcatgggttctaatgagaacatacactccattcacttttcaggacatgtgttcactgtccggaagaaagaagagtataagatggccctctacaatttgtatccaggcgtgtttgagaccgttgaaatgcttccctctaaagctggcatctggagagtagagtgcttgatcggagaacatcttcacgcaggtatgagcaccttgttcctcgtgtacagcaacaaatgtcagaatccacttggcatggccagtggacacattcgcgactttcagatcacagcatctggccagtatggacaatgggccccaaagttggctcgcctccattactccggtagcataaatgcgtggtccactaaagaacctttcagctggattaaggtcgatcttcttgcccccatgatcatccacggcattaagacacagggagcgaggcagaaattctcctccctctacatctcacagttcattattatgtatagtttggacggcaagaagtggcaaacttatagaggtaacagtactggaacagacatggtgttcttcggcaacgttgatagctctggcatcaaacacaacatctttaatcctcccataatagctcggtacatcagattgcatccgacccactacagcattaggagtacactccgaatggagcttatgggttgcgacttgaattcctgttcaatgccactcggaatggagtctaaagccatctctgatgcacagataaccgccagtagctactttacgaacatgtttgctacgtggtcaccctctaaggcaaggcttcatttgcaaggccggtctaatgcctggagacctcaggtgaacaacccgaaagaatggctccaggtggactttcagaagaccatgaaagtaacaggtgtcactactcagggagttaagtccttggatactagcatgtatgtgaaggagttccttatttcctcatcacaagatggccaccagtggaccctcttctttcagaatggtaaggtcaaagtgtttcagggcaatcaagacagcttcacacccgtggtgaacagtcttgatcctccactcttgacacgataccttcgaatccatccacagtcttgggagcaccagattgcattgcgcatggaagtacttggatgcgaggctcaggacctctac

SEQ ID NO: 1704 - protein, 1457 aa, synthetic construct
  REGION 1..1457: note = Variant of human B-domain deleted Factor VIII
MQIELSTCFFLCLLRFCFSATRRYYLGAVELSWDYMQSDLGELPVDARFPPRVPKSFPFNTSQVYKKTLFVEFTDHLFNIAKPRPPWMGLLGPTIQAEVYDTVVITLKNMASHPVSLHAVGVSYWKASEGAEYDDQTSQREKEDDKVFPGGSHTYVWQVTKENGPMASDPPCLTYSYLSHVDLVKDLNSGLIGALLVCREGSLAKEKTQTLAKFILLFAVFDEGKSWHSETKNSLMQDRDAASARAWPKMHTVNGYVNRTLPGLIGCHRKSVYWHVIGMGTTPEVHSIFLEGHTFLVRNHRQASLGISPITFLTAQTLLRDLGQFLLFCHIPSHQHDGMEAYVKVDSCPEEPQLRMKNNEEAEDYDDDLTDSEMDVVRFDDDNSPSIIQARSGAKKHPKTWVHYIAAEEEDWDYAPLVLAPDDRSYKSQYLNNGPQRIGRKYKKVRFMAYTDETFKTREAIQHESGILGPLLYGEVGDTLLIIFKNQASRPYNIYPHGITDVRPLYSRRLPKGVKHLKDFPILPGEIFKYKWTITVEDGPTKSDPRCLTRYYSSFVNWERDLASGLIGPLLICYKESVDQRGNQIMSDKRNVILFSVFDENRSWYLTENIQRFLPNPAGVQLEDPEFQASNIMHSINGYVFDSLQLSVCLHEVAYWYILSIGAQTDFLSVFFSGYTFKHKGVYEDTLTLFPFSGETVFMSMENPGLWILGCHNSDFRNRGMTALLKVSSCDWNTGDYYEDSYEDISAYFDSKNNAIEPRSFSQNPPVLKRHQREGTRTTLQSDQEEIDYDDTISVEMKKEDFDIYDEDENQSPRSFQKKTRHYFIAAVERLWDYGMSSSPHVLRNRAQSGSVPQFKKVVFQEFTDGSFTQPLYRGELNEHLGLLGPYIRAEVEDNIMVTFRNQASRPYSFYSSLISYEEDQRQGAEPRKNFVKPNETKTYFWKVQHHMAPTKDEFDCKAWAYFSDVDLEKDVHSGLIGPLLVCHTNTLNPAHGRQVTVQEFALFFTIFDETKSWYFTENMERNCRAPCNIQMEDPTFKENYRFHAINGYIMDTLPGLVMAQDQRIRWYLLSMGSNENIHSIHFSGHVFTVRKKEEYKMALYNLYPGVFETVEMLPSKAGIWRVECLIGEHLHAGMSTLFLVYSNKCQNPLGMASGHIRDFQITASGQYGQWAPKLARLHYSGSINAWSTKEPFSWIKVDLLAPMIIHGIKTQGARQKFSSLYISQFIIMYSLDGKKWQTYRGNSTGTDMVFFGNVDSSGIKHNIFNPPIIARYIRLHPTHYSIRSTLRMELMGCDLNSCSMPLGMESKAISDAQITASSYFTNMFATWSPSKARLHLQGRSNAWRPQVNNPKEWLQVDFQKTMKVTGVTTQGVKSLDTSMYVKEFLISSSQDGHQWTLFFQNGKVKVFQGNQDSFTPVVNSLDPPLLTRYLRIHPQSWEHQIALRMEVLGCEAQDLY

SEQ ID NO: 1705 - DNA, 4371 bp, synthetic construct
  misc_feature 1..4371: note = Variant of human B-domain deleted Factor VIII
  source 1..4371: mol_type = other DNA
atgcagattgaactgtctacctgcttcttcctctgtttgctgaggttctgctttagcgccactagacggtactaccttggcgctgtggagctgtcctgggactatatgcagagtgatttgggagagcttcccgtcgacgcacgatttcctcctcgcgttccaaagtcatttccctttaacacaagccaggtgtacaagaagacgctcttcgtcgaattcaccgatcacctgttcaatatcgccaaacccagaccaccatggatgggtcttttggggcctaccatacaagcggaggtgtatgacacagttgttatcactctcaagaacatggcttctcatccggtaagtcttcacgcagtgggcgtgtcctactggaaagcttcagaaggagccgagtatgatgatcagacatcccagagggagaaagaagacgacaaggtatttccaggtgggtctcatacctatgtgtggcaagtgctcaaagagaatggccctatggcaagcgatccgccgtgtttgacttacagctacgtgtcacacgttgacctcgtcaaggacctcaactccgggttgattggagccttgttggtatgcagggaaggatctcttgccaaagagaagacacagaccctggccaagtttatccttctctttgctgtgttcgatgagggcaaaagttggcatagcgaaacgaagaattccctcatgcaggatcgcgacgcagccagcgccagagcttggcccaagatgcacactgtgaacggatatgtcaataggacgcttcctggcttgattgggtgtcatcggaaaagtgtctactggcacgtgatcggaatggggacaacaccagaggtccactccatatttctcgaaggccataccttccttgttcgaaaccacagacaggcatccttggggatctctcccattacctttctcactgcccaaacgctccttcgtgacttgggtcagttccttctcttttgccatatcccgtcacaccagcatgatggtatggaagcttatgtgaaagtcgacagttgtcctgaggagccacagttgcgcatgaagaataatgaagaagccgaggattacgacgacgatctcaccgattctgagatggacgtggtgaggtttgatgacgacaactctccctccatcattcaagctcggagcggggcgaagaaacaccccaagacttgggtccactatatagcggcggaagaggaggattgggattacgctcctcttgtattggcaccagatgaccgctcatacaaaagccagtacctcaacaacggaccgcagagaattggccggaagtataagaaagtgcgatttatggcctatacagacgaaacctttaagacaagggaggccatccagcatgagagtgggattttgggacctcttctttacggcgaagttggtgataccctcctcatcatcttcaagaatcaagcttctcgcccctataacatttacccacacgggatcactgacgttaggcctttgtatagcagaagacttcccaaaggcgtgaagcatctcaaagacttccccattttgccaggcgagatctttaagtacaaatggaccattacagtggaagatggaccgactaaatcagaccctcgatgccttacgcggtactattcctccttcgtgaattgggagagagatttggcaagcggactcataggaccactcctcatctgttacaaggaatctgtagaccagaggggtaaccagattatgagtgataaacgcaatgtgatcctttttagcgtcttcgacgagaaccggtcctggtacttgaccgagaatatacaaaggttccttcccaaccccgcaggcgttcagttggaagaccctgagtttcaggccagcaatattatgcactcaatcaacggctatgtgtttgatagtctccagctttctgtttgcctccatgaagtagcctattggtacatcttgtcaattggtgctcaaacagacttcctctccgtcttcttctccggctacacctttaagcacaagggcgtgtatgaggacactctcacactctttccattttctggagaaaccgtgttcatgagcatggagaatccaggcctttggatcttgggttgccacaacagtgattttcgcaatcggggaatgactgctctcctcaaagtcagcagctgtgattggaacacaggcgactattacgaagattcttacgaggacataagtgcctactttgactccaagaataacgccattgagcccagatcattctcccagaatcctcccgtgcttaaaaggcatcagcgcgaaggtaccagaactactcttcagtctgatcaagaggagattgactatgacgacaccattagcgtggaaatgaagaaggaggatttcgatatctatgacgaagatgagaaccagtctccgcggagctttcagaagaagacgcgacactacttcattgcagcagtcgaaaggctttgggactacggtatgtcatcatcccctcatgtgttgcgcaatagagctcagagtggaagtgttccacagttcaagaaagtcgtctttcaagagtttacagatggcagcttcacacagcctctctatcggggcgagcttaacgaacatttgggactccttggtccctatatccgagccgaagtggaggacaacattatggttacctttaggaatcaagcctctcgcccctacagcttctactcctccctcatcagttatgaggaggatcagagacaaggcgctgaaccacggaagaactttgtgaaaccgaatgagacgaagacctacttctggaaagtacagcaccacatggcccccacaaaagacgaattcgattgcaaagcatgggcgtatttttcagacgttgacttggagaaagatgtacattcaggacttattggtcctttgttggtgtgtcacactaacactctcaatccagcccatggcaggcaggtgacagtccaggaattcgctcttttctttaccatctttgatgagaccaagtcctggtacttcacggaaaacatggagcgcaattgcagagccccctgtaacatacagatggaggaccctacctttaaggaaaattatcggttccacgcaatcaacggatacattatggatacactccctggccttgtgatggctcaggaccaacgaatcaggtggtacctcctcagcatgggttctaatgagaacatacactccattcacttttcaggacatgtgttcactgtccggaagaaagaagagtataagatggccctctacaatttgtatccaggcgtgtttgagaccgttgaaatgcttccctctaaagctggcatctggagagtagagtgcttgatcggagaacatcttcacgcaggtatgagcaccttgttcctcgtgtacagcaacaaatgtcagaatccacttggcatggccagtggacacattcgcgactttcagatcacagcatctggccagtatggacaatgggccccaaagttggctcgcctccattactccggtagcataaatgcgtggtccactaaagaacctttcagctggattaaggtcgatcttcttgcccccatgatcatccacggcattaagacacagggagcgaggcagaaattctcctccctctacatctcacagttcattattatgtatagtttggacggcaagaagtggcaaacttatagaggtaacagtactggaacagacatggtgttcttcggcaacgttgatagctctggcatcaaacacaacatctttaatcctcccataatagctcggtacatcagattgcatccgacccactacagcattaggagtacactccgaatggagcttatgggttgcgacttgaattcctgttcaatgccactcggaatggagtctaaagccatctctgatgcacagataaccgccagtagctactttacgaacatgtttgctacgtggtcaccctctaaggcaaggcttcatttgcaaggccggtctaatgcctggagacctcaggtgaacaacccgaaagaatggctccaggtggactttcagaagaccatgaaagtaacaggtgtcactactcagggagttaagtccttggatactagcatgtatgtgaaggagttccttatttcctcatcacaagatggccaccagtggaccctcttctttcagaatggtaaggtcaaagtgtttcagggcaatcaagacagcttcacacccgtggtgaacagtcttgatcctccactcttgacacgataccttcgaatccatccacagtcttgggagcaccagattgcattgcgcatggaagtacttggatgcgaggctcaggacctctac

SEQ ID NO: 1706 - protein, 1457 aa, synthetic construct
  REGION 1..1457: note = Variant of human B-domain deleted Factor VIII
MQIELSTCFFLCLLRFCFSATRRYYLGAVELSWDYMQSDLGELPVDARFPPRVPKSFPFNTSQVYKKTLFVEFTDHLFNIAKPRPPWMGLLGPTIQAEVYDTVVITLKNMASHPVSLHAVGVSYWKASEGAEYDDQTSQREKEDDKVFPGGSHTYVWQVLKENGPMASDPPCLTYSYVSHVDLVKDLNSGLIGALLVCREGSLAKEKTQTLAKFILLFAVFDEGKSWHSETKNSLMQDRDAASARAWPKMHTVNGYVNRTLPGLIGCHRKSVYWHVIGMGTTPEVHSIFLEGHTFLVRNHRQASLGISPITFLTAQTLLRDLGQFLLFCHIPSHQHDGMEAYVKVDSCPEEPQLRMKNNEEAEDYDDDLTDSEMDVVRFDDDNSPSIIQARSGAKKHPKTWVHYIAAEEEDWDYAPLVLAPDDRSYKSQYLNNGPQRIGRKYKKVRFMAYTDETFKTREAIQHESGILGPLLYGEVGDTLLIIFKNQASRPYNIYPHGITDVRPLYSRRLPKGVKHLKDFPILPGEIFKYKWTITVEDGPTKSDPRCLTRYYSSFVNWERDLASGLIGPLLICYKESVDQRGNQIMSDKRNVILFSVFDENRSWYLTENIQRFLPNPAGVQLEDPEFQASNIMHSINGYVFDSLQLSVCLHEVAYWYILSIGAQTDFLSVFFSGYTFKHKGVYEDTLTLFPFSGETVFMSMENPGLWILGCHNSDFRNRGMTALLKVSSCDWNTGDYYEDSYEDISAYFDSKNNAIEPRSFSQNPPVLKRHQREGTRTTLQSDQEEIDYDDTISVEMKKEDFDIYDEDENQSPRSFQKKTRHYFIAAVERLWDYGMSSSPHVLRNRAQSGSVPQFKKVVFQEFTDGSFTQPLYRGELNEHLGLLGPYIRAEVEDNIMVTFRNQASRPYSFYSSLISYEEDQRQGAEPRKNFVKPNETKTYFWKVQHHMAPTKDEFDCKAWAYFSDVDLEKDVHSGLIGPLLVCHTNTLNPAHGRQVTVQEFALFFTIFDETKSWYFTENMERNCRAPCNIQMEDPTFKENYRFHAINGYIMDTLPGLVMAQDQRIRWYLLSMGSNENIHSIHFSGHVFTVRKKEEYKMALYNLYPGVFETVEMLPSKAGIWRVECLIGEHLHAGMSTLFLVYSNKCQNPLGMASGHIRDFQITASGQYGQWAPKLARLHYSGSINAWSTKEPFSWIKVDLLAPMIIHGIKTQGARQKFSSLYISQFIIMYSLDGKKWQTYRGNSTGTDMVFFGNVDSSGIKHNIFNPPIIARYIRLHPTHYSIRSTLRMELMGCDLNSCSMPLGMESKAISDAQITASSYFTNMFATWSPSKARLHLQGRSNAWRPQVNNPKEWLQVDFQKTMKVTGVTTQGVKSLDTSMYVKEFLISSSQDGHQWTLFFQNGKVKVFQGNQDSFTPVVNSLDPPLLTRYLRIHPQSWEHQIALRMEVLGCEAQDLY

SEQ ID NO: 1707 - DNA, 4371 bp, synthetic construct
  misc_feature 1..4371: note = Variant of human B-domain deleted Factor VIII
  source 1..4371: mol_type = other DNA
atgcagattgaactgtctacctgcttcttcctctgtttgctgaggttctgctttagcgccactagacggtactaccttggcgctgtggagctgtcctgggactatatgcagagtgatttgggagagcttcccgtcgacgcacgatttcctcctcgcgttccaaagtcatttccctttaacacaagccaggtgtacaagaagacgctcttcgtcgaattcaccgatcacctgttcaatatcgccaaacccagaccaccatggatgggtcttttggggcctaccatacaagcggaggtgtatgacacagttgttatcactctcaagaacatggcttctcatccggtaagtcttcacgcagtgggcgtgtcctactggaaagcttcagaaggagccgagtatgatgatcagacatcccagagggagaaagaagacgacaaggtatttccaggtgggtctcatacctatgtgtggcaagtgctcaaagagaatggccctatggcaagcgatccgccgtgtttgacttacagctacctttcacacgttgacctcgtcaaggacctcaactccgggttgattggagccttgttggtatgcagggaaggatctcttgccaaagagaagacacagaccctggccaagtttatccttctctttgctgtgttcgatgagggcaaaagttggcatagcgaaacgaagaattccctcatgcaggatcgcgacgcagccagcgccagagcttggcccaagatgcacactgtgaacggatatgtcaataggacgcttcctggcttgattgggtgtcatcggaaaagtgtctactggcacgtgatcggaatggggacaacaccagaggtccactccatatttctcgaaggccataccttccttgttcgaaaccacagacaggcatccttggggatctctcccattacctttctcactgcccaaacgctccttcgtgacttgggtcagttccttctcttttgccatatcccgtcacaccagcatgatggtatggaagcttatgtgaaagtcgacagttgtcctgaggagccacagttgcgcatgaagaataatgaagaagccgaggattacgacgacgatctcaccgattctgagatggacgtggtgaggtttgatgacgacaactctccctccatcattcaagctcggagcggggcgaagaaacaccccaagacttgggtccactatatagcggcggaagaggaggattgggattacgctcctcttgtattggcaccagatgaccgctcatacaaaagccagtacctcaacaacggaccgcagagaattggccggaagtataagaaagtgcgatttatggcctatacagacgaaacctttaagacaagggaggccatccagcatgagagtgggattttgggacctcttctttacggcgaagttggtgataccctcctcatcatcttcaagaatcaagcttctcgcccctataacatttacccacacgggatcactgacgttaggcctttgtatagcagaagacttcccaaaggcgtgaagcatctcaaagacttccccattttgccaggcgagatctttaagtacaaatggaccattacagtggaagatggaccgactaaattggaccctcgatgccttacgcggtactattcctccttcgtgaattgggagagagatttggcaagcggactcataggaccactcctcatctgttacaaggaatctgtagaccagaggggtaaccagattatgagtgataaacgcaatgtgatcctttttagcgtcttcgacgagaaccggtcctggtacttgaccgagaatatacaaaggttccttcccaaccccgcaggcgttcagttggaagaccctgagtttcaggccagcaatattatgcactcaatcaacggctatgtgtttgatagtctccagctttctgtttgcctccatgaagtagcctattggtacatcttgtcaattggtgctcaaacagacttcctctccgtcttcttctccggctacacctttaagcacaagggcgtgtatgaggacactctcacactctttccattttctggagaaaccgtgttcatgagcatggagaatccaggcctttggatcttgggttgccacaacagtgattttcgcaatcggggaatgactgctctcctcaaagtcagcagctgtgattggaacacaggcgactattacgaagattcttacgaggacataagtgcctactttgactccaagaataacgccattgagcccagatcattctcccagaatcctcccgtgcttaaaaggcatcagcgcgaaggtaccagaactactcttcagtctgatcaagaggagattgactatgacgacaccattagcgtggaaatgaagaaggaggatttcgatatctatgacgaagatgagaaccagtctccgcggagctttcagaagaagacgcgacactacttcattgcagcagtcgaaaggctttgggactacggtatgtcatcatcccctcatgtgttgcgcaatagagctcagagtggaagtgttccacagttcaagaaagtcgtctttcaagagtttacagatggcagcttcacacagcctctctatcggggcgagcttaacgaacatttgggactccttggtccctatatccgagccgaagtggaggacaacattatggttacctttaggaatcaagcctctcgcccctacagcttctactcctccctcatcagttatgaggaggatcagagacaaggcgctgaaccacggaagaactttgtgaaaccgaatgagacgaagacctacttctggaaagtacagcaccacatggcccccacaaaagacgaattcgattgcaaagcatgggcgtatttttcagacgttgacttggagaaagatgtacattcaggacttattggtcctttgttggtgtgtcacactaacactctcaatccagcccatggcaggcaggtgacagtccaggaattcgctcttttctttaccatctttgatgagaccaagtcctggtacttcacggaaaacatggagcgcaattgcagagccccctgtaacatacagatggaggaccctacctttaaggaaaattatcggttccacgcaatcaacggatacattatggatacactccctggccttgtgatggctcaggaccaacgaatcaggtggtacctcctcagcatgggttctaatgagaacatacactccattcacttttcaggacatgtgttcactgtccggaagaaagaagagtataagatggccctctacaatttgtatccaggcgtgtttgagaccgttgaaatgcttccctctaaagctggcatctggagagtagagtgcttgatcggagaacatcttcacgcaggtatgagcaccttgttcctcgtgtacagcaacaaatgtcagaatccacttggcatggccagtggacacattcgcgactttcagatcacagcatctggccagtatggacaatgggccccaaagttggctcgcctccattactccggtagcataaatgcgtggtccactaaagaacctttcagctggattaaggtcgatcttcttgcccccatgatcatccacggcattaagacacagggagcgaggcagaaattctcctccctctacatctcacagttcattattatgtatagtttggacggcaagaagtggcaaacttatagaggtaacagtactggaacagacatggtgttcttcggcaacgttgatagctctggcatcaaacacaacatctttaatcctcccataatagctcggtacatcagattgcatccgacccactacagcattaggagtacactccgaatggagcttatgggttgcgacttgaattcctgttcaatgccactcggaatggagtctaaagccatctctgatgcacagataaccgccagtagctactttacgaacatgtttgctacgtggtcaccctctaaggcaaggcttcatttgcaaggccggtctaatgcctggagacctcaggtgaacaacccgaaagaatggctccaggtggactttcagaagaccatgaaagtaacaggtgtcactactcagggagttaagtccttggatactagcatgtatgtgaaggagttccttatttcctcatcacaagatggccaccagtggaccctcttctttcagaatggtaaggtcaaagtgtttcagggcaatcaagacagcttcacacccgtggtgaacagtcttgatcctccactcttgacacgataccttcgaatccatccacagtcttgggagcaccagattgcattgcgcatggaagtacttggatgcgaggctcaggacctctac

SEQ ID NO: 1708 - protein, 1457 aa, synthetic construct
  REGION 1..1457: note = Variant of human B-domain deleted Factor VIII
MQIELSTCFFLCLLRFCFSATRRYYLGAVELSWDYMQSDLGELPVDARFPPRVPKSFPFNTSQVYKKTLFVEFTDHLFNIAKPRPPWMGLLGPTIQAEVYDTVVITLKNMASHPVSLHAVGVSYWKASEGAEYDDQTSQREKEDDKVFPGGSHTYVWQVLKENGPMASDPPCLTYSYLSHVDLVKDLNSGLIGALLVCREGSLAKEKTQTLAKFILLFAVFDEGKSWHSETKNSLMQDRDAASARAWPKMHTVNGYVNRTLPGLIGCHRKSVYWHVIGMGTTPEVHSIFLEGHTFLVRNHRQASLGISPITFLTAQTLLRDLGQFLLFCHIPSHQHDGMEAYVKVDSCPEEPQLRMKNNEEAEDYDDDLTDSEMDVVRFDDDNSPSIIQARSGAKKHPKTWVHYIAAEEEDWDYAPLVLAPDDRSYKSQYLNNGPQRIGRKYKKVRFMAYTDETFKTREAIQHESGILGPLLYGEVGDTLLIIFKNQASRPYNIYPHGITDVRPLYSRRLPKGVKHLKDFPILPGEIFKYKWTITVEDGPTKLDPRCLTRYYSSFVNWERDLASGLIGPLLICYKESVDQRGNQIMSDKRNVILFSVFDENRSWYLTENIQRFLPNPAGVQLEDPEFQASNIMHSINGYVFDSLQLSVCLHEVAYWYILSIGAQTDFLSVFFSGYTFKHKGVYEDTLTLFPFSGETVFMSMENPGLWILGCHNSDFRNRGMTALLKVSSCDWNTGDYYEDSYEDISAYFDSKNNAIEPRSFSQNPPVLKRHQREGTRTTLQSDQEEIDYDDTISVEMKKEDFDIYDEDENQSPRSFQKKTRHYFIAAVERLWDYGMSSSPHVLRNRAQSGSVPQFKKVVFQEFTDGSFTQPLYRGELNEHLGLLGPYIRAEVEDNIMVTFRNQASRPYSFYSSLISYEEDQRQGAEPRKNFVKPNETKTYFWKVQHHMAPTKDEFDCKAWAYFSDVDLEKDVHSGLIGPLLVCHTNTLNPAHGRQVTVQEFALFFTIFDETKSWYFTENMERNCRAPCNIQMEDPTFKENYRFHAINGYIMDTLPGLVMAQDQRIRWYLLSMGSNENIHSIHFSGHVFTVRKKEEYKMALYNLYPGVFETVEMLPSKAGIWRVECLIGEHLHAGMSTLFLVYSNKCQNPLGMASGHIRDFQITASGQYGQWAPKLARLHYSGSINAWSTKEPFSWIKVDLLAPMIIHGIKTQGARQKFSSLYISQFIIMYSLDGKKWQTYRGNSTGTDMVFFGNVDSSGIKHNIFNPPIIARYIRLHPTHYSIRSTLRMELMGCDLNSCSMPLGMESKAISDAQITASSYFTNMFATWSPSKARLHLQGRSNAWRPQVNNPKEWLQVDFQKTMKVTGVTTQGVKSLDTSMYVKEFLISSSQDGHQWTLFFQNGKVKVFQGNQDSFTPVVNSLDPPLLTRYLRIHPQSWEHQIALRMEVLGCEAQDLY

SEQ ID NO: 1709 - DNA, 4371 bp, synthetic construct
  misc_feature 1..4371: note = Variant of human B-domain deleted Factor VIII
  source 1..4371: mol_type = other DNA
atgcagattgaactgtctacctgcttcttcctctgtttgctgaggttctgctttagcgccactagacggtactaccttggcgctgtggagctgtcctgggactatatgcagagtgatttgggagagcttcccgtcgacgcacgatttcctcctcgcgttccaaagtcatttccctttaacacaagccaggtgtacaagaagacgctcttcgtcgaattcaccgatcacctgttcaatatcgccaaacccagaccaccatggatgggtcttttggggcctaccatacaagcggaggtgtatgacacagttgttatcactctcaagaacatggcttctcatccggtaagtcttcacgcagtgggcgtgtcctactggaaagcttcagaaggagccgagtatgatgatcagacatcccagagggagaaagaagacgacaaggtatttccaggtgggtctcatacctatgtgtggcaagtgctcaaagagaatggccctatggcaagcgatccgccgtgtttgacttacagctacctttcacacgttgacctcgtcaaggacctcaactccgggttgattggagccttgttggtatgcagggaaggatctcttgccaaagagaagacacagaccctggccaagtttatccttctctttgctgtgttcgatgagggcaaaagttggcatagcgaaacgaagaattccctcatgcaggatcgcgacgcagccagcgccagagcttggcccaagatgcacactgtgaacggatatgtcaataggacgcttcctggcttgattgggtgtcatcggaaaagtgtctactggcacgtgatcggaatggggacaacaccagaggtccactccatatttctcgaaggccataccttccttgttcgaaaccacagacaggcatccttggggatctctcccgggacctttctcactgcccaaacgctccttcgtgacttgggtcagttccttctcttttgccatatcccgtcacaccagcatgatggtatggaagcttatgtgaaagtcgacagttgtcctgaggagccacagttgcgcatgaagaataatgaagaagccgaggattacgacgacgatctcaccgattctgagatggacgtggtgaggtttgatgacgacaactctccctccatcattcaagctcggagcggggcgaagaaacaccccaagacttgggtccactatatagcggcggaagaggaggattgggattacgctcctcttgtattggcaccagatgaccgctcatacaaaagccagtacctcaacaacggaccgcagagaattggccggaagtataagaaagtgcgatttatggcctatacagacgaaacctttaagacaagggaggccatccagcatgagagtgggattttgggacctcttctttacggcgaagttggtgataccctcctcatcatcttcaagaatcaagcttctcgcccctataacatttacccacacgggatcactgacgttaggcctttgtatagcagaagacttcccaaaggcgtgaagcatctcaaagacttccccattttgccaggcgagatctttaagtacaaatggaccattacagtggaagatggaccgactaaatcagaccctcgatgccttacgcggtactattcctccttcgtgaattgggagagagatttggcaagcggactcataggaccactcctcatctgttacaaggaatctgtagaccagaggggtaaccagattatgagtgataaacgcaatgtgatcctttttagcgtcttcgacgagaaccggtcctggtacttgaccgagaatatacaaaggttccttcccaaccccgcaggcgttcagttggaagaccctgagtttcaggccagcaatattatgcactcaatcaacggctatgtgtttgatagtctccagctttctgtttgcctccatgaagtagcctattggtacatcttgtcaattggtgctcaaacagacttcctctccgtcttcttctccggctacacctttaagcacaagggcgtgtatgaggacactctcacactctttccattttctggagaaaccgtgttcatgagcatggagaatccaggcctttggatcttgggttgccacaacagtgattttcgcaatcggggaatgactgctctcctcaaagtcagcagctgtgattggaacacaggcgactattacgaagattcttacgaggacataagtgcctactttgactccaagaataacgccattgagcccagatcattctcccagaatcctcccgtgcttaaaaggcatcagcgcgaaggtaccagaactactcttcagtctgatcaagaggagattgactatgacgacaccattagcgtggaaatgaagaaggaggatttcgatatctatgacgaagatgagaaccagtctccgcggagctttcagaagaagacgcgacactacttcattgcagcagtcgaaaggctttgggactacggtatgtcatcatcccctcatgtgttgcgcaatagagctcagagtggaagtgttccacagttcaagaaagtcgtctttcaagagtttacagatggcagcttcacacagcctctctatcggggcgagcttaacgaacatttgggactccttggtccctatatccgagccgaagtggaggacaacattatggttacctttaggaatcaagcctctcgcccctacagcttctactcctccctcatcagttatgaggaggatcagagacaaggcgctgaaccacggaagaactttgtgaaaccgaatgagacgaagacctacttctggaaagtacagcaccacatggcccccacaaaagacgaattcgattgcaaagcatgggcgtatttttcagacgttgacttggagaaagatgtacattcaggacttattggtcctttgttggtgtgtcacactaacactctcaatccagcccatggcaggcaggtgacagtccaggaattcgctcttttctttaccatctttgatgagaccaagtcctggtacttcacggaaaacatggagcgcaattgcagagccccctgtaacatacagatggaggaccctacctttaaggaaaattatcggttccacgcaatcaacggatacattatggatacactccctggccttgtgatggctcaggaccaacgaatcaggtggtacctcctcagcatgggttctaatgagaacatacactccattcacttttcaggacatgtgttcactgtccggaagaaagaagagtataagatggccctctacaatttgtatccaggcgtgtttgagaccgttgaaatgcttccctctaaagctggcatctggagagtagagtgcttgatcggagaacatcttcacgcaggtatgagcaccttgttcctcgtgtacagcaacaaatgtcagaatccacttggcatggccagtggacacattcgcgactttcagatcacagcatctggccagtatggacaatgggccccaaagttggctcgcctccattactccggtagcataaatgcgtggtccactaaagaacctttcagctggattaaggtcgatcttcttgcccccatgatcatccacggcattaagacacagggagcgaggcagaaattctcctccctctacatctcacagttcattattatgtatagtttggacggcaagaagtggcaaacttatagaggtaacagtactggaacagacatggtgttcttcggcaacgttgatagctctggcatcaaacacaacatctttaatcctcccataatagctcggtacatcagattgcatccgacccactacagcattaggagtacactccgaatggagcttatgggttgcgacttgaattcctgttcaatgccactcggaatggagtctaaagccatctctgatgcacagataaccgccagtagctactttacgaacatgtttgctacgtggtcaccctctaaggcaaggcttcatttgcaaggccggtctaatgcctggagacctcaggtgaacaacccgaaagaatggctccaggtggactttcagaagaccatgaaagtaacaggtgtcactactcagggagttaagtccttggatactagcatgtatgtgaaggagttccttatttcctcatcacaagatggccaccagtggaccctcttctttcagaatggtaaggtcaaagtgtttcagggcaatcaagacagcttcacacccgtggtgaacagtcttgatcctccactcttgacacgataccttcgaatccatccacagtcttgggagcaccagattgcattgcgcatggaagtacttggatgcgaggctcaggacctctac

SEQ ID NO: 1710 - protein, 1457 aa, synthetic construct
  REGION 1..1457: note = Variant of human B-domain deleted Factor VIII
MQIELSTCFFLCLLRFCFSATRRYYLGAVELSWDYMQSDLGELPVDARFPPRVPKSFPFNTSQVYKKTLFVEFTDHLFNIAKPRPPWMGLLGPTIQAEVYDTVVITLKNMASHPVSLHAVGVSYWKASEGAEYDDQTSQREKEDDKVFPGGSHTYVWQVLKENGPMASDPPCLTYSYLSHVDLVKDLNSGLIGALLVCREGSLAKEKTQTLAKFILLFAVFDEGKSWHSETKNSLMQDRDAASARAWPKMHTVNGYVNRTLPGLIGCHRKSVYWHVIGMGTTPEVHSIFLEGHTFLVRNHRQASLGISPGTFLTAQTLLRDLGQFLLFCHIPSHQHDGMEAYVKVDSCPEEPQLRMKNNEEAEDYDDDLTDSEMDVVRFDDDNSPSIIQARSGAKKHPKTWVHYIAAEEEDWDYAPLVLAPDDRSYKSQYLNNGPQRIGRKYKKVRFMAYTDETFKTREAIQHESGILGPLLYGEVGDTLLIIFKNQASRPYNIYPHGITDVRPLYSRRLPKGVKHLKDFPILPGEIFKYKWTITVEDGPTKSDPRCLTRYYSSFVNWERDLASGLIGPLLICYKESVDQRGNQIMSDKRNVILFSVFDENRSWYLTENIQRFLPNPAGVQLEDPEFQASNIMHSINGYVFDSLQLSVCLHEVAYWYILSIGAQTDFLSVFFSGYTFKHKGVYEDTLTLFPFSGETVFMSMENPGLWILGCHNSDFRNRGMTALLKVSSCDWNTGDYYEDSYEDISAYFDSKNNAIEPRSFSQNPPVLKRHQREGTRTTLQSDQEEIDYDDTISVEMKKEDFDIYDEDENQSPRSFQKKTRHYFIAAVERLWDYGMSSSPHVLRNRAQSGSVPQFKKVVFQEFTDGSFTQPLYRGELNEHLGLLGPYIRAEVEDNIMVTFRNQASRPYSFYSSLISYEEDQRQGAEPRKNFVKPNETKTYFWKVQHHMAPTKDEFDCKAWAYFSDVDLEKDVHSGLIGPLLVCHTNTLNPAHGRQVTVQEFALFFTIFDETKSWYFTENMERNCRAPCNIQMEDPTFKENYRFHAINGYIMDTLPGLVMAQDQRIRWYLLSMGSNENIHSIHFSGHVFTVRKKEEYKMALYNLYPGVFETVEMLPSKAGIWRVECLIGEHLHAGMSTLFLVYSNKCQNPLGMASGHIRDFQITASGQYGQWAPKLARLHYSGSINAWSTKEPFSWIKVDLLAPMIIHGIKTQGARQKFSSLYISQFIIMYSLDGKKWQTYRGNSTGTDMVFFGNVDSSGIKHNIFNPPIIARYIRLHPTHYSIRSTLRMELMGCDLNSCSMPLGMESKAISDAQITASSYFTNMFATWSPSKARLHLQGRSNAWRPQVNNPKEWLQVDFQKTMKVTGVTTQGVKSLDTSMYVKEFLISSSQDGHQWTLFFQNGKVKVFQGNQDSFTPVVNSLDPPLLTRYLRIHPQSWEHQIALRMEVLGCEAQDLY

SEQ ID NO: 1711 - DNA, 4371 bp, synthetic construct
  misc_feature 1..4371: note = Variant of human B-domain deleted Factor VIII
  source 1..4371: mol_type = other DNA
atgcagattgaactgtctacctgcttcttcctctgtttgctgaggttctgctttagcgccactagacggtactaccttggcgctgtggagctgtcctgggactatatgcagagtgatttgggagagcttcccgtcgacgcacgatttcctcctcgcgttccaaagtcatttccctttaacacaagccaggtgtacaagaagacgctcttcgtcgaattcaccgatcacctgttcaatatcgccaaacccagaccaccatggatgggtcttttggggcctaccatacaagcggaggtgtatgacacagttgttatcactctcaagaacatggcttctcatccggtaagtcttcacgcagtgggcgtgtcctactggaaagcttcagaaggagccgagtatgatgatcagacatcccagagggagaaagaagacgacaaggtatttccaggtgggtctcatacctatgtgtggcaagtgctcaaagagaatggccctatggcaagcgatccgccgtgtttgacttacagctacctttcacacgttgacctcgtcaaggacctcaactccgggttgattggagccttgttggtatgcagggaaggatctcttgccaaagagaagacacagaccctggccaagtttatccttctctttgctgtgttcgatgagggcaaaagttggcatagcgaaacgaagaattccctcatgcaggatcgcgacgcagccagcgccagagcttggcccaagatgcacactgtgaacggatatgtcaataggacgcttcctggcttgattgggtgtcatcggaaaagtgtctactggcacgtgatcggaatggggacaacaccagaggtccactccatatttctcgaaggccataccttccttgttcgaaaccacagacaggcatccttggggatctctcccattacctttctcactgcccaaacgctccttcgtgacttgggtcagttccttctcttttgccatatcccgtcacaccagcatgatggtatggaagcttatgtgaaagtcgacagttgtcctgaggagccacagttgcgcatgaagaataatgaagaagccgaggattacgacgacgatctcaccgattctgagatggacgtggtgaggtttgatgacgacaactctccctccatcattcaagctcggagcggggcgaagaaacaccccaagacttgggtccactatatagcggcggaagaggaggattgggattacgctcctcttgtattggcaccagatgaccgctcatacaaaagccagtacctcaacaacggaccgcagagaattggccggaagtataagaaagtgcgatttatggcctatacagacgaaacctttaagacaagggaggccatccagcatgagagtgggattttgggacctcttctttacggcgaagttggtgataccctcctcatcatcttcaagaatcaagcttctcgcccctataacatttacccacacgggatcactgacgttaggcctttgtatagcagaagacttcccaaaggcgtgaagcatctcaaagacttccccattttgccaggcgagatctttaagtacaaatggaccattacagtggaagatggaccgactaaatcagaccctcgatgccttacgcggtactattcctccttcgtgaattgggagagagatttggcaagcggactcataggaccactcctcatctgttacaaggaatctgtagaccagaggggtaaccagattatgagtgataaacgcaatgtgatcctttttagcgtcttcgacgagaaccggtcctggtacttgaccgagaatatacaaaggttccttcccaaccccgcaggcgttcagttggaagaccctgagtttcaggccagcaatattatgcactcaatcaacggctatgtgtttgatagtctccagctttctgtttgcctccatgaagtagcctattggtacatcttgtcaattggtgctcaaacagacttcctctccgtcttcttctccggctacacctttaagcacaagggcgtgtatgaggacactctcacactctttccattttctggagaaaccgtgttcatgcagatggagaatccaggcctttggatcttgggttgccacaacagtgattttcgcaatcggggaatgactgctctcctcaaagtcagcagctgtgattggaacacaggcgactattacgaagattcttacgaggacataagtgcctactttgactccaagaataacgccattgagcccagatcattctcccagaatcctcccgtgcttaaaaggcatcagcgcgaaggtaccagaactactcttcagtctgatcaagaggagattgactatgacgacaccattagcgtggaaatgaagaaggaggatttcgatatctatgacgaagatgagaaccagtctccgcggagctttcagaagaagacgcgacactacttcattgcagcagtcgaaaggctttgggactacggtatgtcatcatcccctcatgtgttgcgcaatagagctcagagtggaagtgttccacagttcaagaaagtcgtctttcaagagtttacagatggcagcttcacacagcctctctatcggggcgagcttaacgaacatttgggactccttggtccctatatccgagccgaagtggaggacaacattatggttacctttaggaatcaagcctctcgcccctacagcttctactcctccctcatcagttatgaggaggatcagagacaaggcgctgaaccacggaagaactttgtgaaaccgaatgagacgaagacctacttctggaaagtacagcaccacatggcccccacaaaagacgaattcgattgcaaagcatgggcgtatttttcagacgttgacttggagaaagatgtacattcaggacttattggtcctttgttggtgtgtcacactaacactctcaatccagcccatggcaggcaggtgacagtccaggaattcgctcttttctttaccatctttgatgagaccaagtcctggtacttcacggaaaacatggagcgcaattgcagagccccctgtaacatacagatggaggaccctacctttaaggaaaattatcggttccacgcaatcaacggatacattatggatacactccctggccttgtgatggctcaggaccaacgaatcaggtggtacctcctcagcatgggttctaatgagaacatacactccattcacttttcaggacatgtgttcactgtccggaagaaagaagagtataagatggccctctacaatttgtatccaggcgtgtttgagaccgttgaaatgcttccctctaaagctggcatctggagagtagagtgcttgatcggagaacatcttcacgcaggtatgagcaccttgttcctcgtgtacagcaacaaatgtcagaatccacttggcatggccagtggacacattcgcgactttcagatcacagcatctggccagtatggacaatgggccccaaagttggctcgcctccattactccggtagcataaatgcgtggtccactaaagaacctttcagctggattaaggtcgatcttcttgcccccatgatcatccacggcattaagacacagggagcgaggcagaaattctcctccctctacatctcacagttcattattatgtatagtttggacggcaagaagtggcaaacttatagaggtaacagtactggaacagacatggtgttcttcggcaacgttgatagctctggcatcaaacacaacatctttaatcctcccataatagctcggtacatcagattgcatccgacccactacagcattaggagtacactccgaatggagcttatgggttgcgacttgaattcctgttcaatgccactcggaatggagtctaaagccatctctgatgcacagataaccgccagtagctactttacgaacatgtttgctacgtggtcaccctctaaggcaaggcttcatttgcaaggccggtctaatgcctggagacctcaggtgaacaacccgaaagaatggctccaggtggactttcagaagaccatgaaagtaacaggtgtcactactcagggagttaagtccttggatactagcatgtatgtgaaggagttccttatttcctcatcacaagatggccaccagtggaccctcttctttcagaatggtaaggtcaaagtgtttcagggcaatcaagacagcttcacacccgtggtgaacagtcttgatcctccactcttgacacgataccttcgaatccatccacagtcttgggagcaccagattgcattgcgcatggaagtacttggatgcgaggctcaggacctctac

SEQ ID NO: 1712 - protein, 1457 aa, synthetic construct
  REGION 1..1457: note = Variant of human B-domain deleted Factor VIII
MQIELSTCFFLCLLRFCFSATRRYYLGAVELSWDYMQSDLGELPVDARFPPRVPKSFPFNTSQVYKKTLFVEFTDHLFNIAKPRPPWMGLLGPTIQAEVYDTVVITLKNMASHPVSLHAVGVSYWKASEGAEYDDQTSQREKEDDKVFPGGSHTYVWQVLKENGPMASDPPCLTYSYLSHVDLVKDLNSGLIGALLVCREGSLAKEKTQTLAKFILLFAVFDEGKSWHSETKNSLMQDRDAASARAWPKMHTVNGYVNRTLPGLIGCHRKSVYWHVIGMGTTPEVHSIFLEGHTFLVRNHRQASLGISPITFLTAQTLLRDLGQFLLFCHIPSHQHDGMEAYVKVDSCPEEPQLRMKNNEEAEDYDDDLTDSEMDVVRFDDDNSPSIIQARSGAKKHPKTWVHYIAAEEEDWDYAPLVLAPDDRSYKSQYLNNGPQRIGRKYKKVRFMAYTDETFKTREAIQHESGILGPLLYGEVGDTLLIIFKNQASRPYNIYPHGITDVRPLYSRRLPKGVKHLKDFPILPGEIFKYKWTITVEDGPTKSDPRCLTRYYSSFVNWERDLASGLIGPLLICYKESVDQRGNQIMSDKRNVILFSVFDENRSWYLTENIQRFLPNPAGVQLEDPEFQASNIMHSINGYVFDSLQLSVCLHEVAYWYILSIGAQTDFLSVFFSGYTFKHKGVYEDTLTLFPFSGETVFMQMENPGLWILGCHNSDFRNRGMTALLKVSSCDWNTGDYYEDSYEDISAYFDSKNNAIEPRSFSQNPPVLKRHQREGTRTTLQSDQEEIDYDDTISVEMKKEDFDIYDEDENQSPRSFQKKTRHYFIAAVERLWDYGMSSSPHVLRNRAQSGSVPQFKKVVFQEFTDGSFTQPLYRGELNEHLGLLGPYIRAEVEDNIMVTFRNQASRPYSFYSSLISYEEDQRQGAEPRKNFVKPNETKTYFWKVQHHMAPTKDEFDCKAWAYFSDVDLEKDVHSGLIGPLLVCHTNTLNPAHGRQVTVQEFALFFTIFDETKSWYFTENMERNCRAPCNIQMEDPTFKENYRFHAINGYIMDTLPGLVMAQDQRIRWYLLSMGSNENIHSIHFSGHVFTVRKKEEYKMALYNLYPGVFETVEMLPSKAGIWRVECLIGEHLHAGMSTLFLVYSNKCQNPLGMASGHIRDFQITASGQYGQWAPKLARLHYSGSINAWSTKEPFSWIKVDLLAPMIIHGIKTQGARQKFSSLYISQFIIMYSLDGKKWQTYRGNSTGTDMVFFGNVDSSGIKHNIFNPPIIARYIRLHPTHYSIRSTLRMELMGCDLNSCSMPLGMESKAISDAQITASSYFTNMFATWSPSKARLHLQGRSNAWRPQVNNPKEWLQVDFQKTMKVTGVTTQGVKSLDTSMYVKEFLISSSQDGHQWTLFFQNGKVKVFQGNQDSFTPVVNSLDPPLLTRYLRIHPQSWEHQIALRMEVLGCEAQDLY

SEQ ID NO: 1713 - DNA, 4371 bp, synthetic construct
  misc_feature 1..4371: note = Variant of human B-domain deleted Factor VIII
  source 1..4371: mol_type = other DNA
atgcagattgaactgtctacctgcttcttcctctgtttgctgaggttctgctttagcgccactagacggtactaccttggcgctgtggagctgtcctgggactatatgcagagtgatttgggagagcttcccgtcgacgcacgatttcctcctcgcgttccaaagtcatttccctttaacacaagccaggtgtacaagaagacgctcttcgtcgaattcaccgatcacctgttcaatatcgccaaacccagaccaccatggatgggtcttttggggcctaccatacaagcggaggtgtatgacacagttgttatcactctcaagaacatggcttctcatccggtaagtcttcacgcagtgggcgtgtcctactggaaagcttcagaaggagccgagtatgatgatcagacatcccagagggagaaagaagacgacaaggtatttccaggtgggtctcatacctatgtgtggcaagtgctcaaagagaatggccctatggcaagcgatccgccgtgtttgacttacagctacctttcacacgttgacctcgtcaaggacctcaactccgggttgattggagccttgttggtatgcagggaaggatctcttgccaaagagaagacacagaccctggccaagtttatccttctctttgctgtgttcgatgagggcaaaagttggcatagcgaaacgaagaattccctcatgcaggatcgcgacgcagccagcgccagagcttggcccaagatgcacactgtgaacggatatgtcaataggacgcttcctggcttgattgggtgtcatcggaaaagtgtctactggcacgtgatcggaatggggacaacaccagaggtccactccatatttctcgaaggccataccttccttgttcgaaaccacagacaggcatccttggggatctctcccattacctttctcactgcccaaacgctccttcgtgacttgggtcagttccttctcttttgccatatcccgtcacaccagcatgatggtatggaagcttatgtgaaagtcgacagttgtcctgaggagccacagttgcgcatgaagaataatgaagaagccgaggattacgacgacgatctcaccgattctgagatggacgtggtgaggtttgatgacgacaactctccctccatcattcaagctcggagcggggcgaagaaacaccccaagacttgggtccactatatagcggcggaagaggaggattgggattacgctcctcttgtattggcaccagatgaccgctcatacaaaagccagtacctcaacaacggaccgcagagaattggccggaagtataagaaagtgcgatttatggcctatacagacgaaacctttaagacaagggaggccatccagcatgagagtgggattttgggacctcttctttacggcgaagttggtgataccctcctcatcatcttcaagaatcaagcttctcgcccctataacatttacccacacgggatcactgacgttaggcctttgtatagcagaagacttcccaaaggcgtgaagcatctcaaagacttccccattttgccaggcgagatctttaagtacaaatggaccattacagtggaagatggaccgactaaatcagaccctcgatgccttacgcggtactattcctccttcgtgaattgggagagagatttggcaagcggactcataggaccactcctcatctgttacaaggaatctgtagaccagaggggtaaccagattatgagtgataaacgcaatgtgatcctttttagcgtcttcgacgagaaccggtcctggtacttgaccgagaatatacaaaggttccttcccaaccccgcaggcgttcagttggaagaccctgagtttcaggccagcaatattatgcactcaatcaacggctatgtgtttgatagtctccagctttctgtttgcctccatgaagtagcctattggtacatcttgtcaattggtgctcaaacagacttcctctccgtcttcttctccggctacacctttaagcacaagggcgtgtatgaggacactctcacactctttccattttctggagaaaccgtgttcatgagcatggagaatccaggcctttggatcttgggttgccacaacagtgattttcgcaatcggggaatgactgctctcctcaaagtcagcagctgtgattggaacacaggcgactattacgaagattcttacgaggacataagtgcctactttgactccaagaataacgccattgagcccagatcattctcccagaatcctcccgtgcttaaaaggcatcagcgcgaaggtaccagaactactcttcagtctgatcaagaggagattgactatgacgacaccattagcgtggaaatgaagaaggaggatttcgatatctatgacgaagatgagaaccagtctccgcggagctttcagaagaagacgcgacactacttcattgcagcagtcgaaaggctttgggactacggtatgtcatcatcccctcatgtgttgcgcaatagagctcagagtggaagtgttccacagttcaagaaagtcgtctttcaagagtttacagatggcagcttcacacagcctctctatcggggcgagcttaacgaacatttgggactccttggtccctatatccgagccgaagtggaggacaacattatggttacctttaggaatcaagcctctcgcccctacagcttctactcctccctcatcagttatgaggaggatcagagacaaggcgctgaaccacggaagaactttgtgaaaccgaatgagacgaagacctacttctggaaagtacagcaccacatggcccccacaaaagacgaattcgattgcaaagcatgggcgtatttttcagacgttgacttggagaaagatgtacattcaggacttattggtcctttgttggtgtgtcacactaacactctcaatccagcccatggcaggcaggtgacagtccaggaattcgctcttttctttaccatctttgatgagaccaagtcctggtacttcacggaaaacatggagcgcaattgcagagccccctgtaacatacagatggaggaccctacctttaaggaaaattatcggttccacgcaatcaacggatacattatggatacactccctggccttgtgatggctcaggaccaacgaatcaggtggtacctcctcagcatgggttctaatgagaacatacactccattcacttttcaggacatgtgttcactgtccggaaggctgaagagtataagatggccctctacaatttgtatccaggcgtgtttgagaccgttgaaatgcttccctctaaagctggcatctggagagtagagtgcttgatcggagaacatcttcacgcaggtatgagcaccttgttcctcgtgtacagcaacaaatgtcagaatccacttggcatggccagtggacacattcgcgactttcagatcacagcatctggccagtatggacaatgggccccaaagttggctcgcctccattactccggtagcataaatgcgtggtccactaaagaacctttcagctggattaaggtcgatcttcttgcccccatgatcatccacggcattaagacacagggagcgaggcagaaattctcctccctctacatctcacagttcattattatgtatagtttggacggcaagaagtggcaaacttatagaggtaacagtactggaacagacatggtgttcttcggcaacgttgatagctctggcatcaaacacaacatctttaatcctcccataatagctcggtacatcagattgcatccgacccactacagcattaggagtacactccgaatggagcttatgggttgcgacttgaattcctgttcaatgccactcggaatggagtctaaagccatctctgatgcacagataaccgccagtagctactttacgaacatgtttgctacgtggtcaccctctaaggcaaggcttcatttgcaaggccggtctaatgcctggagacctcaggtgaacaacccgaaagaatggctccaggtggactttcagaagaccatgaaagtaacaggtgtcactactcagggagttaagtccttggatactagcatgtatgtgaaggagttccttatttcctcatcacaagatggccaccagtggaccctcttctttcagaatggtaaggtcaaagtgtttcagggcaatcaagacagcttcacacccgtggtgaacagtcttgatcctccactcttgacacgataccttcgaatccatccacagtcttgggagcaccagattgcattgcgcatggaagtacttggatgcgaggctcaggacctctac

SEQ ID NO: 1714 - protein, 1457 aa, synthetic construct
  REGION 1..1457: note = Variant of human B-domain deleted Factor VIII
MQIELSTCFFLCLLRFCFSATRRYYLGAVELSWDYMQSDLGELPVDARFPPRVPKSFPFNTSQVYKKTLFVEFTDHLFNIAKPRPPWMGLLGPTIQAEVYDTVVITLKNMASHPVSLHAVGVSYWKASEGAEYDDQTSQREKEDDKVFPGGSHTYVWQVLKENGPMASDPPCLTYSYLSHVDLVKDLNSGLIGALLVCREGSLAKEKTQTLAKFILLFAVFDEGKSWHSETKNSLMQDRDAASARAWPKMHTVNGYVNRTLPGLIGCHRKSVYWHVIGMGTTPEVHSIFLEGHTFLVRNHRQASLGISPITFLTAQTLLRDLGQFLLFCHIPSHQHDGMEAYVKVDSCPEEPQLRMKNNEEAEDYDDDLTDSEMDVVRFDDDNSPSIIQARSGAKKHPKTWVHYIAAEEEDWDYAPLVLAPDDRSYKSQYLNNGPQRIGRKYKKVRFMAYTDETFKTREAIQHESGILGPLLYGEVGDTLLIIFKNQASRPYNIYPHGITDVRPLYSRRLPKGVKHLKDFPILPGEIFKYKWTITVEDGPTKSDPRCLTRYYSSFVNWERDLASGLIGPLLICYKESVDQRGNQIMSDKRNVILFSVFDENRSWYLTENIQRFLPNPAGVQLEDPEFQASNIMHSINGYVFDSLQLSVCLHEVAYWYILSIGAQTDFLSVFFSGYTFKHKGVYEDTLTLFPFSGETVFMSMENPGLWILGCHNSDFRNRGMTALLKVSSCDWNTGDYYEDSYEDISAYFDSKNNAIEPRSFSQNPPVLKRHQREGTRTTLQSDQEEIDYDDTISVEMKKEDFDIYDEDENQSPRSFQKKTRHYFIAAVERLWDYGMSSSPHVLRNRAQSGSVPQFKKVVFQEFTDGSFTQPLYRGELNEHLGLLGPYIRAEVEDNIMVTFRNQASRPYSFYSSLISYEEDQRQGAEPRKNFVKPNETKTYFWKVQHHMAPTKDEFDCKAWAYFSDVDLEKDVHSGLIGPLLVCHTNTLNPAHGRQVTVQEFALFFTIFDETKSWYFTENMERNCRAPCNIQMEDPTFKENYRFHAINGYIMDTLPGLVMAQDQRIRWYLLSMGSNENIHSIHFSGHVFTVRKAEEYKMALYNLYPGVFETVEMLPSKAGIWRVECLIGEHLHAGMSTLFLVYSNKCQNPLGMASGHIRDFQITASGQYGQWAPKLARLHYSGSINAWSTKEPFSWIKVDLLAPMIIHGIKTQGARQKFSSLYISQFIIMYSLDGKKWQTYRGNSTGTDMVFFGNVDSSGIKHNIFNPPIIARYIRLHPTHYSIRSTLRMELMGCDLNSCSMPLGMESKAISDAQITASSYFTNMFATWSPSKARLHLQGRSNAWRPQVNNPKEWLQVDFQKTMKVTGVTTQGVKSLDTSMYVKEFLISSSQDGHQWTLFFQNGKVKVFQGNQDSFTPVVNSLDPPLLTRYLRIHPQSWEHQIALRMEVLGCEAQDLY

SEQ ID NO: 1715 - DNA, 4371 bp, synthetic construct
  misc_feature 1..4371: note = Variant of human B-domain deleted Factor VIII
  source 1..4371: mol_type = other DNA
atgcagattgaactgtctacctgcttcttcctctgtttgctgaggttctgctttagcgccactagacggtactaccttggcgctgtggagctgtcctgggactatatgcagagtgatttgggagagcttcccgtcgacgcacgatttcctcctcgcgttccaaagtcatttccctttaacacaagccaggtgtacaagaagacgctcttcgtcgaattcaccgatcacctgttcaatatcgccaaacccagaccaccatggatgggtcttttggggcctaccatacaagcggaggtgtatgacacagttgttatcactctcaagaacatggcttctcatccggtaagtcttcacgcagtgggcgtgtcctactggaaagcttcagaaggagccgagtatgatgatcagacatcccagagggagaaagaagacgacaaggtatttccaggtgggtctcatacctatgtgtggcaagtgctcaaagagaatggccctatggcaagcgatccgccgtgtttgacttacagctacctttcacacgttgacctcgtcaaggacctcaactccgggttgattggagccttgttggtatgcagggaaggatctcttgccaaagagaagacacagaccctggccaagtttatccttctctttgctgtgttcgatgagggcaaaagttggcatagcgaaacgaagaattccctcatgcaggatcgcgacgcagccagcgccagagcttggcccaagatgcacactgtgaacggatatgtcaataggacgcttcctggcttgattgggtgtcatcggaaaagtgtctactggcacgtgatcggaatggggacaacaccagaggtccactccatatttctcgaaggccataccttccttgttcgaaaccacagacaggcatccttggggatctctcccattacctttctcactgcccaaacgctccttcgtgacttgggtcagttccttctcttttgccatatcccgtcacaccagcatgatggtatggaagcttatgtgaaagtcgacagttgtcctgaggagccacagttgcgcatgaagaataatgaagaagccgaggattacgacgacgatctcaccgattctgagatggacgtggtgaggtttgatgacgacaactctccctccatcattcaagctcggagcggggcgaagaaacaccccaagacttgggtccactatatagcggcggaagaggaggattgggattacgctcctcttgtattggcaccagatgaccgctcatacaaaagccagtacctcaacaacggaccgcagagaattggccggaagtataagaaagtgcgatttatggcctatacagacgaaacctttaagacaagggaggccatccagcatgagagtgggattttgggacctcttctttacggcgaagttggtgataccctcctcatcatcttcaagaatcaagcttctcgcccctataacatttacccacacgggatcactgacgttaggcctttgtatagcagaagacttcccaaaggcgtgaagcatctcaaagacttccccattttgccaggcgagatctttaagtacaaatggaccattacagtggaagatggaccgactaaatcagaccctcgatgccttacgcggtactattcctccttcgtgaattgggagagagatttggcaagcggactcataggaccactcctcatctgttacaaggaatctgtagaccagaggggtaacgcgattatgagtgataaacgcaatgtgatcctttttagcgtcttcgacgagaaccggtcctggtacttgaccgagaatatacaaaggttccttcccaaccccgcaggcgttcagttggaagaccctgagtttcaggccagcaatattatgcactcaatcaacggctatgtgtttgatagtctccagctttctgtttgcctccatgaagtagcctattggtacatcttgtcaattggtgctcaaacagacttcctctccgtcttcttctccggctacacctttaagcacaagggcgtgtatgaggacactctcacactctttccattttctggagaaaccgtgttcatgagcatggagaatccaggcctttggatcttgggttgccacaacagtgattttcgcaatcggggaatgactgctctcctcaaagtcagcagctgtgattggaacacaggcgactattacgaagattcttacgaggacataagtgcctactttgactccaagaataacgccattgagcccagatcattctcccagaatcctcccgtgcttaaaaggcatcagcgcgaaggtaccagaactactcttcagtctgatcaagaggagattgactatgacgacaccattagcgtggaaatgaagaaggaggatttcgatatctatgacgaagatgagaaccagtctccgcggagctttcagaagaagacgcgacactacttcattgcagcagtcgaaaggctttgggactacggtatgtcatcatcccctcatgtgttgcgcaatagagctcagagtggaagtgttccacagttcaagaaagtcgtctttcaagagtttacagatggcagcttcacacagcctctctatcggggcgagcttaacgaacatttgggactccttggtccctatatccgagccgaagtggaggacaacattatggttacctttaggaatcaagcctctcgcccctacagcttctactcctccctcatcagttatgaggaggatcagagacaaggcgctgaaccacggaagaactttgtgaaaccgaatgagacgaagacctacttctggaaagtacagcaccacatggcccccacaaaagacgaattcgattgcaaagcatgggcgtatttttcagacgttgacttggagaaagatgtacattcaggacttattggtcctttgttggtgtgtcacactaacactctcaatccagcccatggcaggcaggtgacagtccaggaattcgctcttttctttaccatctttgatgagaccaagtcctggtacttcacggaaaacatggagcgcaattgcagagccccctgtaacatacagatggaggaccctacctttaaggaaaattatcggttccacgcaatcaacggatacattatggatacactccctggccttgtgatggctcaggaccaacgaatcaggtggtacctcctcagcatgggttctaatgagaacatacactccattcacttttcaggacatgtgttcactgtccggaagaaagaagagtataagatggccctctacaatttgtatccaggcgtgtttgagaccgttgaaatgcttccctctaaagctggcatctggagagtagagtgcttgatcggagaacatcttcacgcaggtatgagcaccttgttcctcgtgtacagcaacaaatgtcagaatccacttggcatggccagtggacacattcgcgactttcagatcacagcatctggccagtatggacaatgggccccaaagttggctcgcctccattactccggtagcataaatgcgtggtccactaaagaacctttcagctggattaaggtcgatcttcttgcccccatgatcatccacggcattaagacacagggagcgaggcagaaattctcctccctctacatctcacagttcattattatgtatagtttggacggcaagaagtggcaaacttatagaggtaacagtactggaacagacatggtgttcttcggcaacgttgatagctctggcatcaaacacaacatctttaatcctcccataatagctcggtacatcagattgcatccgacccactacagcattaggagtacactccgaatggagcttatgggttgcgacttgaattcctgttcaatgccactcggaatggagtctaaagccatctctgatgcacagataaccgccagtagctactttacgaacatgtttgctacgtggtcaccctctaaggcaaggcttcatttgcaaggccggtctaatgcctggagacctcaggtgaacaacccgaaagaatggctccaggtggactttcagaagaccatgaaagtaacaggtgtcactactcagggagttaagtccttggatactagcatgtatgtgaaggagttccttatttcctcatcacaagatggccaccagtggaccctcttctttcagaatggtaaggtcaaagtgtttcagggcaatcaagacagcttcacacccgtggtgaacagtcttgatcctccactcttgacacgataccttcgaatccatccacagtcttgggagcaccagattgcattgcgcatggaagtacttggatgcgaggctcaggacctctac

SEQ ID NO: 1716 - protein, 1457 aa, synthetic construct
  REGION 1..1457: note = Variant of human B-domain deleted Factor VIII
MQIELSTCFFLCLLRFCFSATRRYYLGAVELSWDYMQSDLGELPVDARFPPRVPKSFPFNTSQVYKKTLFVEFTDHLFNIAKPRPPWMGLLGPTIQAEVYDTVVITLKNMASHPVSLHAVGVSYWKASEGAEYDDQTSQREKEDDKVFPGGSHTYVWQVLKENGPMASDPPCLTYSYLSHVDLVKDLNSGLIGALLVCREGSLAKEKTQTLAKFILLFAVFDEGKSWHSETKNSLMQDRDAASARAWPKMHTVNGYVNRTLPGLIGCHRKSVYWHVIGMGTTPEVHSIFLEGHTFLVRNHRQASLGISPITFLTAQTLLRDLGQFLLFCHIPSHQHDGMEAYVKVDSCPEEPQLRMKNNEEAEDYDDDLTDSEMDVVRFDDDNSPSIIQARSGAKKHPKTWVHYIAAEEEDWDYAPLVLAPDDRSYKSQYLNNGPQRIGRKYKKVRFMAYTDETFKTREAIQHESGILGPLLYGEVGDTLLIIFKNQASRPYNIYPHGITDVRPLYSRRLPKGVKHLKDFPILPGEIFKYKWTITVEDGPTKSDPRCLTRYYSSFVNWERDLASGLIGPLLICYKESVDQRGNAIMSDKRNVILFSVFDENRSWYLTENIQRFLPNPAGVQLEDPEFQASNIMHSINGYVFDSLQLSVCLHEVAYWYILSIGAQTDFLSVFFSGYTFKHKGVYEDTLTLFPFSGETVFMSMENPGLWILGCHNSDFRNRGMTALLKVSSCDWNTGDYYEDSYEDISAYFDSKNNAIEPRSFSQNPPVLKRHQREGTRTTLQSDQEEIDYDDTISVEMKKEDFDIYDEDENQSPRSFQKKTRHYFIAAVERLWDYGMSSSPHVLRNRAQSGSVPQFKKVVFQEFTDGSFTQPLYRGELNEHLGLLGPYIRAEVEDNIMVTFRNQASRPYSFYSSLISYEEDQRQGAEPRKNFVKPNETKTYFWKVQHHMAPTKDEFDCKAWAYFSDVDLEKDVHSGLIGPLLVCHTNTLNPAHGRQVTVQEFALFFTIFDETKSWYFTENMERNCRAPCNIQMEDPTFKENYRFHAINGYIMDTLPGLVMAQDQRIRWYLLSMGSNENIHSIHFSGHVFTVRKKEEYKMALYNLYPGVFETVEMLPSKAGIWRVECLIGEHLHAGMSTLFLVYSNKCQNPLGMASGHIRDFQITASGQYGQWAPKLARLHYSGSINAWSTKEPFSWIKVDLLAPMIIHGIKTQGARQKFSSLYISQFIIMYSLDGKKWQTYRGNSTGTDMVFFGNVDSSGIKHNIFNPPIIARYIRLHPTHYSIRSTLRMELMGCDLNSCSMPLGMESKAISDAQITASSYFTNMFATWSPSKARLHLQGRSNAWRPQVNNPKEWLQVDFQKTMKVTGVTTQGVKSLDTSMYVKEFLISSSQDGHQWTLFFQNGKVKVFQGNQDSFTPVVNSLDPPLLTRYLRIHPQSWEHQIALRMEVLGCEAQDLY

SEQ ID NO: 1717 - DNA, 4371 bp, synthetic construct
  misc_feature 1..4371: note = Variant of human B-domain deleted Factor VIII
  source 1..4371: mol_type = other DNA
atgcagattgaactgtctacctgcttcttcctctgtttgctgaggttctgctttagcgccactagacggtactaccttggcgctgtggagctgtcctgggactatatgcagagtgatttgggagagcttcccgtcgacgcacgatttcctcctcgcgttccaaagtcatttccctttaacacaagccaggtgtacaagaagacgctcttcgtcgaattcaccgatcacctgttcaatatcgccaaacccagaccaccatggatgggtcttttggggcctaccatacaagcggaggtgtatgacacagttgttatcactctcaagaacatggcttctcatccggtaagtcttcacgcagtgggcgtgtcctactggaaagcttcagaaggagccgagtatgatgatcagacatcccagagggagaaagaagacgacaaggtatttccaggtgggtctcatacctatgtgtggcaagtgctcaaagagaatggccctatggcaagcgatccgccgtgtttgacttacagctacctttcacacgttgacctcgtcaaggacctcaactccgggttgattggagccttgttggtatgcagggaaggatctcttgccaaagagaagacacagaccctggccaagtttatccttctctttgctgtgttcgatgagggcaaaagttggcatagcgaaacgaagaattccctcatgcaggatcgcgacgcagccagcgccagagcttggcccaagatgcacactgtgaacggatatgtcaataggacgcttcctggcttgattgggtgtcatcggaaaagtgtctactggcacgtgatcggaatggggacaacaccagaggtccactccatatttctcgaaggccataccttccttgttcgaaaccacagacaggcatccttggggatctctcccattacctttctcactgcccaaacgctccttcgtgacttgggtcagttccttctcttttgccatatcccgtcacaccagcatgatggtatggaagcttatgtgaaagtcgacagttgtcctgaggagccacagttgcgcatgaagaataatgaagaagccgaggattacgacgacgatctcaccgattctgagatggacgtggtgaggtttgatgacgacaactctccctccatcattcaagctcggagcggggcgaagaaacaccccaagacttgggtccactatatagcggcggaagaggaggattgggattacgctcctcttgtattggcaccagatgaccgctcatacaaaagccagtacctcaacaacggaccgcagagaattggccggaagtataagaaagtgcgatttatggcctatacagacgaaacctttaagacaagggaggccatccagcatgagagtgggattttgggacctcttctttacggcgaagttggtgataccctcctcatcatcttcaagaatcaagcttctcgcccctataacatttacccacacgggatcactgacgttaggcctttgtatagcagaagacttcccaaaggcgtgaagcatctcaaagacttccccattttgccaggcgagatctttaagtacaaatggaccattacagtggaagatggaccgactaaatcagaccctcgatgccttacgcggtactattcctccttcgtgaattgggagagagatttggcaagcggactcataggaccactcctcatctgttacaaggaatctgtagaccagaggggtaaccagattatgagtgataaacgcaatgtgatcctttttagcgtcttcgacgagaaccggtcctggtacttgaccgagaatatacaaaggttccttcccaaccccgcaggcgttcagttggaagaccctgagtttcaggccagcaatattatgcactcaatcaacggctatgtgtttgatagtctccagctttctgtttgcctccatgaagtagcctattggtacatcttgtcaattggtgctcaaacagacttcctctccgtcttcttctccggctacacctttaagcacaagggcgtgtatgaggacactctcacactctttccattttctggagaaaccgtgttcatgagcatggagaatccaggcctttggatcttgggttgccacaacagtgattttcgcaatcggggaatgactgctctcctcaaagtcagcagctgtgattggaacacaggcgactattacgaagattcttacgaggacataagtgcctactttgactccaagaataacgccattgagcccagatcattctcccagaatcctcccgtgcttaaaaggcatcagcgcgaaggtaccagaactactcttcagtctgatcaagaggagattgactatgacgacaccattagcgtggaaatgaagaaggaggatttcgatatctatgacgaagatgagaaccagtctccgcggagctttcagaagaagacgcgacactacttcattgcagcagtcgaaaggctttgggactacggtatgtcatcatcccctcatgtgttgcgcaatagagctcagagtggaagtgttccacagttcaagaaagtcgtctttcaagagtttacagatggcagcttcacacagcctctctatcggggcgagcttaacgaacatttgggactccttggtccctatatccgagccgaagtggaggacaacattatggttacctttaggaatcaagcctctcgcccctacagcttctactcctccctcatcagttattcggaggatcagagacaaggcgctgaaccacggaagaactttgtgaaaccgaatgagacgaagacctacttctggaaagtacagcaccacatggcccccacaaaagacgaattcgattgcaaagcatgggcgtatttttcagacgttgacttggagaaagatgtacattcaggacttattggtcctttgttggtgtgtcacactaacactctcaatccagcccatggcaggcaggtgacagtccaggaattcgctcttttctttaccatctttgatgagaccaagtcctggtacttcacggaaaacatggagcgcaattgcagagccccctgtaacatacagatggaggaccctacctttaaggaaaattatcggttccacgcaatcaacggatacattatggatacactccctggccttgtgatggctcaggaccaacgaatcaggtggtacctcctcagcatgggttctaatgagaacatacactccattcacttttcaggacatgtgttcactgtccggaagaaagaagagtataagatggccctctacaatttgtatccaggcgtgtttgagaccgttgaaatgcttccctctaaagctggcatctggagagtagagtgcttgatcggagaacatcttcacgcaggtatgagcaccttgttcctcgtgtacagcaacaaatgtcagaatccacttggcatggccagtggacacattcgcgactttcagatcacagcatctggccagtatggacaatgggccccaaagttggctcgcctccattactccggtagcataaatgcgtggtccactaaagaacctttcagctggattaaggtcgatcttcttgcccccatgatcatccacggcattaagacacagggagcgaggcagaaattctcctccctctacatctcacagttcattattatgtatagtttggacggcaagaagtggcaaacttatagaggtaacagtactggaacagacatggtgttcttcggcaacgttgatagctctggcatcaaacacaacatctttaatcctcccataatagctcggtacatcagattgcatccgacccactacagcattaggagtacactccgaatggagcttatgggttgcgacttgaattcctgttcaatgccactcggaatggagtctaaagccatctctgatgcacagataaccgccagtagctactttacgaacatgtttgctacgtggtcaccctctaaggcaaggcttcatttgcaaggccggtctaatgcctggagacctcaggtgaacaacccgaaagaatggctccaggtggactttcagaagaccatgaaagtaacaggtgtcactactcagggagttaagtccttggatactagcatgtatgtgaaggagttccttatttcctcatcacaagatggccaccagtggaccctcttctttcagaatggtaaggtcaaagtgtttcagggcaatcaagacagcttcacacccgtggtgaacagtcttgatcctccactcttgacacgataccttcgaatccatccacagtcttgggagcaccagattgcattgcgcatggaagtacttggatgcgaggctcaggacctctac

SEQ ID NO: 1718 - protein, 1457 aa, synthetic construct
  REGION 1..1457: note = Variant of human B-domain deleted Factor VIII
MQIELSTCFFLCLLRFCFSATRRYYLGAVELSWDYMQSDLGELPVDARFPPRVPKSFPFNTSQVYKKTLFVEFTDHLFNIAKPRPPWMGLLGPTIQAEVYDTVVITLKNMASHPVSLHAVGVSYWKASEGAEYDDQTSQREKEDDKVFPGGSHTYVWQVLKENGPMASDPPCLTYSYLSHVDLVKDLNSGLIGALLVCREGSLAKEKTQTLAKFILLFAVFDEGKSWHSETKNSLMQDRDAASARAWPKMHTVNGYVNRTLPGLIGCHRKSVYWHVIGMGTTPEVHSIFLEGHTFLVRNHRQASLGISPITFLTAQTLLRDLGQFLLFCHIPSHQHDGMEAYVKVDSCPEEPQLRMKNNEEAEDYDDDLTDSEMDVVRFDDDNSPSIIQARSGAKKHPKTWVHYIAAEEEDWDYAPLVLAPDDRSYKSQYLNNGPQRIGRKYKKVRFMAYTDETFKTREAIQHESGILGPLLYGEVGDTLLIIFKNQASRPYNIYPHGITDVRPLYSRRLPKGVKHLKDFPILPGEIFKYKWTITVEDGPTKSDPRCLTRYYSSFVNWERDLASGLIGPLLICYKESVDQRGNQIMSDKRNVILFSVFDENRSWYLTENIQRFLPNPAGVQLEDPEFQASNIMHSINGYVFDSLQLSVCLHEVAYWYILSIGAQTDFLSVFFSGYTFKHKGVYEDTLTLFPFSGETVFMSMENPGLWILGCHNSDFRNRGMTALLKVSSCDWNTGDYYEDSYEDISAYFDSKNNAIEPRSFSQNPPVLKRHQREGTRTTLQSDQEEIDYDDTISVEMKKEDFDIYDEDENQSPRSFQKKTRHYFIAAVERLWDYGMSSSPHVLRNRAQSGSVPQFKKVVFQEFTDGSFTQPLYRGELNEHLGLLGPYIRAEVEDNIMVTFRNQASRPYSFYSSLISYSEDQRQGAEPRKNFVKPNETKTYFWKVQHHMAPTKDEFDCKAWAYFSDVDLEKDVHSGLIGPLLVCHTNTLNPAHGRQVTVQEFALFFTIFDETKSWYFTENMERNCRAPCNIQMEDPTFKENYRFHAINGYIMDTLPGLVMAQDQRIRWYLLSMGSNENIHSIHFSGHVFTVRKKEEYKMALYNLYPGVFETVEMLPSKAGIWRVECLIGEHLHAGMSTLFLVYSNKCQNPLGMASGHIRDFQITASGQYGQWAPKLARLHYSGSINAWSTKEPFSWIKVDLLAPMIIHGIKTQGARQKFSSLYISQFIIMYSLDGKKWQTYRGNSTGTDMVFFGNVDSSGIKHNIFNPPIIARYIRLHPTHYSIRSTLRMELMGCDLNSCSMPLGMESKAISDAQITASSYFTNMFATWSPSKARLHLQGRSNAWRPQVNNPKEWLQVDFQKTMKVTGVTTQGVKSLDTSMYVKEFLISSSQDGHQWTLFFQNGKVKVFQGNQDSFTPVVNSLDPPLLTRYLRIHPQSWEHQIALRMEVLGCEAQDLY

SEQ ID NO: 1719 - DNA, 4371 bp, synthetic construct
  misc_feature 1..4371: note = Variant of human B-domain deleted Factor VIII
  source 1..4371: mol_type = other DNA
atgcagattgaactgtctacctgcttcttcctctgtttgctgaggttctgctttagcgccactagacggtactaccttggcgctgtggagctgtcctgggactatatgcagagtgatttgggagagcttcccgtcgacgcacgatttcctcctcgcgttccaaagtcatttccctttaacacaagccaggtgtacaagaagacgctcttcgtcgaattcaccgatcacctgttcaatatcgccaaacccagaccaccatggatgggtcttttggggcctaccatacaagcggaggtgtatgacacagttgttatcactctcaagaacatggcttctcatccggtaagtcttcacgcagtgggcgtgtcctactggaaagcttcagaaggagccgagtatgatgatcagacatcccagagggagaaagaagacgacaaggtatttccaggtgggtctcatacctatgtgtggcaagtgctcaaagagaatggccctatggcaagcgatccgccgtgtttgacttacagctacctttcacacgttgacctcgtcaaggacctcaactccgggttgattggagccttgttggtatgcagggaaggatctcttgccaaagagaagacacagaccctggccaagtttatccttctctttgctgtgttcgatgagggcaaaagttggcatagcgaaacgaagaattccctcatgcaggatcgcgacgcagccagcgccagagcttggcccaagatgcacactgtgaacggatatgtcaataggacgcttcctggcttgattgggtgtcatcggaaaagtgtctactggcacgtgatcggaatggggacaacaccagaggtccactccatatttctcgaaggccataccttccttgttcgaaaccacagacaggcatccttggggatctctcccattacctttctcactgcccaaacgctccttcgtgacttgggtcagttccttctcttttgccatatcccgtcacaccagcatgatggtatggaagcttatgtgaaagtcgacagttgtcctgaggagccacagttgcgcatgaagaataatgaagaagccgaggattacgacgacgatctcaccgattctgagatggacgtggtgaggtttgatgacgacaactctccctccatcattcaagctcggagcggggcgaagaaacaccccaagacttgggtccactatatagcggcggaagaggaggattgggattacgctcctcttgtattggcaccagatgaccgctcatacaaaagccagtacctcaacaacggaccgcagagaattggccggaagtataagaaagtgcgatttatggcctatacagacgaaacctttaagacaagggaggccatccagcatgagagtgggattttgggacctcttctttacggcgaagttggtgataccctcctcatcatcttcaagaatcaagcttctcgcccctataacatttacccacacgggatcactgacgttaggcctttgtatagcagaagacttcccaaaggcgtgaagcatctcaaagacttccccattttgccaggcgagatctttaagtacaaatggaccattacagtggaagatggaccgactaaatcagaccctcgatgccttacgcggtactattcctccttcgtgaattgggagagagatttggcaagcggactcataggaccactcctcatctgttacaaggaatctgtagaccagaggggtaaccagattatgagtgataaacgcaatgtgatcctttttagcgtcttcgacgagaaccggtcctggtacttgaccgagaatatacaaaggttccttcccaaccccgcaggcgttcagttggaagaccctgagtttcaggccagcaatattatgcactcaatcaacggctatgtgtttgatagtctccagctttctgtttgcctccatgaagtagcctattggtacatcttgtcaattggtgctcaaacagacttcctctccgtcttcttctccggctacacctttaagcacaagggcgtgtatgaggacactctcacactctttccattttctggagaaaccgtgttcatgagcatggagaatccaggcctttggatcttgggttgccacaacagtgattttcgcaatcggggaatgactgctctcctcaaagtcagcagctgtgattggaacacaggcgactattacgaagattcttacgaggacataagtgcctactttgactccaagaataacgccattgagcccagatcattctcccagaatcctcccgtgcttaaaaggcatcagcgcgaaggtaccagaactactcttcagtctgatcaagaggagattgactatgacgacaccattagcgtggaaatgaagaaggaggatttcgatatctatgacgaagatgagaaccagtctccgcggagctttcagaagaagacgcgacactacttcattgcagcagtcgaaaggctttgggactacggtatgtcatcatcccctcatgtgttgcgcaatagagctcagagtggaagtgttccacagttcaagaaagtcgtctttcaagagtttacagatggcagcttcacacagcctctctatcggggcgagcttaacgaacatttgggactccttggtccctatatccgagccgaagtggaggacaacattatggttacctttaggaatcaagcctctcgcccctacagcttctactcctccctcatcagttatgaggaggatcagagacaaggcgctgaaccacggaagaactttgtgaaaccgaatgagacgaagacctacttctggaaagtacagcaccacatggcccccacaaaagacgaattcgattgcaaagcatgggcgtatttttcagacgttgacttggagaaagatgtacattcaggacttattggtcctttgttggtgtgtcacactaacactctcaatccagcccatggcaggcaggtgacagtccaggaattcgctcttttctttaccatctttgatgagaccaagtcctggtacttcacggaaaacatggagcgcaattgcagagccccctgtaacatacagatggaggaccctacctttaaggaaaattatcggttccacgcaatcaacggatacattatggatacactccctggccttgtgatggctcaggaccaacgaatcaggtggtacctcctcagcatgggttctaatgagaacatacactccattcacttttcaggacatgtgttcactgtccggaagaaagaagagtataagatggccctctacaatttgtatccaggcgtgtttgagaccgttgaaatgcttccctctaaagctggcatctggagagtagagtgcttgatcggagaacatcttcacgcaggtatgagcaccttgttcctcgtgtacagcaacaaatgtcagaatccacttggcatggccagtggacacattcgcgactttcagatcacagcatctggccagtatggacaatgggccccaaagttggctcgcctccattactccggtagcataaatgcgtggtccactaaagaacctttcagctggattaaggtcgatcttcttgcccccatgatcatccacggcattaagacacagggagcgaggcagaaattctcctccctctacatctcacagttcattattatgtatagtttggacggcaagaagtggcaaacttatagaggtaacagtactggaacagacatggtgttcttcggcaacgttgatagctctggcatcaaacacaacatctttaatcctcccataatagctcggtacatcagattgcatccgacccactacagcattaggagtacactccgaatggagcttatgggttgcgacttgaattcctgttcaatgccactcggaatggagtctaaagccatctctgatgcacagataaccgccagtagctactttacgaacatgtttgctacgtggtcaccctctaaggcaaggcttcatttgcaaggccggtctaatgcctggagacctcaggtgaacaacccgaaagaatggctccaggtggactttcagaagaccatgaaagtaacaggtgtcactactcagggagttaagtccttggatactagcatgtatgtgaaggagttccttatttcctcatcacaagatggccaccagtggaccctcttctttcagaatggtaaggtcaaagtgtttcagggcaatcaagacagcttcacacccgtggtgaacagtcttgatcctccactcttgacacgataccttcgaatccatccacagtcttgggagcaccagattgcattgcgcatggaagtacttggatgcttggctcaggacctctac

SEQ ID NO: 1720 - protein, 1457 aa, synthetic construct
  REGION 1..1457: note = Variant of human B-domain deleted Factor VIII
MQIELSTCFFLCLLRFCFSATRRYYLGAVELSWDYMQSDLGELPVDARFPPRVPKSFPFNTSQVYKKTLFVEFTDHLFNIAKPRPPWMGLLGPTIQAEVYDTVVITLKNMASHPVSLHAVGVSYWKASEGAEYDDQTSQREKEDDKVFPGGSHTYVWQVLKENGPMASDPPCLTYSYLSHVDLVKDLNSGLIGALLVCREGSLAKEKTQTLAKFILLFAVFDEGKSWHSETKNSLMQDRDAASARAWPKMHTVNGYVNRTLPGLIGCHRKSVYWHVIGMGTTPEVHSIFLEGHTFLVRNHRQASLGISPITFLTAQTLLRDLGQFLLFCHIPSHQHDGMEAYVKVDSCPEEPQLRMKNNEEAEDYDDDLTDSEMDVVRFDDDNSPSIIQARSGAKKHPKTWVHYIAAEEEDWDYAPLVLAPDDRSYKSQYLNNGPQRIGRKYKKVRFMAYTDETFKTREAIQHESGILGPLLYGEVGDTLLIIFKNQASRPYNIYPHGITDVRPLYSRRLPKGVKHLKDFPILPGEIFKYKWTITVEDGPTKSDPRCLTRYYSSFVNWERDLASGLIGPLLICYKESVDQRGNQIMSDKRNVILFSVFDENRSWYLTENIQRFLPNPAGVQLEDPEFQASNIMHSINGYVFDSLQLSVCLHEVAYWYILSIGAQTDFLSVFFSGYTFKHKGVYEDTLTLFPFSGETVFMSMENPGLWILGCHNSDFRNRGMTALLKVSSCDWNTGDYYEDSYEDISAYFDSKNNAIEPRSFSQNPPVLKRHQREGTRTTLQSDQEEIDYDDTISVEMKKEDFDIYDEDENQSPRSFQKKTRHYFIAAVERLWDYGMSSSPHVLRNRAQSGSVPQFKKVVFQEFTDGSFTQPLYRGELNEHLGLLGPYIRAEVEDNIMVTFRNQASRPYSFYSSLISYEEDQRQGAEPRKNFVKPNETKTYFWKVQHHMAPTKDEFDCKAWAYFSDVDLEKDVHSGLIGPLLVCHTNTLNPAHGRQVTVQEFALFFTIFDETKSWYFTENMERNCRAPCNIQMEDPTFKENYRFHAINGYIMDTLPGLVMAQDQRIRWYLLSMGSNENIHSIHFSGHVFTVRKKEEYKMALYNLYPGVFETVEMLPSKAGIWRVECLIGEHLHAGMSTLFLVYSNKCQNPLGMASGHIRDFQITASGQYGQWAPKLARLHYSGSINAWSTKEPFSWIKVDLLAPMIIHGIKTQGARQKFSSLYISQFIIMYSLDGKKWQTYRGNSTGTDMVFFGNVDSSGIKHNIFNPPIIARYIRLHPTHYSIRSTLRMELMGCDLNSCSMPLGMESKAISDAQITASSYFTNMFATWSPSKARLHLQGRSNAWRPQVNNPKEWLQVDFQKTMKVTGVTTQGVKSLDTSMYVKEFLISSSQDGHQWTLFFQNGKVKVFQGNQDSFTPVVNSLDPPLLTRYLRIHPQSWEHQIALRMEVLGCLAQDLY

SEQ ID NO: 1721 - DNA, 4371 bp, synthetic construct
  misc_feature 1..4371: note = Variant of human B-domain deleted Factor VIII
  source 1..4371: mol_type = other DNA
atgcagattgaactgtctacctgcttcttcctctgtttgctgaggttctgctttagcgccactagacggtactaccttggcgctgtggagctgtcctgggactatatgcagagtgatttgggagagcttcccgtcgacgcacgatttcctcctcgcgttccaaagtcatttccctttaacacaagccaggtgtacaagaagacgctcttcgtcgaattcaccgatcacctgttcaatatcgccaaacccagaccaccatggatgggtcttttggggcctaccatacaagcggaggtgtatgacacagttgttatcactctcaagaacatggcttctcatccggtaagtcttcacgcagtgggcgtgtcctactggaaagcttcagaaggagccgagtatgatgatcagacatcccagagggagaaagaagacgacaaggtatttccaggtgggtctcatacctatgtgtggcaagtgctcaaagagaatggccctatggcaagcgatccgccgtgtttgacttacagctacctttcacacgttgacctcgtcaaggacctcaactccgggttgattggagccttgttggtatgcagggaaggatctcttgccaaagagaagacacagaccctggccaagtttatccttctctttgctgtgttcgatgagggcaaaagttggcatagcgaaacgaagaattccctcatgcaggatcgcgacgcagccagcgccagagcttggcccaagatgcacactgtgaacggatatgtcaataggacgcttcctggcttgattgggtgtcatcggaaaagtgtctactggcacgtgatcggaatggggacaacaccagaggtccactccatatttctcgaaggccataccttccttgttcgaaaccacagacaggcatccttggggatctctcccattacctttctcactgcccaaacgctccttcgtgacttgggtcagttccttctcttttgccatatcccgtcacaccagcatgatggtatggaagcttatgtgaaagtcgacagttgtcctgaggagccacagttgcgcatgaagaataatgaagaagccgaggattacgacgacgatctcaccgattctgagatggacgtggtgaggtttgatgacgacaactctccctccatcattcaagctcggagcggggcgaagaaacaccccaagacttgggtccactatatagcggcggaagaggaggattgggattacgctcctcttgtattggcaccagatgaccgctcatacaaaagccagtacctcaacaacggaccgcagagaattggccggaagtataagaaagtgcgatttatggcctatacagacgaaacctttaagacaagggaggccatccagcatgagagtgggattttgggacctcttctttacggcgaagttggtgataccctcctcatcatcttcaagaatcaagcttctcgcccctataacatttacccacacgggatcactgacgttaggcctttgtatagcagaagacttcccaaaggcgtgaagcatctcaaagacttccccattttgccaggcgagatctttaagtacaaatggaccattacagtggaagatggaccgactaaatcagaccctcgatgccttacgcggtactattcctccttcgtgaattgggagagagatttggcaagcggactcataggaccactcctcatctgttacaaggaatctgtagaccagaggggtaaccagattatgagtgataaacgcaatgtgatcctttttagcgtcttcgacgagaaccggtcctggtacttgaccgagaatatacaaaggttccttcccaaccccgcaggcgttcagttggaagaccctgagtttcaggccagcaatattatgcactcaatcaacggctatgtgtttgatagtctccagctttctgtttgcctccatgaagtagcctattggtacatcttgtcaattggtgctcaaacagacttcctctccgtcttcttctccggctacacctttaagcacaagggcgtgtatgaggacactctcacactctttccattttctggagaaaccgtgttcatgagcatggagaatccaggcctttggatcttgggttgccacaacagtgattttcgcaatcggggaatgactgctctcctcaaagtcagcagctgtgattggaacacaggcgactatccggaagattcttacgaggacataagtgcctactttgactccaagaataacgccattgagcccagatcattctcccagaatcctcccgtgcttaaaaggcatcagcgcgaaggtaccagaactactcttcagtctgatcaagaggagattgactatgacgacaccattagcgtggaaatgaagaaggaggatttcgatatctatgacgaagatgagaaccagtctccgcggagctttcagaagaagacgcgacactacttcattgcagcagtcgaaaggctttgggactacggtatgtcatcatcccctcatgtgttgcgcaatagagctcagagtggaagtgttccacagttcaagaaagtcgtctttcaagagtttacagatggcagcttcacacagcctctctatcggggcgagcttaacgaacatttgggactccttggtccctatatccgagccgaagtggaggacaacattatggttacctttaggaatcaagcctctcgcccctacagcttctactcctccctcatcagttatgaggaggatcagagacaaggcgctgaaccacggaagaactttgtgaaaccgaatgagacgaagacctacttctggaaagtacagcaccacatggcccccacaaaagacgaattcgattgcaaagcatgggcgtatttttcagacgttgacttggagaaagatgtacattcaggacttattggtcctttgttggtgtgtcacactaacactctcaatccagcccatggcaggcaggtgacagtccaggaattcgctcttttctttaccatctttgatgagaccaagtcctggtacttcacggaaaacatggagcgcaattgcagagccccctgtaacatacagatggaggaccctacctttaaggaaaattatcggttccacgcaatcaacggatacattatggatacactccctggccttgtgatggctcaggaccaacgaatcaggtggtacctcctcagcatgggttctaatgagaacatacactccattcacttttcaggacatgtgttcactgtccggaagaaagaagagtataagatggccctctacaatttgtatccaggcgtgtttgagaccgttgaaatgcttccctctaaagctggcatctggagagtagagtgcttgatcggagaacatcttcacgcaggtatgagcaccttgttcctcgtgtacagcaacaaatgtcagaatccacttggcatggccagtggacacattcgcgactttcagatcacagcatctggccagtatggacaatgggccccaaagttggctcgcctccattactccggtagcataaatgcgtggtccactaaagaacctttcagctggattaaggtcgatcttcttgcccccatgatcatccacggcattaagacacagggagcgaggcagaaattctcctccctctacatctcacagttcattattatgtatagtttggacggcaagaagtggcaaacttatagaggtaacagtactggaacagacatggtgttcttcggcaacgttgatagctctggcatcaaacacaacatctttaatcctcccataatagctcggtacatcagattgcatccgacccactacagcattaggagtacactccgaatggagcttatgggttgcgacttgaattcctgttcaatgccactcggaatggagtctaaagccatctctgatgcacagataaccgccagtagctactttacgaacatgtttgctacgtggtcaccctctaaggcaaggcttcatttgcaaggccggtctaatgcctggagacctcaggtgaacaacccgaaagaatggctccaggtggactttcagaagaccatgaaagtaacaggtgtcactactcagggagttaagtccttggatactagcatgtatgtgaaggagttccttatttcctcatcacaagatggccaccagtggaccctcttctttcagaatggtaaggtcaaagtgtttcagggcaatcaagacagcttcacacccgtggtgaacagtcttgatcctccactcttgacacgataccttcgaatccatccacagtcttgggagcaccagattgcattgcgcatggaagtacttggatgcgaggctcaggacctctac

SEQ ID NO: 1722 - protein, 1457 aa, synthetic construct
  REGION 1..1457: note = Variant of human B-domain deleted Factor VIII
MQIELSTCFFLCLLRFCFSATRRYYLGAVELSWDYMQSDLGELPVDARFPPRVPKSFPFNTSQVYKKTLFVEFTDHLFNIAKPRPPWMGLLGPTIQAEVYDTVVITLKNMASHPVSLHAVGVSYWKASEGAEYDDQTSQREKEDDKVFPGGSHTYVWQVLKENGPMASDPPCLTYSYLSHVDLVKDLNSGLIGALLVCREGSLAKEKTQTLAKFILLFAVFDEGKSWHSETKNSLMQDRDAASARAWPKMHTVNGYVNRTLPGLIGCHRKSVYWHVIGMGTTPEVHSIFLEGHTFLVRNHRQASLGISPITFLTAQTLLRDLGQFLLFCHIPSHQHDGMEAYVKVDSCPEEPQLRMKNNEEAEDYDDDLTDSEMDVVRFDDDNSPSIIQARSGAKKHPKTWVHYIAAEEEDWDYAPLVLAPDDRSYKSQYLNNGPQRIGRKYKKVRFMAYTDETFKTREAIQHESGILGPLLYGEVGDTLLIIFKNQASRPYNIYPHGITDVRPLYSRRLPKGVKHLKDFPILPGEIFKYKWTITVEDGPTKSDPRCLTRYYSSFVNWERDLASGLIGPLLICYKESVDQRGNQIMSDKRNVILFSVFDENRSWYLTENIQRFLPNPAGVQLEDPEFQASNIMHSINGYVFDSLQLSVCLHEVAYWYILSIGAQTDFLSVFFSGYTFKHKGVYEDTLTLFPFSGETVFMSMENPGLWILGCHNSDFRNRGMTALLKVSSCDWNTGDYPEDSYEDISAYFDSKNNAIEPRSFSQNPPVLKRHQREGTRTTLQSDQEEIDYDDTISVEMKKEDFDIYDEDENQSPRSFQKKTRHYFIAAVERLWDYGMSSSPHVLRNRAQSGSVPQFKKVVFQEFTDGSFTQPLYRGELNEHLGLLGPYIRAEVEDNIMVTFRNQASRPYSFYSSLISYEEDQRQGAEPRKNFVKPNETKTYFWKVQHHMAPTKDEFDCKAWAYFSDVDLEKDVHSGLIGPLLVCHTNTLNPAHGRQVTVQEFALFFTIFDETKSWYFTENMERNCRAPCNIQMEDPTFKENYRFHAINGYIMDTLPGLVMAQDQRIRWYLLSMGSNENIHSIHFSGHVFTVRKKEEYKMALYNLYPGVFETVEMLPSKAGIWRVECLIGEHLHAGMSTLFLVYSNKCQNPLGMASGHIRDFQITASGQYGQWAPKLARLHYSGSINAWSTKEPFSWIKVDLLAPMIIHGIKTQGARQKFSSLYISQFIIMYSLDGKKWQTYRGNSTGTDMVFFGNVDSSGIKHNIFNPPIIARYIRLHPTHYSIRSTLRMELMGCDLNSCSMPLGMESKAISDAQITASSYFTNMFATWSPSKARLHLQGRSNAWRPQVNNPKEWLQVDFQKTMKVTGVTTQGVKSLDTSMYVKEFLISSSQDGHQWTLFFQNGKVKVFQGNQDSFTPVVNSLDPPLLTRYLRIHPQSWEHQIALRMEVLGCEAQDLY

SEQ ID NO: 1723 - DNA, 4371 bp, synthetic construct
  misc_feature 1..4371: note = Variant of human B-domain deleted Factor VIII
  source 1..4371: mol_type = other DNA
atgcagattgaactgtctacctgcttcttcctctgtttgctgaggttctgctttagcgccactagacggtactaccttggcgctgtggagctgtcctgggactatatgcagagtgatttgggagagcttcccgtcgacgcacgatttcctcctcgcgttccaaagtcatttccctttaacacaagccaggtgtacaagaagacgctcttcgtcgaattcaccgatcacctgttcaatatcgccaaacccagaccaccatggatgggtcttttggggcctaccatacaagcggaggtgtatgacacagttgttatcactctcaagaacatggcttctcatccggtaagtcttcacgcagtgggcgtgtcctactggaaagcttcagaaggagccgagtatgatgatcagacatcccagagggagaaagaagacgacaaggtatttccaggtgggtctcatacctatgtgtggcaagtgctcaaagagaatggccctatggcaagcgatccgccgtgtttgacttacagctacctttcacacgttgacctcgtcaaggacctcaactccgggttgattggagccttgttggtatgcagggaaggatctcttgccaaagagaagacacagaccctggccaagtttatccttctctttgctgtgttcgatgagggcaaaagttggcatagcgaaacgaagaattccctcatgcaggatcgcgacgcagccagcgccagagcttggcccaagatgcacactgtgaacggatatgtcaataggacgcttcctggcttgattgggtgtcatcggaaaagtgtctactggcacgtgatcggaatggggacaacaccagaggtccactccatatttctcgaaggccataccttccttgttcgaaaccacagacaggcatccttggggatctctcccattacctttctcactgcccaaacgctccttcgtgacttgggtcagttccttctcttttgccatatcccgtcacaccagcatgatggtatggaagcttatgtgaaagtcgacagttgtcctgaggagccacagttgcgcatgaagaataatgaagaagccgaggattacgacgacgatctcaccgattctgagatggacgtggtgaggtttgatgacgacaactctccctccatcattcaagctcggagcggggcgaagaaacaccccaagacttgggtccactatatagcggcggaagaggaggattgggattacgctcctcttgtattggcaccagatgaccgctcatacaaaagccagtacctcaacaacggaccgcagagaattggccggaagtataagaaagtgcgatttatggcctatacagacgaaacctttaagacaagggaggccatccagcatgagagtgggattttgggacctcttctttacggcgaagttggtgataccctcctcatcatcttcaagaatcaagcttctcgcccctataacatttacccacacgggatcactgacgttaggcctttgtatagcagaagacttcccaaaggcgtgaagcatctcaaagacttccccattttgccaggcgagatctttaagtacaaatggaccattacagtggaagatggaccgactaaatcagaccctcgatgccttacgcggtactattcctccttcgtgaattgggagagagatttggcaagcggactcataggaccactcctcatctgttacaaggaatctgtagaccagaggggtaaccagattatgagtgataaacgcaatgtgatcctttttagcgtcttcgacgagaaccggtcctggtacttgaccgagaatatacaaaggttccttcccaaccccgcaggcgttcagttggaagaccctgagtttcaggccagcaatattatgcactcaatcaacggctatgtgtttgatagtctccagctttctgtttgcctccatgaagtagcctattggtacatcttgtcaattggtgctcaaacagacttcctctccgtcttcttctccggctacacctttaagcacaagggcgtgtatgaggacactctcacactctttccattttctggagaaaccgtgttcatgagcatggagaatccaggcctttggatcttgggttgccacaacagtgattttcgcaatcggggaatgactgctctcctcaaagtcagcagctgtgattggaacacaggcgactattacgaagattcttacgaggacataagtgcctactttgactccaagaataacgccattgagcccagatcattctcccagaatcctcccgtgcttaaaaggcatcagcgcgaaggtaccagaactactcttcagtctgatcaagaggagattgactattgggacaccattagcgtggaaatgaagaaggaggatttcgatatctatgacgaagatgagaaccagtctccgcggagctttcagaagaagacgcgacactacttcattgcagcagtcgaaaggctttgggactacggtatgtcatcatcccctcatgtgttgcgcaatagagctcagagtggaagtgttccacagttcaagaaagtcgtctttcaagagtttacagatggcagcttcacacagcctctctatcggggcgagcttaacgaacatttgggactccttggtccctatatccgagccgaagtggaggacaacattatggttacctttaggaatcaagcctctcgcccctacagcttctactcctccctcatcagttatgaggaggatcagagacaaggcgctgaaccacggaagaactttgtgaaaccgaatgagacgaagacctacttctggaaagtacagcaccacatggcccccacaaaagacgaattcgattgcaaagcatgggcgtatttttcagacgttgacttggagaaagatgtacattcaggacttattggtcctttgttggtgtgtcacactaacactctcaatccagcccatggcaggcaggtgacagtccaggaattcgctcttttctttaccatctttgatgagaccaagtcctggtacttcacggaaaacatggagcgcaattgcagagccccctgtaacatacagatggaggaccctacctttaaggaaaattatcggttccacgcaatcaacggatacattatggatacactccctggccttgtgatggctcaggaccaacgaatcaggtggtacctcctcagcatgggttctaatgagaacatacactccattcacttttcaggacatgtgttcactgtccggaagaaagaagagtataagatggccctctacaatttgtatccaggcgtgtttgagaccgttgaaatgcttccctctaaagctggcatctggagagtagagtgcttgatcggagaacatcttcacgcaggtatgagcaccttgttcctcgtgtacagcaacaaatgtcagaatccacttggcatggccagtggacacattcgcgactttcagatcacagcatctggccagtatggacaatgggccccaaagttggctcgcctccattactccggtagcataaatgcgtggtccactaaagaacctttcagctggattaaggtcgatcttcttgcccccatgatcatccacggcattaagacacagggagcgaggcagaaattctcctccctctacatctcacagttcattattatgtatagtttggacggcaagaagtggcaaacttatagaggtaacagtactggaacagacatggtgttcttcggcaacgttgatagctctggcatcaaacacaacatctttaatcctcccataatagctcggtacatcagattgcatccgacccactacagcattaggagtacactccgaatggagcttatgggttgcgacttgaattcctgttcaatgccactcggaatggagtctaaagccatctctgatgcacagataaccgccagtagctactttacgaacatgtttgctacgtggtcaccctctaaggcaaggcttcatttgcaaggccggtctaatgcctggagacctcaggtgaacaacccgaaagaatggctccaggtggactttcagaagaccatgaaagtaacaggtgtcactactcagggagttaagtccttggatactagcatgtatgtgaaggagttccttatttcctcatcacaagatggccaccagtggaccctcttctttcagaatggtaaggtcaaagtgtttcagggcaatcaagacagcttcacacccgtggtgaacagtcttgatcctccactcttgacacgataccttcgaatccatccacagtcttgggagcaccagattgcattgcgcatggaagtacttggatgcgaggctcaggacctctac

SEQ ID NO: 1724 - protein, 1457 aa, synthetic construct
  REGION 1..1457: note = Variant of human B-domain deleted Factor VIII
MQIELSTCFFLCLLRFCFSATRRYYLGAVELSWDYMQSDLGELPVDARFPPRVPKSFPFNTSQVYKKTLFVEFTDHLFNIAKPRPPWMGLLGPTIQAEVYDTVVITLKNMASHPVSLHAVGVSYWKASEGAEYDDQTSQREKEDDKVFPGGSHTYVWQVLKENGPMASDPPCLTYSYLSHVDLVKDLNSGLIGALLVCREGSLAKEKTQTLAKFILLFAVFDEGKSWHSETKNSLMQDRDAASARAWPKMHTVNGYVNRTLPGLIGCHRKSVYWHVIGMGTTPEVHSIFLEGHTFLVRNHRQASLGISPITFLTAQTLLRDLGQFLLFCHIPSHQHDGMEAYVKVDSCPEEPQLRMKNNEEAEDYDDDLTDSEMDVVRFDDDNSPSIIQARSGAKKHPKTWVHYIAAEEEDWDYAPLVLAPDDRSYKSQYLNNGPQRIGRKYKKVRFMAYTDETFKTREAIQHESGILGPLLYGEVGDTLLIIFKNQASRPYNIYPHGITDVRPLYSRRLPKGVKHLKDFPILPGEIFKYKWTITVEDGPTKSDPRCLTRYYSSFVNWERDLASGLIGPLLICYKESVDQRGNQIMSDKRNVILFSVFDENRSWYLTENIQRFLPNPAGVQLEDPEFQASNIMHSINGYVFDSLQLSVCLHEVAYWYILSIGAQTDFLSVFFSGYTFKHKGVYEDTLTLFPFSGETVFMSMENPGLWILGCHNSDFRNRGMTALLKVSSCDWNTGDYYEDSYEDISAYFDSKNNAIEPRSFSQNPPVLKRHQREGTRTTLQSDQEEIDYWDTISVEMKKEDFDIYDEDENQSPRSFQKKTRHYFIAAVERLWDYGMSSSPHVLRNRAQSGSVPQFKKVVFQEFTDGSFTQPLYRGELNEHLGLLGPYIRAEVEDNIMVTFRNQASRPYSFYSSLISYEEDQRQGAEPRKNFVKPNETKTYFWKVQHHMAPTKDEFDCKAWAYFSDVDLEKDVHSGLIGPLLVCHTNTLNPAHGRQVTVQEFALFFTIFDETKSWYFTENMERNCRAPCNIQMEDPTFKENYRFHAINGYIMDTLPGLVMAQDQRIRWYLLSMGSNENIHSIHFSGHVFTVRKKEEYKMALYNLYPGVFETVEMLPSKAGIWRVECLIGEHLHAGMSTLFLVYSNKCQNPLGMASGHIRDFQITASGQYGQWAPKLARLHYSGSINAWSTKEPFSWIKVDLLAPMIIHGIKTQGARQKFSSLYISQFIIMYSLDGKKWQTYRGNSTGTDMVFFGNVDSSGIKHNIFNPPIIARYIRLHPTHYSIRSTLRMELMGCDLNSCSMPLGMESKAISDAQITASSYFTNMFATWSPSKARLHLQGRSNAWRPQVNNPKEWLQVDFQKTMKVTGVTTQGVKSLDTSMYVKEFLISSSQDGHQWTLFFQNGKVKVFQGNQDSFTPVVNSLDPPLLTRYLRIHPQSWEHQIALRMEVLGCEAQDLY

SEQ ID NO: 1725 - DNA, 4371 bp, synthetic construct
  misc_feature 1..4371: note = Variant of human B-domain deleted Factor VIII
  source 1..4371: mol_type = other DNA
atgcagattgaactgtctacctgcttcttcctctgtttgctgaggttctgctttagcgccactagacggtactaccttggcgctgtggagctgtcctgggactatatgcagagtgatttgggagagcttcccgtcgacgcacgatttcctcctcgcgttccaaagtcatttccctttaacacaagccaggtgtacaagaagacgctcttcgtcgaattcaccgatcacctgttcaatatcgccaaacccagaccaccatggatgggtcttttggggcctaccatacaagcggaggtgtatgacacagttgttatcactctcaagaacatggcttctcatccggtaagtcttcacgcagtgggcgtgtcctactggaaagcttcagaaggagccgagtatgatgatcagacatcccagagggagaaagaagacgacaaggtatttccaggtgggtctcatacctatgtgtggcaagtgctcaaagagaatggccctatggcaagcgatccgccgtgtttgacttacagctacctttcacacgttgacctcgtcaaggacctcaactccgggttgattggagccttgttggtatgcagggaaggatctcttgccaaagagaagacacagaccctggccaagtttatccttctctttgctgtgttcgatgagggcaaaagttggcatagcgaaacgaagaattccctcatgcaggatcgcgacgcagccagcgccagagcttggcccaagatgcacactgtgaacggatatgtcaataggacgcttcctggcttgattgggtgtcatcggaaaagtgtctactggcacgtgatcggaatggggacaacaccagaggtccactccatatttctcgaaggccataccttccttgttcgaaaccacagacaggcatccttggggatctctcccattacctttctcactgcccaaacgctccttcgtgacttgggtcagttccttctcttttgccatatcccgtcacaccagcatgatggtatggaagcttatgtgaaagtcgacagttgtcctgaggagccacagttgcgcatgaagaataatgaagaagccgaggattacgacgacgatctcaccgattctgagatggacgtggtgaggtttgatgacgacaactctccctccatcattcaagctcggagcggggcgaagaaacaccccaagacttgggtccactatatagcggcggaagaggaggattgggattacgctcctcttgtattggcaccagatgaccgctcatacaaaagccagtacctcaacaacggaccgcagagaattggccggaagtataagaaagtgcgatttatggcctatacagacgaaacctttaagacaagggaggccatccagcatgagagtgggattttgggacctcttctttacggcgaagttggtgataccctcctcatcatcttcaagaatcaagcttctcgcccctataacatttacccacacgggatcactgacgttaggcctttgtatagcagaagacttcccaaaggcgtgaagcatctcaaagacttccccattttgccaggcgagatctttaagtacaaatggaccattacagtggaagatggaccgactaaatcagaccctcgatgccttacgcggtactattcctccttcgtgaattgggagagagatttggcaagcggactcataggaccactcctcatctgttacaaggaatctgtagaccagaggggtaaccagattatgagtgataaacgcaatgtgatcctttttagcgtcttcgacgagaaccggtcctggtacttgaccgagaatatacaaaggttccttcccaaccccgcaggcgttcagttggaagaccctgagtttcaggccagcaatattatgcactcaatcaacggctatgtgtttgatagtctccagctttctgtttgcctccatgaagtagcctattggtacatcttgtcaattggtgctcaaacagacttcctctccgtcttcttctccggctacacctttaagcacaagggcgtgtatgaggacactctcacactctttccattttctggagaaaccgtgttcatgagcatggagaatccaggcctttggatcttgggttgccacaacagtgattttcgcaatcggggaatgactgctctcctcaaagtcagcagctgtgattggaacacaggcgactattacgaagattcttacgaggacataagtgcctactttgactccaagaataacgccattgagcccagatcattctcccagaatcctcccgtgcttaaaaggcatcagcgcgaaggtaccagaactactcttcagtctgatcaagaggagattgactatattgacaccattagcgtggaaatgaagaaggaggatttcgatatctatgacgaagatgagaaccagtctccgcggagctttcagaagaagacgcgacactacttcattgcagcagtcgaaaggctttgggactacggtatgtcatcatcccctcatgtgttgcgcaatagagctcagagtggaagtgttccacagttcaagaaagtcgtctttcaagagtttacagatggcagcttcacacagcctctctatcggggcgagcttaacgaacatttgggactccttggtccctatatccgagccgaagtggaggacaacattatggttacctttaggaatcaagcctctcgcccctacagcttctactcctccctcatcagttatgaggaggatcagagacaaggcgctgaaccacggaagaactttgtgaaaccgaatgagacgaagacctacttctggaaagtacagcaccacatggcccccacaaaagacgaattcgattgcaaagcatgggcgtatttttcagacgttgacttggagaaagatgtacattcaggacttattggtcctttgttggtgtgtcacactaacactctcaatccagcccatggcaggcaggtgacagtccaggaattcgctcttttctttaccatctttgatgagaccaagtcctggtacttcacggaaaacatggagcgcaattgcagagccccctgtaacatacagatggaggaccctacctttaaggaaaattatcggttccacgcaatcaacggatacattatggatacactccctggccttgtgatggctcaggaccaacgaatcaggtggtacctcctcagcatgggttctaatgagaacatacactccattcacttttcaggacatgtgttcactgtccggaagaaagaagagtataagatggccctctacaatttgtatccaggcgtgtttgagaccgttgaaatgcttccctctaaagctggcatctggagagtagagtgcttgatcggagaacatcttcacgcaggtatgagcaccttgttcctcgtgtacagcaacaaatgtcagaatccacttggcatggccagtggacacattcgcgactttcagatcacagcatctggccagtatggacaatgggccccaaagttggctcgcctccattactccggtagcataaatgcgtggtccactaaagaacctttcagctggattaaggtcgatcttcttgcccccatgatcatccacggcattaagacacagggagcgaggcagaaattctcctccctctacatctcacagttcattattatgtatagtttggacggcaagaagtggcaaacttatagaggtaacagtactggaacagacatggtgttcttcggcaacgttgatagctctggcatcaaacacaacatctttaatcctcccataatagctcggtacatcagattgcatccgacccactacagcattaggagtacactccgaatggagcttatgggttgcgacttgaattcctgttcaatgccactcggaatggagtctaaagccatctctgatgcacagataaccgccagtagctactttacgaacatgtttgctacgtggtcaccctctaaggcaaggcttcatttgcaaggccggtctaatgcctggagacctcaggtgaacaacccgaaagaatggctccaggtggactttcagaagaccatgaaagtaacaggtgtcactactcagggagttaagtccttggatactagcatgtatgtgaaggagttccttatttcctcatcacaagatggccaccagtggaccctcttctttcagaatggtaaggtcaaagtgtttcagggcaatcaagacagcttcacacccgtggtgaacagtcttgatcctccactcttgacacgataccttcgaatccatccacagtcttgggagcaccagattgcattgcgcatggaagtacttggatgcgaggctcaggacctctac

SEQ ID NO: 1726 - protein, 1457 aa, synthetic construct
  REGION 1..1457: note = Variant of human B-domain deleted Factor VIII
MQIELSTCFFLCLLRFCFSATRRYYLGAVELSWDYMQSDLGELPVDARFPPRVPKSFPFNTSQVYKKTLFVEFTDHLFNIAKPRPPWMGLLGPTIQAEVYDTVVITLKNMASHPVSLHAVGVSYWKASEGAEYDDQTSQREKEDDKVFPGGSHTYVWQVLKENGPMASDPPCLTYSYLSHVDLVKDLNSGLIGALLVCREGSLAKEKTQTLAKFILLFAVFDEGKSWHSETKNSLMQDRDAASARAWPKMHTVNGYVNRTLPGLIGCHRKSVYWHVIGMGTTPEVHSIFLEGHTFLVRNHRQASLGISPITFLTAQTLLRDLGQFLLFCHIPSHQHDGMEAYVKVDSCPEEPQLRMKNNEEAEDYDDDLTDSEMDVVRFDDDNSPSIIQARSGAKKHPKTWVHYIAAEEEDWDYAPLVLAPDDRSYKSQYLNNGPQRIGRKYKKVRFMAYTDETFKTREAIQHESGILGPLLYGEVGDTLLIIFKNQASRPYNIYPHGITDVRPLYSRRLPKGVKHLKDFPILPGEIFKYKWTITVEDGPTKSDPRCLTRYYSSFVNWERDLASGLIGPLLICYKESVDQRGNQIMSDKRNVILFSVFDENRSWYLTENIQRFLPNPAGVQLEDPEFQASNIMHSINGYVFDSLQLSVCLHEVAYWYILSIGAQTDFLSVFFSGYTFKHKGVYEDTLTLFPFSGETVFMSMENPGLWILGCHNSDFRNRGMTALLKVSSCDWNTGDYYEDSYEDISAYFDSKNNAIEPRSFSQNPPVLKRHQREGTRTTLQSDQEEIDYIDTISVEMKKEDFDIYDEDENQSPRSFQKKTRHYFIAAVERLWDYGMSSSPHVLRNRAQSGSVPQFKKVVFQEFTDGSFTQPLYRGELNEHLGLLGPYIRAEVEDNIMVTFRNQASRPYSFYSSLISYEEDQRQGAEPRKNFVKPNETKTYFWKVQHHMAPTKDEFDCKAWAYFSDVDLEKDVHSGLIGPLLVCHTNTLNPAHGRQVTVQEFALFFTIFDETKSWYFTENMERNCRAPCNIQMEDPTFKENYRFHAINGYIMDTLPGLVMAQDQRIRWYLLSMGSNENIHSIHFSGHVFTVRKKEEYKMALYNLYPGVFETVEMLPSKAGIWRVECLIGEHLHAGMSTLFLVYSNKCQNPLGMASGHIRDFQITASGQYGQWAPKLARLHYSGSINAWSTKEPFSWIKVDLLAPMIIHGIKTQGARQKFSSLYISQFIIMYSLDGKKWQTYRGNSTGTDMVFFGNVDSSGIKHNIFNPPIIARYIRLHPTHYSIRSTLRMELMGCDLNSCSMPLGMESKAISDAQITASSYFTNMFATWSPSKARLHLQGRSNAWRPQVNNPKEWLQVDFQKTMKVTGVTTQGVKSLDTSMYVKEFLISSSQDGHQWTLFFQNGKVKVFQGNQDSFTPVVNSLDPPLLTRYLRIHPQSWEHQIALRMEVLGCEAQDLY

SEQ ID NO: 1727 - DNA, 4371 bp, synthetic construct
  misc_feature 1..4371: note = Variant of human B-domain deleted Factor VIII
  source 1..4371: mol_type = other DNA
atgcagattgaactgtctacctgcttcttcctctgtttgctgaggttctgctttagcgccactagacggtactaccttggcgctgtggagctgtcctgggactatatgcagagtgatttgggagagcttcccgtcgacgcacgatttcctcctcgcgttccaaagtcatttccctttaacacaagccaggtgtacaagaagacgctcttcgtcgaattcaccgatcacctgttcaatatcgccaaacccagaccaccatggatgggtcttttggggcctaccatacaagcggaggtgtatgacacagttgttatcactctcaagaacatggcttctcatccggtaagtcttcacgcagtgggcgtgtcctactggaaagcttcagaaggagccgagtatgatgatcagacatcccagagggagaaagaagacgacaaggtatttccaggtgggtctcatacctatgtgtggcaagtgctcaaagagaatggccctatggcaagcgatccgccgtgtttgacttacagctacctttcacacgttgacctcgtcaaggacctcaactccgggttgattggagccttgttggtatgcagggaaggatctcttgccaaagagaagacacagaccctggccaagtttatccttctctttgctgtgttcgatgagggcaaaagttggcatagcgaaacgaagaattccctcatgcaggatcgcgacgcagccagcgccagagcttggcccaagatgcacactgtgaacggatatgtcaataggacgcttcctggcttgattgggtgtcatcggaaaagtgtctactggcacgtgatcggaatggggacaacaccagaggtccactccatatttctcgaagatcataccttccttgttcgaaaccacagacaggcatccttggggatctctcccattacctttctcactgcccaaacgctccttcgtgacttgggtcagttccttctcttttgccatatcccgtcacaccagcatgatggtatggaagcttatgtgaaagtcgacagttgtcctgaggagccacagttgcgcatgaagaataatgaagaagccgaggattacgacgacgatctcaccgattctgagatggacgtggtgaggtttgatgacgacaactctccctccatcattcaagctcggagcggggcgaagaaacaccccaagacttgggtccactatatagcggcggaagaggaggattgggattacgctcctcttgtattggcaccagatgaccgctcatacaaaagccagtacctcaacaacggaccgcagagaattggccggaagtataagaaagtgcgatttatggcctatacagacgaaacctttaagacaagggaggccatccagcatgagagtgggattttgggacctcttctttacggcgaagttggtgataccctcctcatcatcttcaagaatcaagcttctcgcccctataacatttacccacacgggatcactgacgttaggcctttgtatagcagaagacttcccaaaggcgtgaagcatctcaaagacttccccattttgccaggcgagatctttaagtacaaatggaccattacagtggaagatggaccgactaaatcagaccctcgatgccttacgcggtactattcctccttcgtgaattgggagagagatttggcaagcggactcataggaccactcctcatctgttacaaggaatctgtagaccagaggggtaaccagattatgagtgataaacgcaatgtgatcctttttagcgtcttcgacgagaaccggtcctggtacttgaccgagaatatacaaaggttccttcccaaccccgcaggcgttcagttggaagaccctgagtttcaggccagcaatattatgcactcaatcaacggctatgtgtttgatagtctccagctttctgtttgcctccatgaagtagcctattggtacatcttgtcaattggtgctcaaacagacttcctctccgtcttcttctccggctacacctttaagcacaagggcgtgtatgaggacactctcacactctttccattttctggagaaaccgtgttcatgagcatggagaatccaggcctttggatcttgggttgccacaacagtgattttcgcaatcggggaatgactgctctcctcaaagtcagcagctgtgattggaacacaggcgactattacgaagattcttacgaggacataagtgcctactttgactccaagaataacgccattgagcccagatcattctcccagaatcctcccgtgcttaaaaggcatcagcgcgaaggtaccagaactactcttcagtctgatcaagaggagattgactatgacgacaccattagcgtggaaatgaagaaggaggatttcgatatctatgacgaagatgagaaccagtctccgcggagctttcagaagaagacgcgacactacttcattgcagcagtcgaaaggctttgggactacggtatgtcatcatcccctcatgtgttgcgcaatagagctcagagtggaagtgttccacagttcaagaaagtcgtctttcaagagtttacagatggcagcttcacacagcctctctatcggggcgagcttaacgaacatttgggactccttggtccctatatccgagccgaagtggaggacaacattatggttacctttaggaatcaagcctctcgcccctacagcttctactcctccctcatcagttatgaggaggatcagagacaaggcgctgaaccacggaagaactttgtgaaaccgaatgagacgaagacctacttctggaaagtacagcaccacatggcccccacaaaagacgaattcgattgcaaagcatgggcgtatttttcagacgttgacttggagaaagatgtacattcaggacttattggtcctttgttggtgtgtcacactaacactctcaatccagcccatggcaggcaggtgacagtccaggaattcgctcttttctttaccatctttgatgagaccaagtcctggtacttcacggaaaacatggagcgcaattgcagagccccctgtaacatacagatggaggaccctacctttaaggaaaattatcggttccacgcaatcaacggatacattatggatacactccctggccttgtgatggctcaggaccaacgaatcaggtggtacctcctcagcatgggttctaatgagaacatacactccattcacttttcaggacatgtgttcactgtccggaagaaagaagagtataagatggccctctacaatttgtatccaggcgtgtttgagaccgttgaaatgcttccctctaaagctggcatctggagagtagagtgcttgatcggagaacatcttcacgcaggtatgagcaccttgttcctcgtgtacagcaacaaatgtcagaatccacttggcatggccagtggacacattcgcgactttcagatcacagcatctggccagtatggacaatgggccccaaagttggctcgcctccattactccggtagcataaatgcgtggtccactaaagaacctttcagctggattaaggtcgatcttcttgcccccatgatcatccacggcattaagacacagggagcgaggcagaaattctcctccctctacatctcacagttcattattatgtatagtttggacggcaagaagtggcaaacttatagaggtaacagtactggaacagacatggtgttcttcggcaacgttgatagctctggcatcaaacacaacatctttaatcctcccataatagctcggtacatcagattgcatccgacccactacagcattaggagtacactccgaatggagcttatgggttgcgacttgaattcctgttcaatgccactcggaatggagtctaaagccatctctgatgcacagataaccgccagtagctactttacgaacatgtttgctacgtggtcaccctctaaggcaaggcttcatttgcaaggccggtctaatgcctggagacctcaggtgaacaacccgaaagaatggctccaggtggactttcagaagaccatgaaagtaacaggtgtcactactcagggagttaagtccttggatactagcatgtatgtgaaggagttccttatttcctcatcacaagatggccaccagtggaccctcttctttcagaatggtaaggtcaaagtgtttcagggcaatcaagacagcttcacacccgtggtgaacagtcttgatcctccactcttgacacgataccttcgaatccatccacagtcttgggagcaccagattgcattgcgcatggaagtacttggatgcgaggctcaggacctctac

SEQ ID NO: 1728 - protein, 1457 aa, synthetic construct
  REGION 1..1457: note = Variant of human B-domain deleted Factor VIII
MQIELSTCFFLCLLRFCFSATRRYYLGAVELSWDYMQSDLGELPVDARFPPRVPKSFPFNTSQVYKKTLFVEFTDHLFNIAKPRPPWMGLLGPTIQAEVYDTVVITLKNMASHPVSLHAVGVSYWKASEGAEYDDQTSQREKEDDKVFPGGSHTYVWQVLKENGPMASDPPCLTYSYLSHVDLVKDLNSGLIGALLVCREGSLAKEKTQTLAKFILLFAVFDEGKSWHSETKNSLMQDRDAASARAWPKMHTVNGYVNRTLPGLIGCHRKSVYWHVIGMGTTPEVHSIFLEDHTFLVRNHRQASLGISPITFLTAQTLLRDLGQFLLFCHIPSHQHDGMEAYVKVDSCPEEPQLRMKNNEEAEDYDDDLTDSEMDVVRFDDDNSPSIIQARSGAKKHPKTWVHYIAAEEEDWDYAPLVLAPDDRSYKSQYLNNGPQRIGRKYKKVRFMAYTDETFKTREAIQHESGILGPLLYGEVGDTLLIIFKNQASRPYNIYPHGITDVRPLYSRRLPKGVKHLKDFPILPGEIFKYKWTITVEDGPTKSDPRCLTRYYSSFVNWERDLASGLIGPLLICYKESVDQRGNQIMSDKRNVILFSVFDENRSWYLTENIQRFLPNPAGVQLEDPEFQASNIMHSINGYVFDSLQLSVCLHEVAYWYILSIGAQTDFLSVFFSGYTFKHKGVYEDTLTLFPFSGETVFMSMENPGLWILGCHNSDFRNRGMTALLKVSSCDWNTGDYYEDSYEDISAYFDSKNNAIEPRSFSQNPPVLKRHQREGTRTTLQSDQEEIDYDDTISVEMKKEDFDIYDEDENQSPRSFQKKTRHYFIAAVERLWDYGMSSSPHVLRNRAQSGSVPQFKKVVFQEFTDGSFTQPLYRGELNEHLGLLGPYIRAEVEDNIMVTFRNQASRPYSFYSSLISYEEDQRQGAEPRKNFVKPNETKTYFWKVQHHMAPTKDEFDCKAWAYFSDVDLEKDVHSGLIGPLLVCHTNTLNPAHGRQVTVQEFALFFTIFDETKSWYFTENMERNCRAPCNIQMEDPTFKENYRFHAINGYIMDTLPGLVMAQDQRIRWYLLSMGSNENIHSIHFSGHVFTVRKKEEYKMALYNLYPGVFETVEMLPSKAGIWRVECLIGEHLHAGMSTLFLVYSNKCQNPLGMASGHIRDFQITASGQYGQWAPKLARLHYSGSINAWSTKEPFSWIKVDLLAPMIIHGIKTQGARQKFSSLYISQFIIMYSLDGKKWQTYRGNSTGTDMVFFGNVDSSGIKHNIFNPPIIARYIRLHPTHYSIRSTLRMELMGCDLNSCSMPLGMESKAISDAQITASSYFTNMFATWSPSKARLHLQGRSNAWRPQVNNPKEWLQVDFQKTMKVTGVTTQGVKSLDTSMYVKEFLISSSQDGHQWTLFFQNGKVKVFQGNQDSFTPVVNSLDPPLLTRYLRIHPQSWEHQIALRMEVLGCEAQDLY

SEQ ID NO: 1729 - DNA, 4371 bp, synthetic construct
  misc_feature 1..4371: note = Variant of human B-domain deleted Factor VIII
  source 1..4371: mol_type = other DNA
atgcagattgaactgtctacctgcttcttcctctgtttgctgaggttctgctttagcgccactagacggtactaccttggcgctgtggagctgtcctgggactatatgcagagtgatttgggagagcttcccgtcgacgcacgatttcctcctcgcgttccaaagtcatttccctttaacacaagccaggtgtacaagaagacgctcttcgtcgaattcaccgatcacctgttcaatatcgccaaacccagaccaccatggatgggtcttttggggcctaccatacaagcggaggtgtatgacacagttgttatcactctcaagaacatggcttctcatccggtaagtcttcacgcagtgggcgtgtcctactggaaagcttcagaaggagccgagtatgatgatcagacatcccagagggagaaagaagacgacaaggtatttccaggtgggtctcatacctatgtgtggcaagtgctcaaagagaatggccctatggcaagcgatccgccgtgtttgacttacagctacctttcacacgttgacctcgtcaaggacctcaactccgggttgattggagccttgttggtatgcagggaaggatctcttgccaaagagaagacacagaccctggccaagtttatccttctctttgctgtgttcgatgagggcaaaagttggcatagcgaaacgaagaattccctcatgcaggatcgcgacgcagccagcgccagagcttggcccaagatgcacactgtgaacggatatgtcaataggacgcttcctggcttgattgggtgtcatcggaaaagtgtctactggcacgtgatcggaatggggacaacaccagaggtccactccatatttctcgaaggccataccttccttgttcgaaaccacagacaggcatccttggggatctctcccattacctttctcactgcccaaacgctccttcgtgacttgggtcagttccttctcttttgccatatcccgtcacaccagcatgatggtatggaagcttatgtgaaagtcgacagttgtcctgaggagccacagttgcgcatgaagaataatgaagaagccgaggattacgacgacgatctcaccgattctgagatggacgtggtgaggtttgatgacgacaactctccctccatcattcaagctcggagcggggcgaagaaacaccccaagacttgggtccactatatagcggcggaagaggaggattgggattacgctcctcttgtattggcaccagatgaccgctcatacaaaagccagtacctcaacaacggaccgcagagaattggccggaagtataagaaagtgcgatttatggcctatacagacgaaacctttaagacaagggaggccatccagcatgagagtgggattttgggacctcttctttacggcgaagttggtgataccctcctcatcatcttcaagaatcaagcttctcgcccctataacatttacccacacgggatcactgacgttaggcctttgtatagcagaagacttcccaaaggcgtgaagcatctcaaagacttccccattttgccaggcgagatctttaagtacaaatggaccattacagtggaagatggaccgactaaatcagaccctcgatgccttacgcggtactattcctccttcgtgaattgggagagagatttggcaagcggactcataggaccactcctcatctgttacaaggaatctgtagaccagaggggtaaccagattatgagtgataaacgcaatgtgatcctttttagcgtcttcgacgagaaccggtcctggtacttgaccgagaatatacaaaggttccttcccaaccccgcaggcgttcagttggaagaccctgagtttcaggccagcaatattatgcactcaatcaacggctatgtgtttgatagtctccagctttctgtttgcctccatgaagtagcctattggtacatcttgtcaattggtgctcaaacagacttcctctccgtcttcttctccggctacacctttaagcacaagggcgtgtatgaggacactctcacactctttccattttctggagaaaccgtgttcatgagcatggagaatccaggcctttggatcttgggttgccacaacagtgattttcgcaatcggggaatgactgctctcctcaaagtcagcagctgtgattggaacacaggcgactattacgaagattcttacgaggacataagtgcctactttgactccaagaataacgccattgagcccagatcattctcccagaatcctcccgtgcttaaaaggcatcagcgcgaaggtaccagaactactcttcagtctgatcaagaggagattgactatgacgacaccattagcgtggaaatgaagaagatggatttcgatatctatgacgaagatgagaaccagtctccgcggagctttcagaagaagacgcgacactacttcattgcagcagtcgaaaggctttgggactacggtatgtcatcatcccctcatgtgttgcgcaatagagctcagagtggaagtgttccacagttcaagaaagtcgtctttcaagagtttacagatggcagcttcacacagcctctctatcggggcgagcttaacgaacatttgggactccttggtccctatatccgagccgaagtggaggacaacattatggttacctttaggaatcaagcctctcgcccctacagcttctactcctccctcatcagttatgaggaggatcagagacaaggcgctgaaccacggaagaactttgtgaaaccgaatgagacgaagacctacttctggaaagtacagcaccacatggcccccacaaaagacgaattcgattgcaaagcatgggcgtatttttcagacgttgacttggagaaagatgtacattcaggacttattggtcctttgttggtgtgtcacactaacactctcaatccagcccatggcaggcaggtgacagtccaggaattcgctcttttctttaccatctttgatgagaccaagtcctggtacttcacggaaaacatggagcgcaattgcagagccccctgtaacatacagatggaggaccctacctttaaggaaaattatcggttccacgcaatcaacggatacattatggatacactccctggccttgtgatggctcaggaccaacgaatcaggtggtacctcctcagcatgggttctaatgagaacatacactccattcacttttcaggacatgtgttcactgtccggaagaaagaagagtataagatggccctctacaatttgtatccaggcgtgtttgagaccgttgaaatgcttccctctaaagctggcatctggagagtagagtgcttgatcggagaacatcttcacgcaggtatgagcaccttgttcctcgtgtacagcaacaaatgtcagaatccacttggcatggccagtggacacattcgcgactttcagatcacagcatctggccagtatggacaatgggccccaaagttggctcgcctccattactccggtagcataaatgcgtggtccactaaagaacctttcagctggattaaggtcgatcttcttgcccccatgatcatccacggcattaagacacagggagcgaggcagaaattctcctccctctacatctcacagttcattattatgtatagtttggacggcaagaagtggcaaacttatagaggtaacagtactggaacagacatggtgttcttcggcaacgttgatagctctggcatcaaacacaacatctttaatcctcccataatagctcggtacatcagattgcatccgacccactacagcattaggagtacactccgaatggagcttatgggttgcgacttgaattcctgttcaatgccactcggaatggagtctaaagccatctctgatgcacagataaccgccagtagctactttacgaacatgtttgctacgtggtcaccctctaaggcaaggcttcatttgcaaggccggtctaatgcctggagacctcaggtgaacaacccgaaagaatggctccaggtggactttcagaagaccatgaaagtaacaggtgtcactactcagggagttaagtccttggatactagcatgtatgtgaaggagttccttatttcctcatcacaagatggccaccagtggaccctcttctttcagaatggtaaggtcaaagtgtttcagggcaatcaagacagcttcacacccgtggtgaacagtcttgatcctccactcttgacacgataccttcgaatccatccacagtcttgggagcaccagattgcattgcgcatggaagtacttggatgcgaggctcaggacctctac

SEQ ID NO: 1730 - protein, 1457 aa, synthetic construct
  REGION 1..1457: note = Variant of human B-domain deleted Factor VIII
MQIELSTCFFLCLLRFCFSATRRYYLGAVELSWDYMQSDLGELPVDARFPPRVPKSFPFNTSQVYKKTLFVEFTDHLFNIAKPRPPWMGLLGPTIQAEVYDTVVITLKNMASHPVSLHAVGVSYWKASEGAEYDDQTSQREKEDDKVFPGGSHTYVWQVLKENGPMASDPPCLTYSYLSHVDLVKDLNSGLIGALLVCREGSLAKEKTQTLAKFILLFAVFDEGKSWHSETKNSLMQDRDAASARAWPKMHTVNGYVNRTLPGLIGCHRKSVYWHVIGMGTTPEVHSIFLEGHTFLVRNHRQASLGISPITFLTAQTLLRDLGQFLLFCHIPSHQHDGMEAYVKVDSCPEEPQLRMKNNEEAEDYDDDLTDSEMDVVRFDDDNSPSIIQARSGAKKHPKTWVHYIAAEEEDWDYAPLVLAPDDRSYKSQYLNNGPQRIGRKYKKVRFMAYTDETFKTREAIQHESGILGPLLYGEVGDTLLIIFKNQASRPYNIYPHGITDVRPLYSRRLPKGVKHLKDFPILPGEIFKYKWTITVEDGPTKSDPRCLTRYYSSFVNWERDLASGLIGPLLICYKESVDQRGNQIMSDKRNVILFSVFDENRSWYLTENIQRFLPNPAGVQLEDPEFQASNIMHSINGYVFDSLQLSVCLHEVAYWYILSIGAQTDFLSVFFSGYTFKHKGVYEDTLTLFPFSGETVFMSMENPGLWILGCHNSDFRNRGMTALLKVSSCDWNTGDYYEDSYEDISAYFDSKNNAIEPRSFSQNPPVLKRHQREGTRTTLQSDQEEIDYDDTISVEMKKMDFDIYDEDENQSPRSFQKKTRHYFIAAVERLWDYGMSSSPHVLRNRAQSGSVPQFKKVVFQEFTDGSFTQPLYRGELNEHLGLLGPYIRAEVEDNIMVTFRNQASRPYSFYSSLISYEEDQRQGAEPRKNFVKPNETKTYFWKVQHHMAPTKDEFDCKAWAYFSDVDLEKDVHSGLIGPLLVCHTNTLNPAHGRQVTVQEFALFFTIFDETKSWYFTENMERNCRAPCNIQMEDPTFKENYRFHAINGYIMDTLPGLVMAQDQRIRWYLLSMGSNENIHSIHFSGHVFTVRKKEEYKMALYNLYPGVFETVEMLPSKAGIWRVECLIGEHLHAGMSTLFLVYSNKCQNPLGMASGHIRDFQITASGQYGQWAPKLARLHYSGSINAWSTKEPFSWIKVDLLAPMIIHGIKTQGARQKFSSLYISQFIIMYSLDGKKWQTYRGNSTGTDMVFFGNVDSSGIKHNIFNPPIIARYIRLHPTHYSIRSTLRMELMGCDLNSCSMPLGMESKAISDAQITASSYFTNMFATWSPSKARLHLQGRSNAWRPQVNNPKEWLQVDFQKTMKVTGVTTQGVKSLDTSMYVKEFLISSSQDGHQWTLFFQNGKVKVFQGNQDSFTPVVNSLDPPLLTRYLRIHPQSWEHQIALRMEVLGCEAQDLY

SEQ ID NO: 1731 - DNA, 4371 bp, synthetic construct
  misc_feature 1..4371: note = Variant of human B-domain deleted Factor VIII
  source 1..4371: mol_type = other DNA
atgcagattgaactgtctacctgcttcttcctctgtttgctgaggttctgctttagcgccactagacggtactaccttggcgctgtggagctgtcctgggactatatgcagagtgatttgggagagcttcccgtcgacgcacgatttcctcctcgcgttccaaagtcatttccctttaacacaagccaggtgtacaagaagacgctcttcgtcgaattcaccgatcacctgttcaatatcgccaaacccagaccaccatggatgggtcttttggggcctaccatacaagcggaggtgtatgacacagttgttatcactctcaagaacatggcttctcatccggtaagtcttcacgcagtgggcgtgtcctactggaaagcttcagaaggagccgagtatgatgatcagacatcccagagggagaaagaagacgacaaggtatttccaggtgggtctcatacctatgtgtggcaagtgctcaaagagaatggccctatggcaagcgatccgccgtgtttgacttacagctacctttcacacgttgacctcgtcaaggacctcaactccgggttgattggagccttgttggtatgcagggaaggatctcttgccaaagagaagacacagaccctggccaagtttatccttctctttgctgtgttcgatgagggcaaaagttggcatagcgaaacgaagaattccctcatgcaggatcgcgacgcagccagcgccagagcttggcccaagatgcacactgtgaacggatatgtcaataggacgcttcctggcttgattgggtgtcatcggaaaagtgtctactggcacgtgatcggaatggggacaacaccagaggtccactccatatttctcgaaggccataccttccttgttcgaaaccacagacaggcatccttggggatctctcccattacctttctcactgcccaaacgctccttcgtgacttgggtcagttccttctcttttgccatatcccgtcacaccagcatgatggtatggaagcttatgtgaaagtcgacagttgtcctgaggagccacagttgcgcatgaagaataatgaagaagccgaggattacgacgacgatctcaccgattctgagatggacgtggtgaggtttgatgacgacaactctccctccatcattcaagctcggagcggggcgaagaaacaccccaagacttgggtccactatatagcggcggaagaggaggattgggattacgctcctcttgtattggcaccagatgaccgctcatacaaaagccagtacctcaacaacggaccgcagagaattggccggaagtataagaaagtgcgatttatggcctatacagacgaaacctttaagacaagggaggccatccagcatgagagtgggattttgggacctcttctttacggcgaagttggtgataccctcctcatcatcttcaagaatcaagcttctcgcccctataacatttacccacacgggatcactgacgttaggcctttgtatagcagaagacttcccaaaggcgtgaagcatctcaaagacttccccattttgccaggcgagatctttaagtacaaatggaccattacagtggaagatggaccgactaaatcagaccctcgatgccttacgcggtactattcctccttcgtgaattgggagagagatttggcaagcggactcataggaccactcctcatctgttacaaggaatctgtagaccagaggggtaaccagattatgagtgataaacgcaatgtgatcctttttagcgtcttcgacgagaaccggtcctggtacttgaccgagaatatacaaaggttccttcccaaccccgcaggcgttcagttggaagaccctgagtttcaggccagcaatattatgcactcaatcaacggctatgtgtttgatagtctccagctttctgtttgcctccatgaagtagcctattggtacatcttgtcaattggtgctcaaacagacttcctctccgtcttcttctccggctacacctttaagcacaagggcgtgtatgaggacactctcacactctttccattttctggagaaaccgtgttcatgagcatggagaatccaggcctttggatcttgggttgccacaacagtgattttcgcaatcggggaatgactgctctcctcaaagtcagcagctgtgattggaacacaggcgactattacgaagattcttacgaggacataagtgcctactttgactccaagaataacgccattgagcccagatcattctcccagaatcctcccgtgcttaaaaggcatcagcgcgaaggtaccagaactactcttcagtctgatcaagaggagattgactatgacgacaccattagcgtggaaatgaagaaggaggatttcgatatctatgacgaagatgagaaccagtctccgcggagctttcagaagaagacgcgacactacttcattgcagcagtcgaaaggctttgggactacggtatgtcatcatcccctcatgtgttgcgcaatagagctcagagtggaagtgttccacagttcaagaaagtcgtctttcaagagtttacagatggcagcttcacacagcctctctatcggggcgagcttaacgaacatttgggactccttggtccctatatccgagccgaagtggaggacaacattatggttacctttaggaatcaagcctctcgcccctacagcttctactcctccctcatcagttatgaggaggatcagagacaaggcgctgaaccacggaagaactttgtgaaaccgaatgagacgaagacctacttctggaaagtacagcaccacatggcccccacaaaagacgaattcgattgcaaagcatgggcgtatttttcagacgttgacttggagaaagatgtacattcaggacttattggtcctttgttggtgtgtcacactaacactctcaatccagcccatggcaggcaggtgacagtccaggaattcgctcttttctttaccatctttgatgagaccaagtcctggtacttcacggaaaacatggagcgcaattgcagagccccctgtaacatacagatggaggaccctacctttaaggaaaattatcggttccacgcaatcaacggatacattatggatacactccctggccttgtgatggctcaggaccaacgaatcaggtggtacctcctcagcatgggttctaatgagaacatacactccattcacttttcaggacatgtgttcactgtccggaagaaagaagagtataagatggccctctacaatttgtatccaggcgtgatggagaccgttgaaatgcttccctctaaagctggcatctggagagtagagtgcttgatcggagaacatcttcacgcaggtatgagcaccttgttcctcgtgtacagcaacaaatgtcagaatccacttggcatggccagtggacacattcgcgactttcagatcacagcatctggccagtatggacaatgggccccaaagttggctcgcctccattactccggtagcataaatgcgtggtccactaaagaacctttcagctggattaaggtcgatcttcttgcccccatgatcatccacggcattaagacacagggagcgaggcagaaattctcctccctctacatctcacagttcattattatgtatagtttggacggcaagaagtggcaaacttatagaggtaacagtactggaacagacatggtgttcttcggcaacgttgatagctctggcatcaaacacaacatctttaatcctcccataatagctcggtacatcagattgcatccgacccactacagcattaggagtacactccgaatggagcttatgggttgcgacttgaattcctgttcaatgccactcggaatggagtctaaagccatctctgatgcacagataaccgccagtagctactttacgaacatgtttgctacgtggtcaccctctaaggcaaggcttcatttgcaaggccggtctaatgcctggagacctcaggtgaacaacccgaaagaatggctccaggtggactttcagaagaccatgaaagtaacaggtgtcactactcagggagttaagtccttggatactagcatgtatgtgaaggagttccttatttcctcatcacaagatggccaccagtggaccctcttctttcagaatggtaaggtcaaagtgtttcagggcaatcaagacagcttcacacccgtggtgaacagtcttgatcctccactcttgacacgataccttcgaatccatccacagtcttgggagcaccagattgcattgcgcatggaagtacttggatgcgaggctcaggacctctac

SEQ ID NO: 1732 - protein, 1457 aa, synthetic construct
  REGION 1..1457: note = Variant of human B-domain deleted Factor VIII
MQIELSTCFFLCLLRFCFSATRRYYLGAVELSWDYMQSDLGELPVDARFPPRVPKSFPFNTSQVYKKTLFVEFTDHLFNIAKPRPPWMGLLGPTIQAEVYDTVVITLKNMASHPVSLHAVGVSYWKASEGAEYDDQTSQREKEDDKVFPGGSHTYVWQVLKENGPMASDPPCLTYSYLSHVDLVKDLNSGLIGALLVCREGSLAKEKTQTLAKFILLFAVFDEGKSWHSETKNSLMQDRDAASARAWPKMHTVNGYVNRTLPGLIGCHRKSVYWHVIGMGTTPEVHSIFLEGHTFLVRNHRQASLGISPITFLTAQTLLRDLGQFLLFCHIPSHQHDGMEAYVKVDSCPEEPQLRMKNNEEAEDYDDDLTDSEMDVVRFDDDNSPSIIQARSGAKKHPKTWVHYIAAEEEDWDYAPLVLAPDDRSYKSQYLNNGPQRIGRKYKKVRFMAYTDETFKTREAIQHESGILGPLLYGEVGDTLLIIFKNQASRPYNIYPHGITDVRPLYSRRLPKGVKHLKDFPILPGEIFKYKWTITVEDGPTKSDPRCLTRYYSSFVNWERDLASGLIGPLLICYKESVDQRGNQIMSDKRNVILFSVFDENRSWYLTENIQRFLPNPAGVQLEDPEFQASNIMHSINGYVFDSLQLSVCLHEVAYWYILSIGAQTDFLSVFFSGYTFKHKGVYEDTLTLFPFSGETVFMSMENPGLWILGCHNSDFRNRGMTALLKVSSCDWNTGDYYEDSYEDISAYFDSKNNAIEPRSFSQNPPVLKRHQREGTRTTLQSDQEEIDYDDTISVEMKKEDFDIYDEDENQSPRSFQKKTRHYFIAAVERLWDYGMSSSPHVLRNRAQSGSVPQFKKVVFQEFTDGSFTQPLYRGELNEHLGLLGPYIRAEVEDNIMVTFRNQASRPYSFYSSLISYEEDQRQGAEPRKNFVKPNETKTYFWKVQHHMAPTKDEFDCKAWAYFSDVDLEKDVHSGLIGPLLVCHTNTLNPAHGRQVTVQEFALFFTIFDETKSWYFTENMERNCRAPCNIQMEDPTFKENYRFHAINGYIMDTLPGLVMAQDQRIRWYLLSMGSNENIHSIHFSGHVFTVRKKEEYKMALYNLYPGVMETVEMLPSKAGIWRVECLIGEHLHAGMSTLFLVYSNKCQNPLGMASGHIRDFQITASGQYGQWAPKLARLHYSGSINAWSTKEPFSWIKVDLLAPMIIHGIKTQGARQKFSSLYISQFIIMYSLDGKKWQTYRGNSTGTDMVFFGNVDSSGIKHNIFNPPIIARYIRLHPTHYSIRSTLRMELMGCDLNSCSMPLGMESKAISDAQITASSYFTNMFATWSPSKARLHLQGRSNAWRPQVNNPKEWLQVDFQKTMKVTGVTTQGVKSLDTSMYVKEFLISSSQDGHQWTLFFQNGKVKVFQGNQDSFTPVVNSLDPPLLTRYLRIHPQSWEHQIALRMEVLGCEAQDLY

SEQ ID NO: 1733 - DNA, 4371 bp, synthetic construct
  misc_feature 1..4371: note = Variant of human B-domain deleted Factor VIII
  source 1..4371: mol_type = other DNA
atgcagattgaactgtctacctgcttcttcctctgtttgctgaggttctgctttagcgccactagacggtactaccttggcgctgtggagctgtcctgggactatatgcagagtgatttgggagagcttcccgtcgacgcacgatttcctcctcgcgttccaaagtcatttccctttaacacaagccaggtgtacaagaagacgctcttcgtcgaattcaccgatcacctgttcaatatcgccaaacccagaccaccatggatgggtcttttggggcctaccatacaagcggaggtgtatgacacagttgttatcactctcaagaacatggcttctcatccggtaagtcttcacgcagtgggcgtgtcctactggaaagcttcagaaggagccgagtatgatgatcagacatcccagagggagaaagaagacgacaaggtatttccaggtgggtctcatacctatgtgtggcaagtgctcaaagagaatggccctatggcaagcgatccgccgtgtttgacttacagctacctttcacacgttgacctcgtcaaggacctcaactccgggttgattggagccttgttggtatgcagggaaggatctcttgccaaagagaagacacagaccctggccaagtttatccttctctttgctgtgttcgatgagggcaaaagttggcatagcgaaacgaagaattccctcatgcaggatcgcgacgcagccagcgccagagcttggcccaagatgcacactgtgaacggatatgtcaataggacgcttcctggcttgattgggtgtcatcggaaaagtgtctactggcacgtgatcggaatggggacaacaccagaggtccactccatatttctcgaaggccataccttccttgttcgaaaccacagacaggcatccttggggatctctcccattacctttctcactgcccaaacgctccttcgtgacttgggtcagttccttctcttttgccatatcccgtcacaccagcatgatggtatggaagcttatgtgaaagtcgacagttgtcctgaggagccacagttgcgcatgaagaataatgaagaagccgaggattacgacgacgatctcaccgattctgagatggacgtggtgaggtttgatgacgacaactctccctccatcattcaagctcggagcggggcgaagaaacaccccaagacttgggtccactatatagcggcggaagaggaggattgggattacgctcctcttgtattggcaccagatgaccgctcatacaaaagccagtacctcaacaacggaccgcagagaattggccggaagtataagaaagtgcgatttatggcctatacagacgaaacctttaagacaagggaggccatccagcatgagagtgggattttgggacctcttctttacggcgaagttggtgataccctcctcatcatcttcaagaatcaagcttctcgcccctataacatttacccacacgggatcactgacgttaggcctttgtatagcagaagacttcccaaaggcgtgaagcatctcaaagacttccccattttgccaggcgagatctttaagtacaaatggaccattacagtggaagatggaccgactaaatcagaccctcgatgccttacgcggtactattcctccttcgtgaattgggagagagatttggcaagcggactcataggaccactcctcatctgttacaaggaatctgtagaccagaggggtaaccagattatgagtgataaacgcaatgtgatcctttttagcgtcttcgacgagaaccggtcctggtacttgaccgagaatatacaaaggttccttcccaaccccgcaggcgttcagttggaagaccctgagtttcaggccagcaatattatgcactcaatcaacggctatgtgtttgatagtctccagctttctgtttgcctccatgaagtagcctattggtacatcttgtcaattggtgctcaaacagacttcctctccgtcttcttctccggctacacctttaagcacaagggcgtgtatgaggacactctcacactctttccattttctggagaaaccgtgttcatgagcatggagaatccaggcctttggatcttgggttgccacaacagtgattttcgcaatcggggaatgactgctctcctcaaagtcagcagctgtgattggaacacaggcgactattacgaagattcttacgaggacataagtgcctactttgactccaagaataacgccattgagcccagatcattctcccagaatcctcccgtgcttaaaaggcatcagcgcgaaggtaccagaactactcttcagtctgatcaagaggagattgactatgacgacaccattagcgtggaaatgaagaaggaggatttcgatatctatgacgaagatgagaaccagtctccgcggagctttcagaagaagacgcgacactacttcattgcagcagtcgaaaggctttgggactacggtatgtcatcatcccctcatgtgttgcgcaatagagctcagagtggaagtgttccacagttcaagaaagtcgtctttcaagagtttacagatggcagcttcacacagcctctctatcggggcgagcttaacgaacatttgggactccttggtccctatatccgagccgaagtggaggacaacattatggttacctttaggaatcaagcctctcgcccctacagcttctactcctccctcatcagttatgaggaggatcagagacaaggcgctgaaccacggaagaactttgtgaaaccgaatgagacgaagacctacttctggaaagtacagcaccacatggcccccacaaaagacgaattcgattgcaaagcatgggcgtatttttcagacgttgacttggagaaagatgtacattcaggacttattggtcctttgttggtgtgtcacactaacactctcaatccagcccatggcaggcaggtgacagtccaggaattcgctcttttctttaccatctttgatgagaccaagtcctggtacttcacggaaaacatggagcgcaattgcagagccccctgtaacatacagatggaggaccctacctttaaggaaaattatcggttccacgcaatcaacggatacattatggatacactccctggccttgtgatggctcaggaccaacgaatcaggtggtacctcctcagcatgggttctaatgagaacatacactccattcacttttcaggacatgtgagtactgtccggaagaaagaagagtataagatggccctctacaatttgtatccaggcgtgtttgagaccgttgaaatgcttccctctaaagctggcatctggagagtagagtgcttgatcggagaacatcttcacgcaggtatgagcaccttgttcctcgtgtacagcaacaaatgtcagaatccacttggcatggccagtggacacattcgcgactttcagatcacagcatctggccagtatggacaatgggccccaaagttggctcgcctccattactccggtagcataaatgcgtggtccactaaagaacctttcagctggattaaggtcgatcttcttgcccccatgatcatccacggcattaagacacagggagcgaggcagaaattctcctccctctacatctcacagttcattattatgtatagtttggacggcaagaagtggcaaacttatagaggtaacagtactggaacagacatggtgttcttcggcaacgttgatagctctggcatcaaacacaacatctttaatcctcccataatagctcggtacatcagattgcatccgacccactacagcattaggagtacactccgaatggagcttatgggttgcgacttgaattcctgttcaatgccactcggaatggagtctaaagccatctctgatgcacagataaccgccagtagctactttacgaacatgtttgctacgtggtcaccctctaaggcaaggcttcatttgcaaggccggtctaatgcctggagacctcaggtgaacaacccgaaagaatggctccaggtggactttcagaagaccatgaaagtaacaggtgtcactactcagggagttaagtccttggatactagcatgtatgtgaaggagttccttatttcctcatcacaagatggccaccagtggaccctcttctttcagaatggtaaggtcaaagtgtttcagggcaatcaagacagcttcacacccgtggtgaacagtcttgatcctccactcttgacacgataccttcgaatccatccacagtcttgggagcaccagattgcattgcgcatggaagtacttggatgcgaggctcaggacctctac

SEQ ID NO: 1734 - protein, 1457 aa, synthetic construct
  REGION 1..1457: note = Variant of human B-domain deleted Factor VIII
MQIELSTCFFLCLLRFCFSATRRYYLGAVELSWDYMQSDLGELPVDARFPPRVPKSFPFNTSQVYKKTLFVEFTDHLFNIAKPRPPWMGLLGPTIQAEVYDTVVITLKNMASHPVSLHAVGVSYWKASEGAEYDDQTSQREKEDDKVFPGGSHTYVWQVLKENGPMASDPPCLTYSYLSHVDLVKDLNSGLIGALLVCREGSLAKEKTQTLAKFILLFAVFDEGKSWHSETKNSLMQDRDAASARAWPKMHTVNGYVNRTLPGLIGCHRKSVYWHVIGMGTTPEVHSIFLEGHTFLVRNHRQASLGISPITFLTAQTLLRDLGQFLLFCHIPSHQHDGMEAYVKVDSCPEEPQLRMKNNEEAEDYDDDLTDSEMDVVRFDDDNSPSIIQARSGAKKHPKTWVHYIAAEEEDWDYAPLVLAPDDRSYKSQYLNNGPQRIGRKYKKVRFMAYTDETFKTREAIQHESGILGPLLYGEVGDTLLIIFKNQASRPYNIYPHGITDVRPLYSRRLPKGVKHLKDFPILPGEIFKYKWTITVEDGPTKSDPRCLTRYYSSFVNWERDLASGLIGPLLICYKESVDQRGNQIMSDKRNVILFSVFDENRSWYLTENIQRFLPNPAGVQLEDPEFQASNIMHSINGYVFDSLQLSVCLHEVAYWYILSIGAQTDFLSVFFSGYTFKHKGVYEDTLTLFPFSGETVFMSMENPGLWILGCHNSDFRNRGMTALLKVSSCDWNTGDYYEDSYEDISAYFDSKNNAIEPRSFSQNPPVLKRHQREGTRTTLQSDQEEIDYDDTISVEMKKEDFDIYDEDENQSPRSFQKKTRHYFIAAVERLWDYGMSSSPHVLRNRAQSGSVPQFKKVVFQEFTDGSFTQPLYRGELNEHLGLLGPYIRAEVEDNIMVTFRNQASRPYSFYSSLISYEEDQRQGAEPRKNFVKPNETKTYFWKVQHHMAPTKDEFDCKAWAYFSDVDLEKDVHSGLIGPLLVCHTNTLNPAHGRQVTVQEFALFFTIFDETKSWYFTENMERNCRAPCNIQMEDPTFKENYRFHAINGYIMDTLPGLVMAQDQRIRWYLLSMGSNENIHSIHFSGHVSTVRKKEEYKMALYNLYPGVFETVEMLPSKAGIWRVECLIGEHLHAGMSTLFLVYSNKCQNPLGMASGHIRDFQITASGQYGQWAPKLARLHYSGSINAWSTKEPFSWIKVDLLAPMIIHGIKTQGARQKFSSLYISQFIIMYSLDGKKWQTYRGNSTGTDMVFFGNVDSSGIKHNIFNPPIIARYIRLHPTHYSIRSTLRMELMGCDLNSCSMPLGMESKAISDAQITASSYFTNMFATWSPSKARLHLQGRSNAWRPQVNNPKEWLQVDFQKTMKVTGVTTQGVKSLDTSMYVKEFLISSSQDGHQWTLFFQNGKVKVFQGNQDSFTPVVNSLDPPLLTRYLRIHPQSWEHQIALRMEVLGCEAQDLY

SEQ ID NO: 1735 - DNA, 4371 bp, synthetic construct
  misc_feature 1..4371: note = Variant of human B-domain deleted Factor VIII
  source 1..4371: mol_type = other DNA
atgcagattgaactgtctacctgcttcttcctctgtttgctgaggttctgctttagcgccactagacggtactaccttggcgctgtggagctgtcctgggactatatgcagagtgatttgggagagcttcccgtcgacgcacgatttcctcctcgcgttccaaagtcatttccctttaacacaagccaggtgtacaagaagacgctcttcgtcgaattcaccgatcacctgttcaatatcgccaaacccagaccaccatggatgggtcttttggggcctaccatacaagcggaggtgtatgacacagttgttatcactctcaagaacatggcttctcatccggtaagtcttcacgcagtgggcgtgtcctactggaaagcttcagaaggagccgagtatgatgatcagacatcccagagggagaaagaagacgacaaggtatttccaggtgggtctcatacctatgtgtggcaagtgctcaaagagaatggccctatgggtagcgatccgccgtgtttgacttacagctacctttcacacgttgacctcgtcaaggacctcaactccgggttgattggagccttgttggtatgcagggaaggatctcttgccaaagagaagacacagaccctggccaagtttatccttctctttgctgtgttcgatgagggcaaaagttggcatagcgaaacgaagaattccctcatgcaggatcgcgacgcagccagcgccagagcttggcccaagatgcacactgtgaacggatatgtcaataggacgcttcctggcttgattgggtgtcatcggaaaagtgtctactggcacgtgatcggaatggggacaacaccagaggtccactccatatttctcgaaggccataccttccttgttcgaaaccacagacaggcatccttggggatctctcccattacctttctcactgcccaaacgctccttcgtgacttgggtcagttccttctcttttgccatatcccgtcacaccagcatgatggtatggaagcttatgtgaaagtcgacagttgtcctgaggagccacagttgcgcatgaagaataatgaagaagccgaggattacgacgacgatctcaccgattctgagatggacgtggtgaggtttgatgacgacaactctccctccatcattcaagctcggagcggggcgaagaaacaccccaagacttgggtccactatatagcggcggaagaggaggattgggattacgctcctcttgtattggcaccagatgaccgctcatacaaaagccagtacctcaacaacggaccgcagagaattggccggaagtataagaaagtgcgatttatggcctatacagacgaaacctttaagacaagggaggccatccagcatgagagtgggattttgggacctcttctttacggcgaagttggtgataccctcctcatcatcttcaagaatcaagcttctcgcccctataacatttacccacacgggatcactgacgttaggcctttgtatagcagaagacttcccaaaggcgtgaagcatctcaaagacttccccattttgccaggcgagatctttaagtacaaatggaccattacagtggaagatggaccgactaaatcagaccctcgatgccttacgcggtactattcctccttcgtgaattgggagagagatttggcaagcggactcataggaccactcctcatctgttacaaggaatctgtagaccagaggggtaaccagattatgagtgataaacgcaatgtgatcctttttagcgtcttcgacgagaaccggtcctggtacttgaccgagaatatacaaaggttccttcccaaccccgcaggcgttcagttggaagaccctgagtttcaggccagcaatattatgcactcaatcaacggctatgtgtttgatagtctccagctttctgtttgcctccatgaagtagcctattggtacatcttgtcaattggtgctcaaacagacttcctctccgtcttcttctccggctacacctttaagcacaagggcgtgtatgaggacactctcacactctttccattttctggagaaaccgtgttcatgagcatggagaatccaggcctttggatcttgggttgccacaacagtgattttcgcaatcggggaatgactgctctcctcaaagtcagcagctgtgattggaacacaggcgactattacgaagattcttacgaggacataagtgcctactttgactccaagaataacgccattgagcccagatcattctcccagaatcctcccgtgcttaaaaggcatcagcgcgaaggtaccagaactactcttcagtctgatcaagaggagattgactatgacgacaccattagcgtggaaatgaagaaggaggatttcgatatctatgacgaagatgagaaccagtctccgcggagctttcagaagaagacgcgacactacttcattgcagcagtcgaaaggctttgggactacggtatgtcatcatcccctcatgtgttgcgcaatagagctcagagtggaagtgttccacagttcaagaaagtcgtctttcaagagtttacagatggcagcttcacacagcctctctatcggggcgagcttaacgaacatttgggactccttggtccctatatccgagccgaagtggaggacaacattatggttacctttaggaatcaagcctctcgcccctacagcttctactcctccctcatcagttatgaggaggatcagagacaaggcgctgaaccacggaagaactttgtgaaaccgaatgagacgaagacctacttctggaaagtacagcaccacatggcccccacaaaagacgaattcgattgcaaagcatgggcgtatttttcagacgttgacttggagaaagatgtacattcaggacttattggtcctttgttggtgtgtcacactaacactctcaatccagcccatggcaggcaggtgacagtccaggaattcgctcttttctttaccatctttgatgagaccaagtcctggtacttcacggaaaacatggagcgcaattgcagagccccctgtaacatacagatggaggaccctacctttaaggaaaattatcggttccacgcaatcaacggatacattatggatacactccctggccttgtgatggctcaggaccaacgaatcaggtggtacctcctcagcatgggttctaatgagaacatacactccattcacttttcaggacatgtgttcactgtccggaagaaagaagagtataagatggccctctacaatttgtatccaggcgtgtttgagaccgttgaaatgcttccctctaaagctggcatctggagagtagagtgcttgatcggagaacatcttcacgcaggtatgagcaccttgttcctcgtgtacagcaacaaatgtcagaatccacttggcatggccagtggacacattcgcgactttcagatcacagcatctggccagtatggacaatgggccccaaagttggctcgcctccattactccggtagcataaatgcgtggtccactaaagaacctttcagctggattaaggtcgatcttcttgcccccatgatcatccacggcattaagacacagggagcgaggcagaaattctcctccctctacatctcacagttcattattatgtatagtttggacggcaagaagtggcaaacttatagaggtaacagtactggaacagacatggtgttcttcggcaacgttgatagctctggcatcaaacacaacatctttaatcctcccataatagctcggtacatcagattgcatccgacccactacagcattaggagtacactccgaatggagcttatgggttgcgacttgaattcctgttcaatgccactcggaatggagtctaaagccatctctgatgcacagataaccgccagtagctactttacgaacatgtttgctacgtggtcaccctctaaggcaaggcttcatttgcaaggccggtctaatgcctggagacctcaggtgaacaacccgaaagaatggctccaggtggactttcagaagaccatgaaagtaacaggtgtcactactcagggagttaagtccttggatactagcatgtatgtgaaggagttccttatttcctcatcacaagatggccaccagtggaccctcttctttcagaatggtaaggtcaaagtgtttcagggcaatcaagacagcttcacacccgtggtgaacagtcttgatcctccactcttgacacgataccttcgaatccatccacagtcttgggagcaccagattgcattgcgcatggaagtacttggatgcgaggctcaggacctctac

SEQ ID NO: 1736 - protein, 1457 aa, synthetic construct
  REGION 1..1457: note = Variant of human B-domain deleted Factor VIII
MQIELSTCFFLCLLRFCFSATRRYYLGAVELSWDYMQSDLGELPVDARFPPRVPKSFPFNTSQVYKKTLFVEFTDHLFNIAKPRPPWMGLLGPTIQAEVYDTVVITLKNMASHPVSLHAVGVSYWKASEGAEYDDQTSQREKEDDKVFPGGSHTYVWQVLKENGPMGSDPPCLTYSYLSHVDLVKDLNSGLIGALLVCREGSLAKEKTQTLAKFILLFAVFDEGKSWHSETKNSLMQDRDAASARAWPKMHTVNGYVNRTLPGLIGCHRKSVYWHVIGMGTTPEVHSIFLEGHTFLVRNHRQASLGISPITFLTAQTLLRDLGQFLLFCHIPSHQHDGMEAYVKVDSCPEEPQLRMKNNEEAEDYDDDLTDSEMDVVRFDDDNSPSIIQARSGAKKHPKTWVHYIAAEEEDWDYAPLVLAPDDRSYKSQYLNNGPQRIGRKYKKVRFMAYTDETFKTREAIQHESGILGPLLYGEVGDTLLIIFKNQASRPYNIYPHGITDVRPLYSRRLPKGVKHLKDFPILPGEIFKYKWTITVEDGPTKSDPRCLTRYYSSFVNWERDLASGLIGPLLICYKESVDQRGNQIMSDKRNVILFSVFDENRSWYLTENIQRFLPNPAGVQLEDPEFQASNIMHSINGYVFDSLQLSVCLHEVAYWYILSIGAQTDFLSVFFSGYTFKHKGVYEDTLTLFPFSGETVFMSMENPGLWILGCHNSDFRNRGMTALLKVSSCDWNTGDYYEDSYEDISAYFDSKNNAIEPRSFSQNPPVLKRHQREGTRTTLQSDQEEIDYDDTISVEMKKEDFDIYDEDENQSPRSFQKKTRHYFIAAVERLWDYGMSSSPHVLRNRAQSGSVPQFKKVVFQEFTDGSFTQPLYRGELNEHLGLLGPYIRAEVEDNIMVTFRNQASRPYSFYSSLISYEEDQRQGAEPRKNFVKPNETKTYFWKVQHHMAPTKDEFDCKAWAYFSDVDLEKDVHSGLIGPLLVCHTNTLNPAHGRQVTVQEFALFFTIFDETKSWYFTENMERNCRAPCNIQMEDPTFKENYRFHAINGYIMDTLPGLVMAQDQRIRWYLLSMGSNENIHSIHFSGHVFTVRKKEEYKMALYNLYPGVFETVEMLPSKAGIWRVECLIGEHLHAGMSTLFLVYSNKCQNPLGMASGHIRDFQITASGQYGQWAPKLARLHYSGSINAWSTKEPFSWIKVDLLAPMIIHGIKTQGARQKFSSLYISQFIIMYSLDGKKWQTYRGNSTGTDMVFFGNVDSSGIKHNIFNPPIIARYIRLHPTHYSIRSTLRMELMGCDLNSCSMPLGMESKAISDAQITASSYFTNMFATWSPSKARLHLQGRSNAWRPQVNNPKEWLQVDFQKTMKVTGVTTQGVKSLDTSMYVKEFLISSSQDGHQWTLFFQNGKVKVFQGNQDSFTPVVNSLDPPLLTRYLRIHPQSWEHQIALRMEVLGCEAQDLY

SEQ ID NO: 1737 - DNA, 4371 bp, synthetic construct
  misc_feature 1..4371: note = Variant of human B-domain deleted Factor VIII
  source 1..4371: mol_type = other DNA
atgcagattgaactgtctacctgcttcttcctctgtttgctgaggttctgctttagcgccactagacggtactaccttggcgctgtggagctgtcctgggactatatgcagagtgatttgggagagcttcccgtcgacgcacgatttcctcctcgcgttccaaagtcatttccctttaacacaagccaggtgtacaagaagacgctcttcgtcgaattcaccgatcacctgttcaatatcgccaaacccagaccaccatggatgggtcttttggggcctaccatacaagcggaggtgtatgacacagttgttatcactctcaagaacatggcttctcatccggtaagtcttcacgcagtgggcgtgtcctactggaaagcttcagaaggagccgagtatgatgatcagacatcccagagggagaaagaagacgacaaggtatttccaggtgggtctcatacctatgtgtggcaagtgctcaaagagaatggccctatggcaagcgatccgccgtgtttgacttacagctacctttcacacgttgacctcgtcaaggacctcaactccgggttgattggagccttgttggtatgcagggaaggatctcttgccaaagagaagacacagaccctggccaagtttatccttctctttgctgtgttcgatgagggcaaaagttggcatagcgaaacgaagaattccctcatgcaggatcgcgacgcagccagcgccagagcttggcccaagatgcacactgtgaacggatatgtcaataggacgcttcctggcttgattgggtgtcatcggaaaagtgtctactggcacgtgatcggaatggggacaacaccagaggtccactccatatttctcgaaggccataccttccttgttcgaaaccacagacaggcatccttggggatctctcccattacctttctcactgcccaaacgctccttcgtgacttgggtcagttccttctcttttgccatatcccgtcacaccagcatgatggtatggaagcttatgtgaaagtcgacagttgtcctgaggagccacagttgcgcatgaagaataatgaagaagccgaggattacgacgacgatctcaccgattctgagatggacgtggtgaggtttgatgacgacaactctccctccatcattcaagctcggagcggggcgaagaaacaccccaagacttgggtccactatatagcggcggaagaggaggattgggattacgctcctcttgtattggcaccagatgaccgctcatacaaaagccagtacctcaacaacggaccgcagagaattggccggaagtataagaaagtgcgatttatggcctatacagacgaaacctttaagacaagggaggccatccagcatgagagtgggattttgggacctcttctttacggcgaagttggtgataccctcctcatcatcttcaagaatcaagcttctcgcccctataacatttacccacacgggatcactgacgttaggcctttgtatagcagaagacttcccaaaggcgtgaagcatctcaaagacttccccattttgccaggcgagatctttaagtacaaatggaccattacagtggaagatggaccgactaaatcagaccctcgatgccttacgcggtactattcctccttcgtgaattgggagagagatttggcaagcggactcataggaccactcctcatctgttacaaggaatctgtagaccagaggggtaaccagattatgagtgataaacgcaatgtgatcctttttagcgtcttcgacgagaaccggtcctggtacttgaccgagaatatacaaaggttccttcccaaccccgcaggcgttcagttggaagaccctgagtttcaggccagcaatattatgcactcaatcaacggctatgtgtttgatagtctccagctttctgtttgcctccatgaagtagcctattggtacatcttgtcaattggtgctcaaacagacttcctctccgtcttcttctccggctacacctttaagcacaagggcgtgtatgaggacactctcacactctttccattttctggagaaaccgtgttcatgagcatggagaatccaggcctttggatcttgggttgccacaacagtgattttcgcaatcggggaatgactgctctcctcaaagtcagcagctgtgattggaacacaggcgactattacgaagattcttacgaggacataagtgcctactttgactccaagaataacgccattgagcccagatcattctcccagaatcctcccgtgcttaaaaggcatcagcgcgaaggtaccagaactactcttcagtctgatcaagaggagattgactatgacgacaccattagcgtggaaatgaagaaggaggatttcgatatctatgacgaagatgagaaccagtctccgcggagctttcagaagaagacgcgacactacttcattgcagcagtcgaaaggctttgggactacggtatgtcatcatcccctcatgtgttgcgcaatagagctcagagtggaagtgttccacagttcaagaaagtcgtctttcaagagtttacagatggcagcttcacacagcctctctatcggggcgagcttaacgaacatttgggactccttggtccctatatccgagccgaaactgaggacaacattatggttacctttaggaatcaagcctctcgcccctacagcttctactcctccctcatcagttatgaggaggatcagagacaaggcgctgaaccacggaagaactttgtgaaaccgaatgagacgaagacctacttctggaaagtacagcaccacatggcccccacaaaagacgaattcgattgcaaagcatgggcgtatttttcagacgttgacttggagaaagatgtacattcaggacttattggtcctttgttggtgtgtcacactaacactctcaatccagcccatggcaggcaggtgacagtccaggaattcgctcttttctttaccatctttgatgagaccaagtcctggtacttcacggaaaacatggagcgcaattgcagagccccctgtaacatacagatggaggaccctacctttaaggaaaattatcggttccacgcaatcaacggatacattatggatacactccctggccttgtgatggctcaggaccaacgaatcaggtggtacctcctcagcatgggttctaatgagaacatacactccattcacttttcaggacatgtgttcactgtccggaagaaagaagagtataagatggccctctacaatttgtatccaggcgtgtttgagaccgttgaaatgcttccctctaaagctggcatctggagagtagagtgcttgatcggagaacatcttcacgcaggtatgagcaccttgttcctcgtgtacagcaacaaatgtcagaatccacttggcatggccagtggacacattcgcgactttcagatcacagcatctggccagtatggacaatgggccccaaagttggctcgcctccattactccggtagcataaatgcgtggtccactaaagaacctttcagctggattaaggtcgatcttcttgcccccatgatcatccacggcattaagacacagggagcgaggcagaaattctcctccctctacatctcacagttcattattatgtatagtttggacggcaagaagtggcaaacttatagaggtaacagtactggaacagacatggtgttcttcggcaacgttgatagctctggcatcaaacacaacatctttaatcctcccataatagctcggtacatcagattgcatccgacccactacagcattaggagtacactccgaatggagcttatgggttgcgacttgaattcctgttcaatgccactcggaatggagtctaaagccatctctgatgcacagataaccgccagtagctactttacgaacatgtttgctacgtggtcaccctctaaggcaaggcttcatttgcaaggccggtctaatgcctggagacctcaggtgaacaacccgaaagaatggctccaggtggactttcagaagaccatgaaagtaacaggtgtcactactcagggagttaagtccttggatactagcatgtatgtgaaggagttccttatttcctcatcacaagatggccaccagtggaccctcttctttcagaatggtaaggtcaaagtgtttcagggcaatcaagacagcttcacacccgtggtgaacagtcttgatcctccactcttgacacgataccttcgaatccatccacagtcttgggagcaccagattgcattgcgcatggaagtacttggatgcgaggctcaggacctctac

SEQ ID NO: 1738 - protein, 1457 aa, synthetic construct
  REGION 1..1457: note = Variant of human B-domain deleted Factor VIII
MQIELSTCFFLCLLRFCFSATRRYYLGAVELSWDYMQSDLGELPVDARFPPRVPKSFPFNTSQVYKKTLFVEFTDHLFNIAKPRPPWMGLLGPTIQAEVYDTVVITLKNMASHPVSLHAVGVSYWKASEGAEYDDQTSQREKEDDKVFPGGSHTYVWQVLKENGPMASDPPCLTYSYLSHVDLVKDLNSGLIGALLVCREGSLAKEKTQTLAKFILLFAVFDEGKSWHSETKNSLMQDRDAASARAWPKMHTVNGYVNRTLPGLIGCHRKSVYWHVIGMGTTPEVHSIFLEGHTFLVRNHRQASLGISPITFLTAQTLLRDLGQFLLFCHIPSHQHDGMEAYVKVDSCPEEPQLRMKNNEEAEDYDDDLTDSEMDVVRFDDDNSPSIIQARSGAKKHPKTWVHYIAAEEEDWDYAPLVLAPDDRSYKSQYLNNGPQRIGRKYKKVRFMAYTDETFKTREAIQHESGILGPLLYGEVGDTLLIIFKNQASRPYNIYPHGITDVRPLYSRRLPKGVKHLKDFPILPGEIFKYKWTITVEDGPTKSDPRCLTRYYSSFVNWERDLASGLIGPLLICYKESVDQRGNQIMSDKRNVILFSVFDENRSWYLTENIQRFLPNPAGVQLEDPEFQASNIMHSINGYVFDSLQLSVCLHEVAYWYILSIGAQTDFLSVFFSGYTFKHKGVYEDTLTLFPFSGETVFMSMENPGLWILGCHNSDFRNRGMTALLKVSSCDWNTGDYYEDSYEDISAYFDSKNNAIEPRSFSQNPPVLKRHQREGTRTTLQSDQEEIDYDDTISVEMKKEDFDIYDEDENQSPRSFQKKTRHYFIAAVERLWDYGMSSSPHVLRNRAQSGSVPQFKKVVFQEFTDGSFTQPLYRGELNEHLGLLGPYIRAETEDNIMVTFRNQASRPYSFYSSLISYEEDQRQGAEPRKNFVKPNETKTYFWKVQHHMAPTKDEFDCKAWAYFSDVDLEKDVHSGLIGPLLVCHTNTLNPAHGRQVTVQEFALFFTIFDETKSWYFTENMERNCRAPCNIQMEDPTFKENYRFHAINGYIMDTLPGLVMAQDQRIRWYLLSMGSNENIHSIHFSGHVFTVRKKEEYKMALYNLYPGVFETVEMLPSKAGIWRVECLIGEHLHAGMSTLFLVYSNKCQNPLGMASGHIRDFQITASGQYGQWAPKLARLHYSGSINAWSTKEPFSWIKVDLLAPMIIHGIKTQGARQKFSSLYISQFIIMYSLDGKKWQTYRGNSTGTDMVFFGNVDSSGIKHNIFNPPIIARYIRLHPTHYSIRSTLRMELMGCDLNSCSMPLGMESKAISDAQITASSYFTNMFATWSPSKARLHLQGRSNAWRPQVNNPKEWLQVDFQKTMKVTGVTTQGVKSLDTSMYVKEFLISSSQDGHQWTLFFQNGKVKVFQGNQDSFTPVVNSLDPPLLTRYLRIHPQSWEHQIALRMEVLGCEAQDLY

SEQ ID NO: 1739 - DNA, 4371 bp, synthetic construct
  misc_feature 1..4371: note = Variant of human B-domain deleted Factor VIII
  source 1..4371: mol_type = other DNA
atgcagattgaactgtctacctgcttcttcctctgtttgctgaggttctgctttagcgccactagacggtactaccttggcgctgtggagctgtcctgggactatatgcagagtgatttgggagagcttcccgtcgacgcacgatttcctcctcgcgttccaaagtcatttccctttaacacaagccaggtgtacaagaagacgctcttcgtcgaattcaccgatcacctgttcaatatcgccaaacccagaccaccatggatgggtcttttggggcctaccatacaagcggaggtgtatgacacagttgttatcactctcaagaacatggcttctcatccggtaagtcttcacgcagtgggcgtgtcctactggaaagcttcagaaggagccgagtatgatgatcagacatcccagagggagaaagaagacgacaaggtatttccaggtgggtctcatacctatgtgtggcaagtgctcaaagagaatggccctatggcaagcgatccgccgtgtttgacttacagctacctttcacacgttgacctcgtcaaggacctcaactccgggttgattggagccttgttggtatgcagggaaggatctcttgccaaagagaagacacagaccctggccaagtttatccttctctttgctgtgttcgatgagggcaaaagttggcatagcgaaacgaagaattccctcatgcaggatcgcgacgcagccagcgccagagcttggcccaagatgcacactgtgaacggatatgtcaataggacgcttcctggcttgattgggtgtcatcggaaaagtgtctactggcacgtgatcggaatggggacaacaccagaggtccactccatatttctcgaaggccataccttccttgttcgaaaccacagacaggcatccttggggatctctcccattacctttctcactgcccaaacgctccttcgtgacttgggtcagttccttctcttttgccatatcccgtcacaccagcatgatggtatggaagcttatgtgaaagtcgacagttgtcctgaggagccacagttgcgcatgaagaataatgaagaagccgaggattacgacgacgatctcaccgattctgagatggacgtggtgaggtttgatgacgacaactctccctccatcattcaagctcggagcggggcgaagaaacaccccaagacttgggtccactatatagcggcggaagaggaggattgggattacgctcctcttgtattggcaccagatgaccgctcatacaaaagccagtacctcaacaacggaccgcagagaattggccggaagtataagaaagtgcgatttatggcctatacagacgaaacctttaagacaagggaggccatccagcatgagagtgggattttgggacctcttctttacggcgaagttggtgataccctcctcatcatcttcaagaatcaagcttctcgcccctataacatttacccacacgggatcactgacgttaggcctttgtatagcagaagacttcccaaaggcgtgaagcatctcaaagacttccccattttgccaggcgagatctttaagtacaaatggaccattacagtggaagatggaccgactaaatcagaccctcgatgccttacgcggtactattcctccttcgtgaattgggagagagatttggcaagcggactcataggaccactcctcatctgttacaaggaatctgtagaccagaggggtaaccagattatgagtgataaacgcaatgtgatcctttttagcgtcttcgacgagaaccggtcctggtacttgaccgagaatatacaaaggttccttcccaaccccgcaggcgttcagttggaagaccctgagtttcaggccagcaatattatgcactcaatcaacggctatgtgtttgatagtctccagctttctgtttgcctccatgaagtagcctattggtacatcttgtcaattggtgctcaaacagacttcctctccgtcttcttctccggctacacctttaagcacaagggcgtgtatgaggacactctcacactctttccattttctggagaaaccgtgttcatgagcatggagaatccaggcctttggatcttgggttgccacaacagtgattttcgcaatcggggaatgactgctctcctcaaagtcagcagctgtgattggaacacaggcgactattacgaagattcttacgaggacataagtgcctactttgactccaagaataacgccattgagcccagatcattctcccagaatcctcccgtgcttaaaaggcatcagcgcgaaggtaccagaactactcttcagtctgatcaagaggagattgactatccggacaccattagcgtggaaatgaagaaggaggatttcgatatctatgacgaagatgagaaccagtctccgcggagctttcagaagaagacgcgacactacttcattgcagcagtcgaaaggctttgggactacggtatgtcatcatcccctcatgtgttgcgcaatagagctcagagtggaagtgttccacagttcaagaaagtcgtctttcaagagtttacagatggcagcttcacacagcctctctatcggggcgagcttaacgaacatttgggactccttggtccctatatccgagccgaagtggaggacaacattatggttacctttaggaatcaagcctctcgcccctacagcttctactcctccctcatcagttatgaggaggatcagagacaaggcgctgaaccacggaagaactttgtgaaaccgaatgagacgaagacctacttctggaaagtacagcaccacatggcccccacaaaagacgaattcgattgcaaagcatgggcgtatttttcagacgttgacttggagaaagatgtacattcaggacttattggtcctttgttggtgtgtcacactaacactctcaatccagcccatggcaggcaggtgacagtccaggaattcgctcttttctttaccatctttgatgagaccaagtcctggtacttcacggaaaacatggagcgcaattgcagagccccctgtaacatacagatggaggaccctacctttaaggaaaattatcggttccacgcaatcaacggatacattatggatacactccctggccttgtgatggctcaggaccaacgaatcaggtggtacctcctcagcatgggttctaatgagaacatacactccattcacttttcaggacatgtgttcactgtccggaagaaagaagagtataagatggccctctacaatttgtatccaggcgtgtttgagaccgttgaaatgcttccctctaaagctggcatctggagagtagagtgcttgatcggagaacatcttcacgcaggtatgagcaccttgttcctcgtgtacagcaacaaatgtcagaatccacttggcatggccagtggacacattcgcgactttcagatcacagcatctggccagtatggacaatgggccccaaagttggctcgcctccattactccggtagcataaatgcgtggtccactaaagaacctttcagctggattaaggtcgatcttcttgcccccatgatcatccacggcattaagacacagggagcgaggcagaaattctcctccctctacatctcacagttcattattatgtatagtttggacggcaagaagtggcaaacttatagaggtaacagtactggaacagacatggtgttcttcggcaacgttgatagctctggcatcaaacacaacatctttaatcctcccataatagctcggtacatcagattgcatccgacccactacagcattaggagtacactccgaatggagcttatgggttgcgacttgaattcctgttcaatgccactcggaatggagtctaaagccatctctgatgcacagataaccgccagtagctactttacgaacatgtttgctacgtggtcaccctctaaggcaaggcttcatttgcaaggccggtctaatgcctggagacctcaggtgaacaacccgaaagaatggctccaggtggactttcagaagaccatgaaagtaacaggtgtcactactcagggagttaagtccttggatactagcatgtatgtgaaggagttccttatttcctcatcacaagatggccaccagtggaccctcttctttcagaatggtaaggtcaaagtgtttcagggcaatcaagacagcttcacacccgtggtgaacagtcttgatcctccactcttgacacgataccttcgaatccatccacagtcttgggagcaccagattgcattgcgcatggaagtacttggatgcgaggctcaggacctctac

SEQ ID NO: 1740 - protein, 1457 aa, synthetic construct
  REGION 1..1457: note = Variant of human B-domain deleted Factor VIII
MQIELSTCFFLCLLRFCFSATRRYYLGAVELSWDYMQSDLGELPVDARFPPRVPKSFPFNTSQVYKKTLFVEFTDHLFNIAKPRPPWMGLLGPTIQAEVYDTVVITLKNMASHPVSLHAVGVSYWKASEGAEYDDQTSQREKEDDKVFPGGSHTYVWQVLKENGPMASDPPCLTYSYLSHVDLVKDLNSGLIGALLVCREGSLAKEKTQTLAKFILLFAVFDEGKSWHSETKNSLMQDRDAASARAWPKMHTVNGYVNRTLPGLIGCHRKSVYWHVIGMGTTPEVHSIFLEGHTFLVRNHRQASLGISPITFLTAQTLLRDLGQFLLFCHIPSHQHDGMEAYVKVDSCPEEPQLRMKNNEEAEDYDDDLTDSEMDVVRFDDDNSPSIIQARSGAKKHPKTWVHYIAAEEEDWDYAPLVLAPDDRSYKSQYLNNGPQRIGRKYKKVRFMAYTDETFKTREAIQHESGILGPLLYGEVGDTLLIIFKNQASRPYNIYPHGITDVRPLYSRRLPKGVKHLKDFPILPGEIFKYKWTITVEDGPTKSDPRCLTRYYSSFVNWERDLASGLIGPLLICYKESVDQRGNQIMSDKRNVILFSVFDENRSWYLTENIQRFLPNPAGVQLEDPEFQASNIMHSINGYVFDSLQLSVCLHEVAYWYILSIGAQTDFLSVFFSGYTFKHKGVYEDTLTLFPFSGETVFMSMENPGLWILGCHNSDFRNRGMTALLKVSSCDWNTGDYYEDSYEDISAYFDSKNNAIEPRSFSQNPPVLKRHQREGTRTTLQSDQEEIDYPDTISVEMKKEDFDIYDEDENQSPRSFQKKTRHYFIAAVERLWDYGMSSSPHVLRNRAQSGSVPQFKKVVFQEFTDGSFTQPLYRGELNEHLGLLGPYIRAEVEDNIMVTFRNQASRPYSFYSSLISYEEDQRQGAEPRKNFVKPNETKTYFWKVQHHMAPTKDEFDCKAWAYFSDVDLEKDVHSGLIGPLLVCHTNTLNPAHGRQVTVQEFALFFTIFDETKSWYFTENMERNCRAPCNIQMEDPTFKENYRFHAINGYIMDTLPGLVMAQDQRIRWYLLSMGSNENIHSIHFSGHVFTVRKKEEYKMALYNLYPGVFETVEMLPSKAGIWRVECLIGEHLHAGMSTLFLVYSNKCQNPLGMASGHIRDFQITASGQYGQWAPKLARLHYSGSINAWSTKEPFSWIKVDLLAPMIIHGIKTQGARQKFSSLYISQFIIMYSLDGKKWQTYRGNSTGTDMVFFGNVDSSGIKHNIFNPPIIARYIRLHPTHYSIRSTLRMELMGCDLNSCSMPLGMESKAISDAQITASSYFTNMFATWSPSKARLHLQGRSNAWRPQVNNPKEWLQVDFQKTMKVTGVTTQGVKSLDTSMYVKEFLISSSQDGHQWTLFFQNGKVKVFQGNQDSFTPVVNSLDPPLLTRYLRIHPQSWEHQIALRMEVLGCEAQDLY

SEQ ID NO: 1741 - DNA, 4371 bp, synthetic construct
  misc_feature 1..4371: note = Variant of human B-domain deleted Factor VIII
  source 1..4371: mol_type = other DNA
atgcagattgaactgtctacctgcttcttcctctgtttgctgaggttctgctttagcgccactagacggtactaccttggcgctgtggagctgtcctgggactatatgcagagtgatttgggagagcttcccgtcgacgcacgatttcctcctcgcgttccaaagtcatttccctttaacacaagccaggtgtacaagaagacgctcttcgtcgaattcaccgatcacctgttcaatatcgccaaacccagaccaccatggatgggtcttttggggcctaccatacaagcggaggtgtatgacacagttgttatcactctcaagaacatggcttctcatccggtaagtcttcacgcagtgggcgtgtcctactggaaagcttcagaaggagccgagtatgatgatcagacatcccagagggagaaagaagacgacaaggtatttccaggtgggtctcatacctatgtgtggcaagtgctcaaagagaatggccctatggcaagcgatccgccgtgtttgacttacagctacctttcacacgttgacctcgtcaaggacctcaactccgggttgattggagccttgttggtatgcagggaaggatctcttgccaaagagaagacacagaccctggccaagtttatccttctctttgctgtgttcgatgagggcaaaagttggcatagcgaaacgaagaattccctcatgcaggatcgcgacgcagccagcgccagagcttggcccaagatgcacactgtgaacggatatgtcaataggacgcttcctggcttgattgggtgtcatcggaaaagtgtctactggcacgtgatcggaatggggacaacaccagaggtccactccatatttctcgaaggccataccttccttgttcgaaaccacagacaggcatccttggggatctctcccattacctttctcactgcccaaacgctccttcgtgacttgggtcagttccttctcttttgccatatcccgtcacaccagcatgatggtatggaagcttatgtgaaagtcgacagttgtcctgaggagccacagttgcgcatgaagaataatgaagaagccgaggattacgacgacgatctcaccgattctgagatggacgtggtgaggtttgatgacgacaactctccctccatcattcaagctcggagcggggcgaagaaacaccccaagacttgggtccactatatagcggcggaagaggaggattgggattacgctcctcttgtattggcaccagatgaccgctcatacaaaagccagtacctcaacaacggaccgcagagaattggccggaagtataagaaagtgcgatttatggcctatacagacgaaacctttaagacaagggaggccatccagcatgagagtgggattttgggacctcttctttacggcgaagttggtgataccctcctcatcatcttcaagaatcaagcttctcgcccctataacatttacccacacgggatcactgacgttaggcctttgtatagcagaagacttcccaaaggcgtgaagcatctcaaagacttccccattttgccaggcgagatctttaagtacaaatggaccattacagtggaagatggaccgactaaatcagaccctcgatgccttacgcggtactattcctccttcgtgaattgggagagagatttggcaagcggactcataggaccactcctcatctgttacaaggaatctgtagaccagaggggtaaccagattatgagtgataaacgcaatgtgatcctttttagcgtcttcgacgagaaccggtcctggtacttgaccgagaatatacaaaggttccttcccaaccccgcaggcgttcagttggaagaccctgagtttcaggccagcaatattatgcactcaatcaacggctatgtgtttgatagtctccagctttctgtttgcctccatgaagtagcctattggtacatcttgtcaattggtgctcaaacagacttcctctccgtcttcttctccggctacacctttaagcacaagggcgtgtatgaggacactctcacactctttccattttctggagaaaccgtgttcatgagcatggagaatccaggcctttggatcttgggttgccacaacagtgattttcgcaatcggggaatgactgctctcctcaaagtcagcagctgtgattggaacacaggcgactattacgaagattcttacgaggacataagtgcctactttgactccaagaataacgccattgagcccagatcattctcccagaatcctcccgtgcttaaaaggcatcagcgcgaaggtaccagaactactcttcagtctgatcaagaggagattgactatgacgacaccattagcgtggaaatgaagaagagggatttcgatatctatgacgaagatgagaaccagtctccgcggagctttcagaagaagacgcgacactacttcattgcagcagtcgaaaggctttgggactacggtatgtcatcatcccctcatgtgttgcgcaatagagctcagagtggaagtgttccacagttcaagaaagtcgtctttcaagagtttacagatggcagcttcacacagcctctctatcggggcgagcttaacgaacatttgggactccttggtccctatatccgagccgaagtggaggacaacattatggttacctttaggaatcaagcctctcgcccctacagcttctactcctccctcatcagttatgaggaggatcagagacaaggcgctgaaccacggaagaactttgtgaaaccgaatgagacgaagacctacttctggaaagtacagcaccacatggcccccacaaaagacgaattcgattgcaaagcatgggcgtatttttcagacgttgacttggagaaagatgtacattcaggacttattggtcctttgttggtgtgtcacactaacactctcaatccagcccatggcaggcaggtgacagtccaggaattcgctcttttctttaccatctttgatgagaccaagtcctggtacttcacggaaaacatggagcgcaattgcagagccccctgtaacatacagatggaggaccctacctttaaggaaaattatcggttccacgcaatcaacggatacattatggatacactccctggccttgtgatggctcaggaccaacgaatcaggtggtacctcctcagcatgggttctaatgagaacatacactccattcacttttcaggacatgtgttcactgtccggaagaaagaagagtataagatggccctctacaatttgtatccaggcgtgtttgagaccgttgaaatgcttccctctaaagctggcatctggagagtagagtgcttgatcggagaacatcttcacgcaggtatgagcaccttgttcctcgtgtacagcaacaaatgtcagaatccacttggcatggccagtggacacattcgcgactttcagatcacagcatctggccagtatggacaatgggccccaaagttggctcgcctccattactccggtagcataaatgcgtggtccactaaagaacctttcagctggattaaggtcgatcttcttgcccccatgatcatccacggcattaagacacagggagcgaggcagaaattctcctccctctacatctcacagttcattattatgtatagtttggacggcaagaagtggcaaacttatagaggtaacagtactggaacagacatggtgttcttcggcaacgttgatagctctggcatcaaacacaacatctttaatcctcccataatagctcggtacatcagattgcatccgacccactacagcattaggagtacactccgaatggagcttatgggttgcgacttgaattcctgttcaatgccactcggaatggagtctaaagccatctctgatgcacagataaccgccagtagctactttacgaacatgtttgctacgtggtcaccctctaaggcaaggcttcatttgcaaggccggtctaatgcctggagacctcaggtgaacaacccgaaagaatggctccaggtggactttcagaagaccatgaaagtaacaggtgtcactactcagggagttaagtccttggatactagcatgtatgtgaaggagttccttatttcctcatcacaagatggccaccagtggaccctcttctttcagaatggtaaggtcaaagtgtttcagggcaatcaagacagcttcacacccgtggtgaacagtcttgatcctccactcttgacacgataccttcgaatccatccacagtcttgggagcaccagattgcattgcgcatggaagtacttggatgcgaggctcaggacctctac

SEQ ID NO: 1742 - protein, 1457 aa, synthetic construct
  REGION 1..1457: note = Variant of human B-domain deleted Factor VIII
MQIELSTCFFLCLLRFCFSATRRYYLGAVELSWDYMQSDLGELPVDARFPPRVPKSFPFNTSQVYKKTLFVEFTDHLFNIAKPRPPWMGLLGPTIQAEVYDTVVITLKNMASHPVSLHAVGVSYWKASEGAEYDDQTSQREKEDDKVFPGGSHTYVWQVLKENGPMASDPPCLTYSYLSHVDLVKDLNSGLIGALLVCREGSLAKEKTQTLAKFILLFAVFDEGKSWHSETKNSLMQDRDAASARAWPKMHTVNGYVNRTLPGLIGCHRKSVYWHVIGMGTTPEVHSIFLEGHTFLVRNHRQASLGISPITFLTAQTLLRDLGQFLLFCHIPSHQHDGMEAYVKVDSCPEEPQLRMKNNEEAEDYDDDLTDSEMDVVRFDDDNSPSIIQARSGAKKHPKTWVHYIAAEEEDWDYAPLVLAPDDRSYKSQYLNNGPQRIGRKYKKVRFMAYTDETFKTREAIQHESGILGPLLYGEVGDTLLIIFKNQASRPYNIYPHGITDVRPLYSRRLPKGVKHLKDFPILPGEIFKYKWTITVEDGPTKSDPRCLTRYYSSFVNWERDLASGLIGPLLICYKESVDQRGNQIMSDKRNVILFSVFDENRSWYLTENIQRFLPNPAGVQLEDPEFQASNIMHSINGYVFDSLQLSVCLHEVAYWYILSIGAQTDFLSVFFSGYTFKHKGVYEDTLTLFPFSGETVFMSMENPGLWILGCHNSDFRNRGMTALLKVSSCDWNTGDYYEDSYEDISAYFDSKNNAIEPRSFSQNPPVLKRHQREGTRTTLQSDQEEIDYDDTISVEMKKRDFDIYDEDENQSPRSFQKKTRHYFIAAVERLWDYGMSSSPHVLRNRAQSGSVPQFKKVVFQEFTDGSFTQPLYRGELNEHLGLLGPYIRAEVEDNIMVTFRNQASRPYSFYSSLISYEEDQRQGAEPRKNFVKPNETKTYFWKVQHHMAPTKDEFDCKAWAYFSDVDLEKDVHSGLIGPLLVCHTNTLNPAHGRQVTVQEFALFFTIFDETKSWYFTENMERNCRAPCNIQMEDPTFKENYRFHAINGYIMDTLPGLVMAQDQRIRWYLLSMGSNENIHSIHFSGHVFTVRKKEEYKMALYNLYPGVFETVEMLPSKAGIWRVECLIGEHLHAGMSTLFLVYSNKCQNPLGMASGHIRDFQITASGQYGQWAPKLARLHYSGSINAWSTKEPFSWIKVDLLAPMIIHGIKTQGARQKFSSLYISQFIIMYSLDGKKWQTYRGNSTGTDMVFFGNVDSSGIKHNIFNPPIIARYIRLHPTHYSIRSTLRMELMGCDLNSCSMPLGMESKAISDAQITASSYFTNMFATWSPSKARLHLQGRSNAWRPQVNNPKEWLQVDFQKTMKVTGVTTQGVKSLDTSMYVKEFLISSSQDGHQWTLFFQNGKVKVFQGNQDSFTPVVNSLDPPLLTRYLRIHPQSWEHQIALRMEVLGCEAQDLY

SEQ ID NO: 1743 - DNA, 4371 bp, synthetic construct
  misc_feature 1..4371: note = Variant of human B-domain deleted Factor VIII
  source 1..4371: mol_type = other DNA
atgcagattgaactgtctacctgcttcttcctctgtttgctgaggttctgctttagcgccactagacggtactaccttggcgctgtggagctgtcctgggactatatgcagagtgatttgggagagcttcccgtcgacgcacgatttcctcctcgcgttccaaagtcatttccctttaacacaagccaggtgtacaagaagacgctcttcgtcgaattcaccgatcacctgttcaatatcgccaaacccagaccaccatggatgggtcttttggggcctaccatacaagcggaggtgtatgacacagttgttatcactctcaagaacatggcttctcatccggtaagtcttcacgcagtgggcgtgtcctactggaaagcttcagaaggagccgagtatgatgatcagacatcccagagggagaaagaagacgacaaggtatttccaggtgggtctcatacctatgtgtggcaagtgctcaaagagaatggccctatggcaagcgatccgccgtgtttgacttacagctacctttcacacgttgacctcgtcaaggacctcaactccgggttgattggagccttgttggtatgcagggaaggatctcttgccaaagagaagacacagaccctggccaagtttatccttctctttgctgtgttcgatgagggcaaaagttggcatagcgaaacgaagaattccctcatgcaggatcgcgacgcagccagcgccagagcttggcccaagatgcacactgtgaacggatatgtcaataggacgcttcctggcttgattgggtgtcatcggaaaagtgtctactggcacgtgatcggaatggggacaacaccagaggtccactccatatttctcgaaggccataccttccttgttcgaaaccacagacaggcatccttggggatctctcccattacctttctcactgcccaaacgctccttcgtgacttgggtcagttccttctcttttgccatatcccgtcacaccagcatgatggtatggaagcttatgtgaaagtcgacagttgtcctgaggagccacagttgcgcatgaagaataatgaagaagccgaggattacgacgacgatctcaccgattctgagatggacgtggtgaggtttgatgacgacaactctccctccatcattcaagctcggagcggggcgaagaaacaccccaagacttgggtccactatatagcggcggaagaggaggattgggattacgctcctcttgtattggcaccagatgaccgctcatacaaaagccagtacctcaacaacggaccgcagagaattggccggaagtataagaaagtgcgatttatggcctatacagacgaaacctttaagacaagggaggccatccagcatgagagtgggattttgggacctcttctttacggcgaagttggtgataccctcctcatcatcttcaagaatcaagcttctcgcccctataacatttacccacacgggatcactgacgttaggcctttgtatagcagaagacttcccaaaggcgtgaagcatctcaaagacttccccattttgccaggcgagatctttaagtacaaatggaccattacagtggaagatggaccgactaaatcagaccctcgatgccttacgcggtactattcctccttcgtgaattgggagagagatttggcaagcggactcataggaccactcctcatctgttacaaggaatctgtagaccagaggggtaaccagattatgagtgataaacgcaatgtgatcctttttagcgtcttcgacgagaaccggtcctggtacttgaccgagaatatacaaaggttccttcccaaccccgcaggcgttcagttggaagaccctgagtttcaggccagcaatattatgcactcaatcaacggctatgtgtttgatagtctccagctttctgtttgcctccatgaagtagcctattggtacatcttgtcaattggtgctcaaacagacttcctctccgtcttcttctccggctacacctttaagcacaagggcgtgtatgaggacactctcacactctttccattttctggagaaaccgtgttcatgagcatggagaatccaggcctttggatcttgggttgccacaacagtgattttcgcaatcggggaatgactgctctcctcaaagtcagcagctgtgattggaacacaggcgactataaggaagattcttacgaggacataagtgcctactttgactccaagaataacgccattgagcccagatcattctcccagaatcctcccgtgcttaaaaggcatcagcgcgaaggtaccagaactactcttcagtctgatcaagaggagattgactatgacgacaccattagcgtggaaatgaagaaggaggatttcgatatctatgacgaagatgagaaccagtctccgcggagctttcagaagaagacgcgacactacttcattgcagcagtcgaaaggctttgggactacggtatgtcatcatcccctcatgtgttgcgcaatagagctcagagtggaagtgttccacagttcaagaaagtcgtctttcaagagtttacagatggcagcttcacacagcctctctatcggggcgagcttaacgaacatttgggactccttggtccctatatccgagccgaagtggaggacaacattatggttacctttaggaatcaagcctctcgcccctacagcttctactcctccctcatcagttatgaggaggatcagagacaaggcgctgaaccacggaagaactttgtgaaaccgaatgagacgaagacctacttctggaaagtacagcaccacatggcccccacaaaagacgaattcgattgcaaagcatgggcgtatttttcagacgttgacttggagaaagatgtacattcaggacttattggtcctttgttggtgtgtcacactaacactctcaatccagcccatggcaggcaggtgacagtccaggaattcgctcttttctttaccatctttgatgagaccaagtcctggtacttcacggaaaacatggagcgcaattgcagagccccctgtaacatacagatggaggaccctacctttaaggaaaattatcggttccacgcaatcaacggatacattatggatacactccctggccttgtgatggctcaggaccaacgaatcaggtggtacctcctcagcatgggttctaatgagaacatacactccattcacttttcaggacatgtgttcactgtccggaagaaagaagagtataagatggccctctacaatttgtatccaggcgtgtttgagaccgttgaaatgcttccctctaaagctggcatctggagagtagagtgcttgatcggagaacatcttcacgcaggtatgagcaccttgttcctcgtgtacagcaacaaatgtcagaatccacttggcatggccagtggacacattcgcgactttcagatcacagcatctggccagtatggacaatgggccccaaagttggctcgcctccattactccggtagcataaatgcgtggtccactaaagaacctttcagctggattaaggtcgatcttcttgcccccatgatcatccacggcattaagacacagggagcgaggcagaaattctcctccctctacatctcacagttcattattatgtatagtttggacggcaagaagtggcaaacttatagaggtaacagtactggaacagacatggtgttcttcggcaacgttgatagctctggcatcaaacacaacatctttaatcctcccataatagctcggtacatcagattgcatccgacccactacagcattaggagtacactccgaatggagcttatgggttgcgacttgaattcctgttcaatgccactcggaatggagtctaaagccatctctgatgcacagataaccgccagtagctactttacgaacatgtttgctacgtggtcaccctctaaggcaaggcttcatttgcaaggccggtctaatgcctggagacctcaggtgaacaacccgaaagaatggctccaggtggactttcagaagaccatgaaagtaacaggtgtcactactcagggagttaagtccttggatactagcatgtatgtgaaggagttccttatttcctcatcacaagatggccaccagtggaccctcttctttcagaatggtaaggtcaaagtgtttcagggcaatcaagacagcttcacacccgtggtgaacagtcttgatcctccactcttgacacgataccttcgaatccatccacagtcttgggagcaccagattgcattgcgcatggaagtacttggatgcgaggctcaggacctctac

SEQ ID NO: 1744 - protein, 1457 aa, synthetic construct
  REGION 1..1457: note = Variant of human B-domain deleted Factor VIII
MQIELSTCFFLCLLRFCFSATRRYYLGAVELSWDYMQSDLGELPVDARFPPRVPKSFPFNTSQVYKKTLFVEFTDHLFNIAKPRPPWMGLLGPTIQAEVYDTVVITLKNMASHPVSLHAVGVSYWKASEGAEYDDQTSQREKEDDKVFPGGSHTYVWQVLKENGPMASDPPCLTYSYLSHVDLVKDLNSGLIGALLVCREGSLAKEKTQTLAKFILLFAVFDEGKSWHSETKNSLMQDRDAASARAWPKMHTVNGYVNRTLPGLIGCHRKSVYWHVIGMGTTPEVHSIFLEGHTFLVRNHRQASLGISPITFLTAQTLLRDLGQFLLFCHIPSHQHDGMEAYVKVDSCPEEPQLRMKNNEEAEDYDDDLTDSEMDVVRFDDDNSPSIIQARSGAKKHPKTWVHYIAAEEEDWDYAPLVLAPDDRSYKSQYLNNGPQRIGRKYKKVRFMAYTDETFKTREAIQHESGILGPLLYGEVGDTLLIIFKNQASRPYNIYPHGITDVRPLYSRRLPKGVKHLKDFPILPGEIFKYKWTITVEDGPTKSDPRCLTRYYSSFVNWERDLASGLIGPLLICYKESVDQRGNQIMSDKRNVILFSVFDENRSWYLTENIQRFLPNPAGVQLEDPEFQASNIMHSINGYVFDSLQLSVCLHEVAYWYILSIGAQTDFLSVFFSGYTFKHKGVYEDTLTLFPFSGETVFMSMENPGLWILGCHNSDFRNRGMTALLKVSSCDWNTGDYKEDSYEDISAYFDSKNNAIEPRSFSQNPPVLKRHQREGTRTTLQSDQEEIDYDDTISVEMKKEDFDIYDEDENQSPRSFQKKTRHYFIAAVERLWDYGMSSSPHVLRNRAQSGSVPQFKKVVFQEFTDGSFTQPLYRGELNEHLGLLGPYIRAEVEDNIMVTFRNQASRPYSFYSSLISYEEDQRQGAEPRKNFVKPNETKTYFWKVQHHMAPTKDEFDCKAWAYFSDVDLEKDVHSGLIGPLLVCHTNTLNPAHGRQVTVQEFALFFTIFDETKSWYFTENMERNCRAPCNIQMEDPTFKENYRFHAINGYIMDTLPGLVMAQDQRIRWYLLSMGSNENIHSIHFSGHVFTVRKKEEYKMALYNLYPGVFETVEMLPSKAGIWRVECLIGEHLHAGMSTLFLVYSNKCQNPLGMASGHIRDFQITASGQYGQWAPKLARLHYSGSINAWSTKEPFSWIKVDLLAPMIIHGIKTQGARQKFSSLYISQFIIMYSLDGKKWQTYRGNSTGTDMVFFGNVDSSGIKHNIFNPPIIARYIRLHPTHYSIRSTLRMELMGCDLNSCSMPLGMESKAISDAQITASSYFTNMFATWSPSKARLHLQGRSNAWRPQVNNPKEWLQVDFQKTMKVTGVTTQGVKSLDTSMYVKEFLISSSQDGHQWTLFFQNGKVKVFQGNQDSFTPVVNSLDPPLLTRYLRIHPQSWEHQIALRMEVLGCEAQDLY

SEQ ID NO: 1745 - DNA, 4371 bp, synthetic construct
  misc_feature 1..4371: note = Variant of human B-domain deleted Factor VIII
  source 1..4371: mol_type = other DNA
atgcagattgaactgtctacctgcttcttcctctgtttgctgaggttctgctttagcgccactagacggtactaccttggcgctgtggagctgtcctgggactatatgcagagtgatttgggagagcttcccgtcgacgcacgatttcctcctcgcgttccaaagtcatttccctttaacacaagccaggtgtacaagaagacgctcttcgtcgaattcaccgatcacctgttcaatatcgccaaacccagaccaccatggatgggtcttttggggcctaccatacaagcggaggtgtatgacacagttgttatcactctcaagaacatggcttctcatccggtaagtcttcacgcagtgggcgtgtcctactggaaagcttcagaaggagccgagtatgatgatcagacatcccagagggagaaagaagacgacaaggtatttccaggtgggtctcatacctatgtgtggcaagtgctcaaagagaatggccctatggcaagcgatccgccgtgtttgacttacagctacctttcacacgttgacctcgtcaaggacctcaactccgggttgattggagccttgttggtatgcagggaaggatctcttgccaaagagaagacacagaccctggccaagtttatccttctctttgctgtgttcgatgagggcaaaagttggcatagcgaaacgaagaattccctcatgcaggatcgcgacgcagccagcgccagagcttggcccaagatgcacactgtgaacggatatgtcaataggacgcttcctggcttgattgggtgtcatcggaaaagtgtctactggcacgtgatcggaatggggacaacaccagaggtccactccatatttctcgaaggccataccttccttgttcgaaaccacagacaggcaggtttggggatctctcccattacctttctcactgcccaaacgctccttcgtgacttgggtcagttccttctcttttgccatatcccgtcacaccagcatgatggtatggaagcttatgtgaaagtcgacagttgtcctgaggagccacagttgcgcatgaagaataatgaagaagccgaggattacgacgacgatctcaccgattctgagatggacgtggtgaggtttgatgacgacaactctccctccatcattcaagctcggagcggggcgaagaaacaccccaagacttgggtccactatatagcggcggaagaggaggattgggattacgctcctcttgtattggcaccagatgaccgctcatacaaaagccagtacctcaacaacggaccgcagagaattggccggaagtataagaaagtgcgatttatggcctatacagacgaaacctttaagacaagggaggccatccagcatgagagtgggattttgggacctcttctttacggcgaagttggtgataccctcctcatcatcttcaagaatcaagcttctcgcccctataacatttacccacacgggatcactgacgttaggcctttgtatagcagaagacttcccaaaggcgtgaagcatctcaaagacttccccattttgccaggcgagatctttaagtacaaatggaccattacagtggaagatggaccgactaaatcagaccctcgatgccttacgcggtactattcctccttcgtgaattgggagagagatttggcaagcggactcataggaccactcctcatctgttacaaggaatctgtagaccagaggggtaaccagattatgagtgataaacgcaatgtgatcctttttagcgtcttcgacgagaaccggtcctggtacttgaccgagaatatacaaaggttccttcccaaccccgcaggcgttcagttggaagaccctgagtttcaggccagcaatattatgcactcaatcaacggctatgtgtttgatagtctccagctttctgtttgcctccatgaagtagcctattggtacatcttgtcaattggtgctcaaacagacttcctctccgtcttcttctccggctacacctttaagcacaagggcgtgtatgaggacactctcacactctttccattttctggagaaaccgtgttcatgagcatggagaatccaggcctttggatcttgggttgccacaacagtgattttcgcaatcggggaatgactgctctcctcaaagtcagcagctgtgattggaacacaggcgactattacgaagattcttacgaggacataagtgcctactttgactccaagaataacgccattgagcccagatcattctcccagaatcctcccgtgcttaaaaggcatcagcgcgaaggtaccagaactactcttcagtctgatcaagaggagattgactatgacgacaccattagcgtggaaatgaagaaggaggatttcgatatctatgacgaagatgagaaccagtctccgcggagctttcagaagaagacgcgacactacttcattgcagcagtcgaaaggctttgggactacggtatgtcatcatcccctcatgtgttgcgcaatagagctcagagtggaagtgttccacagttcaagaaagtcgtctttcaagagtttacagatggcagcttcacacagcctctctatcggggcgagcttaacgaacatttgggactccttggtccctatatccgagccgaagtggaggacaacattatggttacctttaggaatcaagcctctcgcccctacagcttctactcctccctcatcagttatgaggaggatcagagacaaggcgctgaaccacggaagaactttgtgaaaccgaatgagacgaagacctacttctggaaagtacagcaccacatggcccccacaaaagacgaattcgattgcaaagcatgggcgtatttttcagacgttgacttggagaaagatgtacattcaggacttattggtcctttgttggtgtgtcacactaacactctcaatccagcccatggcaggcaggtgacagtccaggaattcgctcttttctttaccatctttgatgagaccaagtcctggtacttcacggaaaacatggagcgcaattgcagagccccctgtaacatacagatggaggaccctacctttaaggaaaattatcggttccacgcaatcaacggatacattatggatacactccctggccttgtgatggctcaggaccaacgaatcaggtggtacctcctcagcatgggttctaatgagaacatacactccattcacttttcaggacatgtgttcactgtccggaagaaagaagagtataagatggccctctacaatttgtatccaggcgtgtttgagaccgttgaaatgcttccctctaaagctggcatctggagagtagagtgcttgatcggagaacatcttcacgcaggtatgagcaccttgttcctcgtgtacagcaacaaatgtcagaatccacttggcatggccagtggacacattcgcgactttcagatcacagcatctggccagtatggacaatgggccccaaagttggctcgcctccattactccggtagcataaatgcgtggtccactaaagaacctttcagctggattaaggtcgatcttcttgcccccatgatcatccacggcattaagacacagggagcgaggcagaaattctcctccctctacatctcacagttcattattatgtatagtttggacggcaagaagtggcaaacttatagaggtaacagtactggaacagacatggtgttcttcggcaacgttgatagctctggcatcaaacacaacatctttaatcctcccataatagctcggtacatcagattgcatccgacccactacagcattaggagtacactccgaatggagcttatgggttgcgacttgaattcctgttcaatgccactcggaatggagtctaaagccatctctgatgcacagataaccgccagtagctactttacgaacatgtttgctacgtggtcaccctctaaggcaaggcttcatttgcaaggccggtctaatgcctggagacctcaggtgaacaacccgaaagaatggctccaggtggactttcagaagaccatgaaagtaacaggtgtcactactcagggagttaagtccttggatactagcatgtatgtgaaggagttccttatttcctcatcacaagatggccaccagtggaccctcttctttcagaatggtaaggtcaaagtgtttcagggcaatcaagacagcttcacacccgtggtgaacagtcttgatcctccactcttgacacgataccttcgaatccatccacagtcttgggagcaccagattgcattgcgcatggaagtacttggatgcgaggctcaggacctctac

SEQ ID NO: 1746 - protein, 1457 aa, synthetic construct
  REGION 1..1457: note = Variant of human B-domain deleted Factor VIII
MQIELSTCFFLCLLRFCFSATRRYYLGAVELSWDYMQSDLGELPVDARFPPRVPKSFPFNTSQVYKKTLFVEFTDHLFNIAKPRPPWMGLLGPTIQAEVYDTVVITLKNMASHPVSLHAVGVSYWKASEGAEYDDQTSQREKEDDKVFPGGSHTYVWQVLKENGPMASDPPCLTYSYLSHVDLVKDLNSGLIGALLVCREGSLAKEKTQTLAKFILLFAVFDEGKSWHSETKNSLMQDRDAASARAWPKMHTVNGYVNRTLPGLIGCHRKSVYWHVIGMGTTPEVHSIFLEGHTFLVRNHRQAGLGISPITFLTAQTLLRDLGQFLLFCHIPSHQHDGMEAYVKVDSCPEEPQLRMKNNEEAEDYDDDLTDSEMDVVRFDDDNSPSIIQARSGAKKHPKTWVHYIAAEEEDWDYAPLVLAPDDRSYKSQYLNNGPQRIGRKYKKVRFMAYTDETFKTREAIQHESGILGPLLYGEVGDTLLIIFKNQASRPYNIYPHGITDVRPLYSRRLPKGVKHLKDFPILPGEIFKYKWTITVEDGPTKSDPRCLTRYYSSFVNWERDLASGLIGPLLICYKESVDQRGNQIMSDKRNVILFSVFDENRSWYLTENIQRFLPNPAGVQLEDPEFQASNIMHSINGYVFDSLQLSVCLHEVAYWYILSIGAQTDFLSVFFSGYTFKHKGVYEDTLTLFPFSGETVFMSMENPGLWILGCHNSDFRNRGMTALLKVSSCDWNTGDYYEDSYEDISAYFDSKNNAIEPRSFSQNPPVLKRHQREGTRTTLQSDQEEIDYDDTISVEMKKEDFDIYDEDENQSPRSFQKKTRHYFIAAVERLWDYGMSSSPHVLRNRAQSGSVPQFKKVVFQEFTDGSFTQPLYRGELNEHLGLLGPYIRAEVEDNIMVTFRNQASRPYSFYSSLISYEEDQRQGAEPRKNFVKPNETKTYFWKVQHHMAPTKDEFDCKAWAYFSDVDLEKDVHSGLIGPLLVCHTNTLNPAHGRQVTVQEFALFFTIFDETKSWYFTENMERNCRAPCNIQMEDPTFKENYRFHAINGYIMDTLPGLVMAQDQRIRWYLLSMGSNENIHSIHFSGHVFTVRKKEEYKMALYNLYPGVFETVEMLPSKAGIWRVECLIGEHLHAGMSTLFLVYSNKCQNPLGMASGHIRDFQITASGQYGQWAPKLARLHYSGSINAWSTKEPFSWIKVDLLAPMIIHGIKTQGARQKFSSLYISQFIIMYSLDGKKWQTYRGNSTGTDMVFFGNVDSSGIKHNIFNPPIIARYIRLHPTHYSIRSTLRMELMGCDLNSCSMPLGMESKAISDAQITASSYFTNMFATWSPSKARLHLQGRSNAWRPQVNNPKEWLQVDFQKTMKVTGVTTQGVKSLDTSMYVKEFLISSSQDGHQWTLFFQNGKVKVFQGNQDSFTPVVNSLDPPLLTRYLRIHPQSWEHQIALRMEVLGCEAQDLY

SEQ ID NO: 1747 - DNA, 4371 bp, synthetic construct
  misc_feature 1..4371: note = Variant of human B-domain deleted Factor VIII
  source 1..4371: mol_type = other DNA
atgcagattgaactgtctacctgcttcttcctctgtttgctgaggttctgctttagcgccactagacggtactaccttggcgctgtggagctgtcctgggactatatgcagagtgatttgggagagcttcccgtcgacgcacgatttcctcctcgcgttccaaagtcatttccctttaacacaagccaggtgtacaagaagacgctcttcgtcgaattcaccgatcacctgttcaatatcgccaaacccagaccaccatggatgggtcttttggggcctaccatacaagcggaggtgtatgacacagttgttatcactctcaagaacatggcttctcatccggtaagtcttcacgcagtgggcgtgtcctactggaaagcttcagaaggagccgagtatgatgatcagacatcccagagggagaaagaagacgacaaggtatttccaggtgggtctcatacctatgtgtggcaagtgctcaaagagaatggccctatggcaagcgatccgccgtgtttgacttacagctacctttcacacgttgacctcgtcaaggacctcaactccgggttgattggagccttgttggtatgcagggaaggatctcttgccaaagagaagacacagaccctggccaagtttatccttctctttgctgtgttcgatgagggcaaaagttggcatagcgaaacgaagaattccctcatgcaggatcgcgacgcagccagcgccagagcttggcccaagatgcacactgtgaacggatatgtcaataggacgcttcctggcttgattgggtgtcatcggaaaagtgtctactggcacgtgatcggaatggggacaacaccagaggtccactccatatttctcgaaggccataccttccttgttcgaaaccacagacaggcatccttggggatctctcccattacctttctcactgcccaaacgctccttcgtgacttgggtcagttccttctcttttgccatatcccgtcacaccagcatgatggtatggaagcttatgtgaaagtcgacagttgtcctgaggagccacagttgcgcatgaagaataatgaagaagccgaggattacgacgacgatctcaccgattctgagatggacgtggtgaggtttgatgacgacaactctccctccatcattcaagctcggagcggggcgaagaaacaccccaagacttgggtccactatatagcggcggaagaggaggattgggattacgctcctcttgtattggcaccagatgaccgctcatacaaaagccagtacctcaacaacggaccgcagagaattggccggaagtataagaaagtgcgatttatggcctatacagacgaaacctttaagacaagggaggccatccagcatgagagtgggattttgggacctcttctttacggcgaagttggtgataccctcctcatcatcttcaagaatcaagcttctcgcccctataacatttacccacacgggatcactgacgttaggcctttgtatagcagaagacttcccaaaggcgtgaagcatctcaaagacttccccattttgccaggcgagatctttaagtacaaatggaccattacagtggaagatggaccgactaaatcagaccctcgatgccttacgcggtactattcctccttcgtgaattgggagagagatttggcaagcggactcataggaccactcctcatctgttacaaggaatctgtagaccagaggggtaaccagattatgagtgataaacgcaatgtgatcctttttagcgtcttcgacgagaaccggtcctggtacttgaccgagaatatacaaaggttccttcccaaccccgcaggcgttcagttggaagaccctgagtttcaggccagcaatattatgcactcaatcaacggctatgtgtttgatagtctccagctttctgtttgcctccatgaagtagcctattggtacatcttgtcaattggtgctcaaacagacttcctctccgtcttcttctccggctacacctttaagcacaagggcgtgtatgaggacactctcacactctttccattttctggagaaaccgtgttcatgagcatggagaatccaggcctttggatcttgggttgccacaacagtgattttcgcaatcggggaatgactgctctcctcaaagtcagcagctgtgattggaacacaggcgactattacgaagattcttacgaggacataagtgcctactttgactccaagaataacgccattgagcccagatcattctcccagaatcctcccgtgcttaaaaggcatcagcgcgaaggtaccagaactactcttcagtctgatcaagaggagattgactatgacgacaccattagcgtggaaatgaagaaggaggatttcgatatctatgacgaagatgagaaccagtctccgcggagctttcagaagaagacgcgacactacttcattgcagcagtcgaaaggctttgggactacggtatgtcatcatcccctcatgtgttgcgcaatagagctcagagtggaagtgttccacagttcaagaaagtcgtctttcaagagtttacagatggcagcttcacacagcctctctatcggggcgagcttaacgaacatttgggactccttggtccctatatccgagccgaagtggaggacaacattatggttacctttaggaatcaagcctctcgcccctacagcttctactcctccctcatcagttatgaggaggatcagagacaaggcgctgaaccacggaagaactttgtgaaaccgaatgagacgaagacctacttctggaaagtacagcaccacatggcccccacaaaagacgaattcgattgcaaagcatgggcgtatttttcagacgttgacttggagaaagatgtacattcaggacttattggtcctttgttggtgtgtcacactaacactctcaatccagcccatggcaggcaggtgacagtccaggaattcgctcttttctttaccatctttgatgagaccaagtcctggtacttcacggaaaacatggagcgcaattgcagagccccctgtaacatacagatggaggaccctacctttaaggaaaattatcggttccacgcaatcaacggatacattatggatacactccctggccttgtgatggctcaggaccaacgaatcaggtggtacctcctcagcatgggttctaatgagaacatacactccattcacttttcaggacatgtgttcactgtccggaagaaagaagagtataagatggccctctacaatttgtatccaggcgtgtttgagaccgttgaaatgcttcccggtaaagctggcatctggagagtagagtgcttgatcggagaacatcttcacgcaggtatgagcaccttgttcctcgtgtacagcaacaaatgtcagaatccacttggcatggccagtggacacattcgcgactttcagatcacagcatctggccagtatggacaatgggccccaaagttggctcgcctccattactccggtagcataaatgcgtggtccactaaagaacctttcagctggattaaggtcgatcttcttgcccccatgatcatccacggcattaagacacagggagcgaggcagaaattctcctccctctacatctcacagttcattattatgtatagtttggacggcaagaagtggcaaacttatagaggtaacagtactggaacagacatggtgttcttcggcaacgttgatagctctggcatcaaacacaacatctttaatcctcccataatagctcggtacatcagattgcatccgacccactacagcattaggagtacactccgaatggagcttatgggttgcgacttgaattcctgttcaatgccactcggaatggagtctaaagccatctctgatgcacagataaccgccagtagctactttacgaacatgtttgctacgtggtcaccctctaaggcaaggcttcatttgcaaggccggtctaatgcctggagacctcaggtgaacaacccgaaagaatggctccaggtggactttcagaagaccatgaaagtaacaggtgtcactactcagggagttaagtccttggatactagcatgtatgtgaaggagttccttatttcctcatcacaagatggccaccagtggaccctcttctttcagaatggtaaggtcaaagtgtttcagggcaatcaagacagcttcacacccgtggtgaacagtcttgatcctccactcttgacacgataccttcgaatccatccacagtcttgggagcaccagattgcattgcgcatggaagtacttggatgcgaggctcaggacctctac

SEQ ID NO: 1748 - protein, 1457 aa, synthetic construct
  REGION 1..1457: note = Variant of human B-domain deleted Factor VIII
MQIELSTCFFLCLLRFCFSATRRYYLGAVELSWDYMQSDLGELPVDARFPPRVPKSFPFNTSQVYKKTLFVEFTDHLFNIAKPRPPWMGLLGPTIQAEVYDTVVITLKNMASHPVSLHAVGVSYWKASEGAEYDDQTSQREKEDDKVFPGGSHTYVWQVLKENGPMASDPPCLTYSYLSHVDLVKDLNSGLIGALLVCREGSLAKEKTQTLAKFILLFAVFDEGKSWHSETKNSLMQDRDAASARAWPKMHTVNGYVNRTLPGLIGCHRKSVYWHVIGMGTTPEVHSIFLEGHTFLVRNHRQASLGISPITFLTAQTLLRDLGQFLLFCHIPSHQHDGMEAYVKVDSCPEEPQLRMKNNEEAEDYDDDLTDSEMDVVRFDDDNSPSIIQARSGAKKHPKTWVHYIAAEEEDWDYAPLVLAPDDRSYKSQYLNNGPQRIGRKYKKVRFMAYTDETFKTREAIQHESGILGPLLYGEVGDTLLIIFKNQASRPYNIYPHGITDVRPLYSRRLPKGVKHLKDFPILPGEIFKYKWTITVEDGPTKSDPRCLTRYYSSFVNWERDLASGLIGPLLICYKESVDQRGNQIMSDKRNVILFSVFDENRSWYLTENIQRFLPNPAGVQLEDPEFQASNIMHSINGYVFDSLQLSVCLHEVAYWYILSIGAQTDFLSVFFSGYTFKHKGVYEDTLTLFPFSGETVFMSMENPGLWILGCHNSDFRNRGMTALLKVSSCDWNTGDYYEDSYEDISAYFDSKNNAIEPRSFSQNPPVLKRHQREGTRTTLQSDQEEIDYDDTISVEMKKEDFDIYDEDENQSPRSFQKKTRHYFIAAVERLWDYGMSSSPHVLRNRAQSGSVPQFKKVVFQEFTDGSFTQPLYRGELNEHLGLLGPYIRAEVEDNIMVTFRNQASRPYSFYSSLISYEEDQRQGAEPRKNFVKPNETKTYFWKVQHHMAPTKDEFDCKAWAYFSDVDLEKDVHSGLIGPLLVCHTNTLNPAHGRQVTVQEFALFFTIFDETKSWYFTENMERNCRAPCNIQMEDPTFKENYRFHAINGYIMDTLPGLVMAQDQRIRWYLLSMGSNENIHSIHFSGHVFTVRKKEEYKMALYNLYPGVFETVEMLPGKAGIWRVECLIGEHLHAGMSTLFLVYSNKCQNPLGMASGHIRDFQITASGQYGQWAPKLARLHYSGSINAWSTKEPFSWIKVDLLAPMIIHGIKTQGARQKFSSLYISQFIIMYSLDGKKWQTYRGNSTGTDMVFFGNVDSSGIKHNIFNPPIIARYIRLHPTHYSIRSTLRMELMGCDLNSCSMPLGMESKAISDAQITASSYFTNMFATWSPSKARLHLQGRSNAWRPQVNNPKEWLQVDFQKTMKVTGVTTQGVKSLDTSMYVKEFLISSSQDGHQWTLFFQNGKVKVFQGNQDSFTPVVNSLDPPLLTRYLRIHPQSWEHQIALRMEVLGCEAQDLY

SEQ ID NO: 1749 - DNA, 4371 bp, synthetic construct
  misc_feature 1..4371: note = Variant of human B-domain deleted Factor VIII
  source 1..4371: mol_type = other DNA
atgcagattgaactgtctacctgcttcttcctctgtttgctgaggttctgctttagcgccactagacggtactaccttggcgctgtggagctgtcctgggactatatgcagagtgatttgggagagcttcccgtcgacgcacgatttcctcctcgcgttccaaagtcatttccctttaacacaagccaggtgtacaagaagacgctcttcgtcgaattcaccgatcacctgttcaatatcgccaaacccagaccaccatggatgggtcttttggggcctaccatacaagcggaggtgtatgacacagttgttatcactctcaagaacatggcttctcatccggtaagtcttcacgcagtgggcgtgtcctactggaaagcttcagaaggagccgagtatgatgatcagacatcccagagggagaaagaagacgacaaggtatttccaggtgggtctcatacctatgtgtggcaagtgctcaaagagaatggccctatggcaagcgatccgccgtgtttgacttacagctaccagtcacacgttgacctcgtcaaggacctcaactccgggttgattggagccttgttggtatgcagggaaggatctcttgccaaagagaagacacagaccctggccaagtttatccttctctttgctgtgttcgatgagggcaaaagttggcatagcgaaacgaagaattccctcatgcaggatcgcgacgcagccagcgccagagcttggcccaagatgcacactgtgaacggatatgtcaataggacgcttcctggcttgattgggtgtcatcggaaaagtgtctactggcacgtgatcggaatggggacaacaccagaggtccactccatatttctcgaaggccataccttccttgttcgaaaccacagacaggcatccttggggatctctcccattacctttctcactgcccaaacgctccttcgtgacttgggtcagttccttctcttttgccatatcccgtcacaccagcatgatggtatggaagcttatgtgaaagtcgacagttgtcctgaggagccacagttgcgcatgaagaataatgaagaagccgaggattacgacgacgatctcaccgattctgagatggacgtggtgaggtttgatgacgacaactctccctccatcattcaagctcggagcggggcgaagaaacaccccaagacttgggtccactatatagcggcggaagaggaggattgggattacgctcctcttgtattggcaccagatgaccgctcatacaaaagccagtacctcaacaacggaccgcagagaattggccggaagtataagaaagtgcgatttatggcctatacagacgaaacctttaagacaagggaggccatccagcatgagagtgggattttgggacctcttctttacggcgaagttggtgataccctcctcatcatcttcaagaatcaagcttctcgcccctataacatttacccacacgggatcactgacgttaggcctttgtatagcagaagacttcccaaaggcgtgaagcatctcaaagacttccccattttgccaggcgagatctttaagtacaaatggaccattacagtggaagatggaccgactaaatcagaccctcgatgccttacgcggtactattcctccttcgtgaattgggagagagatttggcaagcggactcataggaccactcctcatctgttacaaggaatctgtagaccagaggggtaaccagattatgagtgataaacgcaatgtgatcctttttagcgtcttcgacgagaaccggtcctggtacttgaccgagaatatacaaaggttccttcccaaccccgcaggcgttcagttggaagaccctgagtttcaggccagcaatattatgcactcaatcaacggctatgtgtttgatagtctccagctttctgtttgcctccatgaagtagcctattggtacatcttgtcaattggtgctcaaacagacttcctctccgtcttcttctccggctacacctttaagcacaagggcgtgtatgaggacactctcacactctttccattttctggagaaaccgtgttcatgagcatggagaatccaggcctttggatcttgggttgccacaacagtgattttcgcaatcggggaatgactgctctcctcaaagtcagcagctgtgattggaacacaggcgactattacgaagattcttacgaggacataagtgcctactttgactccaagaataacgccattgagcccagatcattctcccagaatcctcccgtgcttaaaaggcatcagcgcgaaggtaccagaactactcttcagtctgatcaagaggagattgactatgacgacaccattagcgtggaaatgaagaaggaggatttcgatatctatgacgaagatgagaaccagtctccgcggagctttcagaagaagacgcgacactacttcattgcagcagtcgaaaggctttgggactacggtatgtcatcatcccctcatgtgttgcgcaatagagctcagagtggaagtgttccacagttcaagaaagtcgtctttcaagagtttacagatggcagcttcacacagcctctctatcggggcgagcttaacgaacatttgggactccttggtccctatatccgagccgaagtggaggacaacattatggttacctttaggaatcaagcctctcgcccctacagcttctactcctccctcatcagttatgaggaggatcagagacaaggcgctgaaccacggaagaactttgtgaaaccgaatgagacgaagacctacttctggaaagtacagcaccacatggcccccacaaaagacgaattcgattgcaaagcatgggcgtatttttcagacgttgacttggagaaagatgtacattcaggacttattggtcctttgttggtgtgtcacactaacactctcaatccagcccatggcaggcaggtgacagtccaggaattcgctcttttctttaccatctttgatgagaccaagtcctggtacttcacggaaaacatggagcgcaattgcagagccccctgtaacatacagatggaggaccctacctttaaggaaaattatcggttccacgcaatcaacggatacattatggatacactccctggccttgtgatggctcaggaccaacgaatcaggtggtacctcctcagcatgggttctaatgagaacatacactccattcacttttcaggacatgtgttcactgtccggaagaaagaagagtataagatggccctctacaatttgtatccaggcgtgtttgagaccgttgaaatgcttccctctaaagctggcatctggagagtagagtgcttgatcggagaacatcttcacgcaggtatgagcaccttgttcctcgtgtacagcaacaaatgtcagaatccacttggcatggccagtggacacattcgcgactttcagatcacagcatctggccagtatggacaatgggccccaaagttggctcgcctccattactccggtagcataaatgcgtggtccactaaagaacctttcagctggattaaggtcgatcttcttgcccccatgatcatccacggcattaagacacagggagcgaggcagaaattctcctccctctacatctcacagttcattattatgtatagtttggacggcaagaagtggcaaacttatagaggtaacagtactggaacagacatggtgttcttcggcaacgttgatagctctggcatcaaacacaacatctttaatcctcccataatagctcggtacatcagattgcatccgacccactacagcattaggagtacactccgaatggagcttatgggttgcgacttgaattcctgttcaatgccactcggaatggagtctaaagccatctctgatgcacagataaccgccagtagctactttacgaacatgtttgctacgtggtcaccctctaaggcaaggcttcatttgcaaggccggtctaatgcctggagacctcaggtgaacaacccgaaagaatggctccaggtggactttcagaagaccatgaaagtaacaggtgtcactactcagggagttaagtccttggatactagcatgtatgtgaaggagttccttatttcctcatcacaagatggccaccagtggaccctcttctttcagaatggtaaggtcaaagtgtttcagggcaatcaagacagcttcacacccgtggtgaacagtcttgatcctccactcttgacacgataccttcgaatccatccacagtcttgggagcaccagattgcattgcgcatggaagtacttggatgcgaggctcaggacctctac

SEQ ID NO: 1750 - protein, 1457 aa, synthetic construct
  REGION 1..1457: note = Variant of human B-domain deleted Factor VIII
MQIELSTCFFLCLLRFCFSATRRYYLGAVELSWDYMQSDLGELPVDARFPPRVPKSFPFNTSQVYKKTLFVEFTDHLFNIAKPRPPWMGLLGPTIQAEVYDTVVITLKNMASHPVSLHAVGVSYWKASEGAEYDDQTSQREKEDDKVFPGGSHTYVWQVLKENGPMASDPPCLTYSYQSHVDLVKDLNSGLIGALLVCREGSLAKEKTQTLAKFILLFAVFDEGKSWHSETKNSLMQDRDAASARAWPKMHTVNGYVNRTLPGLIGCHRKSVYWHVIGMGTTPEVHSIFLEGHTFLVRNHRQASLGISPITFLTAQTLLRDLGQFLLFCHIPSHQHDGMEAYVKVDSCPEEPQLRMKNNEEAEDYDDDLTDSEMDVVRFDDDNSPSIIQARSGAKKHPKTWVHYIAAEEEDWDYAPLVLAPDDRSYKSQYLNNGPQRIGRKYKKVRFMAYTDETFKTREAIQHESGILGPLLYGEVGDTLLIIFKNQASRPYNIYPHGITDVRPLYSRRLPKGVKHLKDFPILPGEIFKYKWTITVEDGPTKSDPRCLTRYYSSFVNWERDLASGLIGPLLICYKESVDQRGNQIMSDKRNVILFSVFDENRSWYLTENIQRFLPNPAGVQLEDPEFQASNIMHSINGYVFDSLQLSVCLHEVAYWYILSIGAQTDFLSVFFSGYTFKHKGVYEDTLTLFPFSGETVFMSMENPGLWILGCHNSDFRNRGMTALLKVSSCDWNTGDYYEDSYEDISAYFDSKNNAIEPRSFSQNPPVLKRHQREGTRTTLQSDQEEIDYDDTISVEMKKEDFDIYDEDENQSPRSFQKKTRHYFIAAVERLWDYGMSSSPHVLRNRAQSGSVPQFKKVVFQEFTDGSFTQPLYRGELNEHLGLLGPYIRAEVEDNIMVTFRNQASRPYSFYSSLISYEEDQRQGAEPRKNFVKPNETKTYFWKVQHHMAPTKDEFDCKAWAYFSDVDLEKDVHSGLIGPLLVCHTNTLNPAHGRQVTVQEFALFFTIFDETKSWYFTENMERNCRAPCNIQMEDPTFKENYRFHAINGYIMDTLPGLVMAQDQRIRWYLLSMGSNENIHSIHFSGHVFTVRKKEEYKMALYNLYPGVFETVEMLPSKAGIWRVECLIGEHLHAGMSTLFLVYSNKCQNPLGMASGHIRDFQITASGQYGQWAPKLARLHYSGSINAWSTKEPFSWIKVDLLAPMIIHGIKTQGARQKFSSLYISQFIIMYSLDGKKWQTYRGNSTGTDMVFFGNVDSSGIKHNIFNPPIIARYIRLHPTHYSIRSTLRMELMGCDLNSCSMPLGMESKAISDAQITASSYFTNMFATWSPSKARLHLQGRSNAWRPQVNNPKEWLQVDFQKTMKVTGVTTQGVKSLDTSMYVKEFLISSSQDGHQWTLFFQNGKVKVFQGNQDSFTPVVNSLDPPLLTRYLRIHPQSWEHQIALRMEVLGCEAQDLY

SEQ ID NO: 1751 - DNA, 4371 bp, synthetic construct
  misc_feature 1..4371: note = Variant of human B-domain deleted Factor VIII
  source 1..4371: mol_type = other DNA
atgcagattgaactgtctacctgcttcttcctctgtttgctgaggttctgctttagcgccactagacggtactaccttggcgctgtggagctgtcctgggactatatgcagagtgatttgggagagcttcccgtcgacgcacgatttcctcctcgcgttccaaagtcatttccctttaacacaagccaggtgtacaagaagacgctcttcgtcgaattcaccgatcacctgttcaatatcgccaaacccagaccaccatggatgggtcttttggggcctaccatacaagcggaggtgtatgacacagttgttatcactctcaagaacatggcttctcatccggtaagtcttcacgcagtgggcgtgtcctactggaaagcttcagaaggagccgagtatgatgatcagacatcccagagggagaaagaagacgacaaggtatttccaggtgggtctcatacctatgtgtggcaagtgctcaaagagaatggccctatggcaagcgatccgccgtgtttgacttacagctacctttcacacgttgacctcgtcaaggacctcaactccgggttgattggagccttgttggtatgcagggaaggatctcttgccaaagagaagacacagaccctggccaagtttatccttctctttgctgtgttcgatgagggcaaaagttggcatagcgaaacgaagaattccctcatgcaggatcgcgacgcagccagcgccagagcttggcccaagatgcacactgtgaacggatatgtcaataggacgcttcctggcttgattgggtgtcatcggaaaagtgtctactggcacgtgatcggaatggggacaacaccagaggtccactccatatttctcgaaggccataccttccttgttcgaaaccacagacaggcatccttggggatctctcccattacctttctcactgcccaaacgctccttcgtgacttgggtcagttccttctcttttgccatatcccgtcacaccagcatgatggtatggaagcttatgtgaaagtcgacagttgtcctgaggagccacagttgcgcatgaagaataatgaagaagccgaggattacgacgacgatctcaccgattctgagatggacgtggtgaggtttgatgacgacaactctccctccatcattcaagctcggagcggggcgaagaaacaccccaagacttgggtccactatatagcggcggaagaggaggattgggattacgctcctcttgtattggcaccagatgaccgctcatacaaaagccagtacctcaacaacggaccgcagagaattggccggaagtataagaaagtgcgatttatggcctatacagacgaaacctttaagacaagggaggccatccagcatgagagtgggattttgggacctcttctttacggcgaagttggtgataccctcctcatcatcttcaagaatcaagcttctcgcccctataacatttacccacacgggatcactgacgttaggcctttgtatagcagaagacttcccaaaggcgtgaagcatctcaaagacttccccattttgccaggcgagatctttaagtacaaatggaccattacagtggaagatggaccgactaaatcagaccctcgatgccttacgcggtactattcctccttcgtgaattgggagagagatttggcaagcggactcataggaccactcctcatctgttacaaggaatctgtagaccagaggggtaaccagattatgagtgataaacgcaatgtgatcctttttagcgtcttcgacgagaaccggtcctggtacttgaccgagaatatacaaaggttccttcccaaccccgcaggcgttcagttggaagaccctgagtttcaggccagcaatattatgcactcaatcaacggctatgtgtttgatagtctccagctttctgtttgcctccatgaagtagcctattggtacatcttgtcaattggtgctcaaacagacttcctctccgtcttcttctccggctacacctttaagcacaagggcgtgtatgaggacactctcacactctttccattttctggagaaaccgtgttcatgagcatggagaatccaggcctttggatcttgggttgccacaacagtgattttcgcaatcggggaatgactgctctcctcaaagtcagcagctgtgattggaacacaggcgactattacgaagattcttacgaggacataagtgcctactttgactccaagaataacgccattgagcccagatcattctcccagaatcctcccgtgcttaaaaggcatcagcgcgaaggtaccagaactactcttcagtctgatcaagaggagattgactatgacgacaccattagcgtggaaatgaagaaggaggatttcgatatctatgacgaagatgagaaccagtctccgcggagctttcagaagaagacgcgacactacttcattgcagcagtcgaaaggctttgggactacggtatgtcatcatcccctcatgtgttgcgcaatagagctcagagtggaagtgttccacagttcaagaaagtcgtctttcaagagtttacagatggcagcttcacacagcctctctatcggggcgagcttaacgaacatttgggactccttggtccctatatccgagccgaagtggaggacaacattatggttacctttaggaatcaagcctctcgcccctacagcttctactcctccctcatcagttatgaggaggatcagagacaaggcgctgaaccacggaagaactttgtgaaaccgaatgagacgaagacctacttctggaaagtacagcaccacatggcccccacaaaagacgaattcgattgcaaagcatgggcgtatttttcagacgttgacttggagaaagatgtacattcaggacttattggtcctttgttggtgtgtcacactaacactctcaatccagcccatggcaggcaggtgacagtccaggaattcgctcttttctttaccatctttgatgagaccaagtcctggtacttcacggaaaacatggagcgcaattgcagagccccctgtaacatacagatggaggaccctacctttaaggaaaattatcggttccacgcaatcaacggatacattatggatacactccctggccttgtgatggctcaggaccaacgaatcaggtggtacctcctcagcatgggttctaatgagaacatacactccattcacttttcaggacatgtgttcactgtccggaagaaagaagagtataagatggccctctacaatttgtatccaggcgtgtttgagaccgttgaaatgcttcccgcgaaagctggcatctggagagtagagtgcttgatcggagaacatcttcacgcaggtatgagcaccttgttcctcgtgtacagcaacaaatgtcagaatccacttggcatggccagtggacacattcgcgactttcagatcacagcatctggccagtatggacaatgggccccaaagttggctcgcctccattactccggtagcataaatgcgtggtccactaaagaacctttcagctggattaaggtcgatcttcttgcccccatgatcatccacggcattaagacacagggagcgaggcagaaattctcctccctctacatctcacagttcattattatgtatagtttggacggcaagaagtggcaaacttatagaggtaacagtactggaacagacatggtgttcttcggcaacgttgatagctctggcatcaaacacaacatctttaatcctcccataatagctcggtacatcagattgcatccgacccactacagcattaggagtacactccgaatggagcttatgggttgcgacttgaattcctgttcaatgccactcggaatggagtctaaagccatctctgatgcacagataaccgccagtagctactttacgaacatgtttgctacgtggtcaccctctaaggcaaggcttcatttgcaaggccggtctaatgcctggagacctcaggtgaacaacccgaaagaatggctccaggtggactttcagaagaccatgaaagtaacaggtgtcactactcagggagttaagtccttggatactagcatgtatgtgaaggagttccttatttcctcatcacaagatggccaccagtggaccctcttctttcagaatggtaaggtcaaagtgtttcagggcaatcaagacagcttcacacccgtggtgaacagtcttgatcctccactcttgacacgataccttcgaatccatccacagtcttgggagcaccagattgcattgcgcatggaagtacttggatgcgaggctcaggacctctac

SEQ ID NO: 1752 - protein, 1457 aa, synthetic construct
  REGION 1..1457: note = Variant of human B-domain deleted Factor VIII
MQIELSTCFFLCLLRFCFSATRRYYLGAVELSWDYMQSDLGELPVDARFPPRVPKSFPFNTSQVYKKTLFVEFTDHLFNIAKPRPPWMGLLGPTIQAEVYDTVVITLKNMASHPVSLHAVGVSYWKASEGAEYDDQTSQREKEDDKVFPGGSHTYVWQVLKENGPMASDPPCLTYSYLSHVDLVKDLNSGLIGALLVCREGSLAKEKTQTLAKFILLFAVFDEGKSWHSETKNSLMQDRDAASARAWPKMHTVNGYVNRTLPGLIGCHRKSVYWHVIGMGTTPEVHSIFLEGHTFLVRNHRQASLGISPITFLTAQTLLRDLGQFLLFCHIPSHQHDGMEAYVKVDSCPEEPQLRMKNNEEAEDYDDDLTDSEMDVVRFDDDNSPSIIQARSGAKKHPKTWVHYIAAEEEDWDYAPLVLAPDDRSYKSQYLNNGPQRIGRKYKKVRFMAYTDETFKTREAIQHESGILGPLLYGEVGDTLLIIFKNQASRPYNIYPHGITDVRPLYSRRLPKGVKHLKDFPILPGEIFKYKWTITVEDGPTKSDPRCLTRYYSSFVNWERDLASGLIGPLLICYKESVDQRGNQIMSDKRNVILFSVFDENRSWYLTENIQRFLPNPAGVQLEDPEFQASNIMHSINGYVFDSLQLSVCLHEVAYWYILSIGAQTDFLSVFFSGYTFKHKGVYEDTLTLFPFSGETVFMSMENPGLWILGCHNSDFRNRGMTALLKVSSCDWNTGDYYEDSYEDISAYFDSKNNAIEPRSFSQNPPVLKRHQREGTRTTLQSDQEEIDYDDTISVEMKKEDFDIYDEDENQSPRSFQKKTRHYFIAAVERLWDYGMSSSPHVLRNRAQSGSVPQFKKVVFQEFTDGSFTQPLYRGELNEHLGLLGPYIRAEVEDNIMVTFRNQASRPYSFYSSLISYEEDQRQGAEPRKNFVKPNETKTYFWKVQHHMAPTKDEFDCKAWAYFSDVDLEKDVHSGLIGPLLVCHTNTLNPAHGRQVTVQEFALFFTIFDETKSWYFTENMERNCRAPCNIQMEDPTFKENYRFHAINGYIMDTLPGLVMAQDQRIRWYLLSMGSNENIHSIHFSGHVFTVRKKEEYKMALYNLYPGVFETVEMLPAKAGIWRVECLIGEHLHAGMSTLFLVYSNKCQNPLGMASGHIRDFQITASGQYGQWAPKLARLHYSGSINAWSTKEPFSWIKVDLLAPMIIHGIKTQGARQKFSSLYISQFIIMYSLDGKKWQTYRGNSTGTDMVFFGNVDSSGIKHNIFNPPIIARYIRLHPTHYSIRSTLRMELMGCDLNSCSMPLGMESKAISDAQITASSYFTNMFATWSPSKARLHLQGRSNAWRPQVNNPKEWLQVDFQKTMKVTGVTTQGVKSLDTSMYVKEFLISSSQDGHQWTLFFQNGKVKVFQGNQDSFTPVVNSLDPPLLTRYLRIHPQSWEHQIALRMEVLGCEAQDLY

SEQ ID NO: 1753 - DNA, 4371 bp, synthetic construct
  misc_feature 1..4371: note = Variant of human B-domain deleted Factor VIII
  source 1..4371: mol_type = other DNA
atgcagattgaactgtctacctgcttcttcctctgtttgctgaggttctgctttagcgccactagacggtactaccttggcgctgtggagctgtcctgggactatatgcagagtgatttgggagagcttcccgtcgacgcacgatttcctcctcgcgttccaaagtcatttccctttaacacaagccaggtgtacaagaagacgctcttcgtcgaattcaccgatcacctgttcaatatcgccaaacccagaccaccatggatgggtcttttggggcctaccatacaagcggaggtgtatgacacagttgttatcactctcaagaacatggcttctcatccggtaagtcttcacgcagtgggcgtgtcctactggaaagcttcagaaggagccgagtatgatgatcagacatcccagagggagaaagaagacgacaaggtatttccaggtgggtctcatacctatgtgtggcaagtgctcaaagagaatggccctatggcaagcgatccgccgtgtttgacttacagctacctttcacacgttgacctcgtcaaggacctcaactccgggttgattggagccttgttggtatgcagggaaggatctcttgccaaagagaagacacagaccctggccaagtttatccttctctttgctgtgttcgatgagggcaaaagttggcatagcgaaacgaagaattccctcatgcaggatcgcgacgcagccagcgccagagcttggcccaagatgcacactgtgaacggatatgtcaataggacgcttcctggcttgattgggtgtcatcggaaaagtgtctactggcacgtgatcggaatggggacaacaccagaggtccactccatatttctcgaaggccataccttccttgttcgaaaccacagacaggcatccttggggatctctcccattacctttctcactgcccaaacgctccttcgtgacttgggtcagttccttctcttttgccatatcccgtcacaccagcatgatggtatggaagcttatgtgaaagtcgacagttgtcctgaggagccacagttgcgcatgaagaataatgaagaagccgaggattacgacgacgatctcaccgattctgagatggacgtggtgaggtttgatgacgacaactctccctccatcattcaagctcggagcggggcgaagaaacaccccaagacttgggtccactatatagcggcggaagaggaggattgggattacgctcctcttgtattggcaccagatgaccgctcatacaaaagccagtacctcaacaacggaccgcagagaattggccggaagtataagaaagtgcgatttatggcctatacagacgaaacctttaagacaagggaggccatccagcatgagagtgggattttgggacctcttctttacggcgaagttggtgataccctcctcatcatcttcaagaatcaagcttctcgcccctataacatttacccacacgggatcactgacgttaggcctttgtatagcagaagacttcccaaaggcgtgaagcatctcaaagacttccccattttgccaggcgagatctttaagtacaaatggaccattacagtggaagatggaccgactaaatcagaccctcgatgccttacgcggtactattcctccttcgtgaattgggagagagatttggcaagcggactcataggaccactcctcatctgttacaaggaatctgtagaccagaggggtaaccagattatgagtgataaacgcaatgtgatcctttttagcgtcttcgacgagaaccggtcctggtacttgaccgagaatatacaaaggttccttcccaaccccgcaggcgttcagttggaagaccctgagtttcaggccagcaatattatgcactcaatcaacggctatgtgtttgatagtctccagctttctgtttgcctccatgaagtagcctattggtacatcttgtcaattggtgctcaaacagacttcctctccgtcttcttctccggctacacctttaagcacaagggcgtgtatgaggacactctcacactctttccattttctggagaaaccgtgttcatgagcatggagaatccaggcctttggatcttgggttgccacaacagtgattttcgcaatcggggaatgactgctctcctcaaagtcagcagctgtgattggaacacaggcgactattacgaagattcttacgaggacataagtgcctactttgactccgggaataacgccattgagcccagatcattctcccagaatcctcccgtgcttaaaaggcatcagcgcgaaggtaccagaactactcttcagtctgatcaagaggagattgactatgacgacaccattagcgtggaaatgaagaaggaggatttcgatatctatgacgaagatgagaaccagtctccgcggagctttcagaagaagacgcgacactacttcattgcagcagtcgaaaggctttgggactacggtatgtcatcatcccctcatgtgttgcgcaatagagctcagagtggaagtgttccacagttcaagaaagtcgtctttcaagagtttacagatggcagcttcacacagcctctctatcggggcgagcttaacgaacatttgggactccttggtccctatatccgagccgaagtggaggacaacattatggttacctttaggaatcaagcctctcgcccctacagcttctactcctccctcatcagttatgaggaggatcagagacaaggcgctgaaccacggaagaactttgtgaaaccgaatgagacgaagacctacttctggaaagtacagcaccacatggcccccacaaaagacgaattcgattgcaaagcatgggcgtatttttcagacgttgacttggagaaagatgtacattcaggacttattggtcctttgttggtgtgtcacactaacactctcaatccagcccatggcaggcaggtgacagtccaggaattcgctcttttctttaccatctttgatgagaccaagtcctggtacttcacggaaaacatggagcgcaattgcagagccccctgtaacatacagatggaggaccctacctttaaggaaaattatcggttccacgcaatcaacggatacattatggatacactccctggccttgtgatggctcaggaccaacgaatcaggtggtacctcctcagcatgggttctaatgagaacatacactccattcacttttcaggacatgtgttcactgtccggaagaaagaagagtataagatggccctctacaatttgtatccaggcgtgtttgagaccgttgaaatgcttccctctaaagctggcatctggagagtagagtgcttgatcggagaacatcttcacgcaggtatgagcaccttgttcctcgtgtacagcaacaaatgtcagaatccacttggcatggccagtggacacattcgcgactttcagatcacagcatctggccagtatggacaatgggccccaaagttggctcgcctccattactccggtagcataaatgcgtggtccactaaagaacctttcagctggattaaggtcgatcttcttgcccccatgatcatccacggcattaagacacagggagcgaggcagaaattctcctccctctacatctcacagttcattattatgtatagtttggacggcaagaagtggcaaacttatagaggtaacagtactggaacagacatggtgttcttcggcaacgttgatagctctggcatcaaacacaacatctttaatcctcccataatagctcggtacatcagattgcatccgacccactacagcattaggagtacactccgaatggagcttatgggttgcgacttgaattcctgttcaatgccactcggaatggagtctaaagccatctctgatgcacagataaccgccagtagctactttacgaacatgtttgctacgtggtcaccctctaaggcaaggcttcatttgcaaggccggtctaatgcctggagacctcaggtgaacaacccgaaagaatggctccaggtggactttcagaagaccatgaaagtaacaggtgtcactactcagggagttaagtccttggatactagcatgtatgtgaaggagttccttatttcctcatcacaagatggccaccagtggaccctcttctttcagaatggtaaggtcaaagtgtttcagggcaatcaagacagcttcacacccgtggtgaacagtcttgatcctccactcttgacacgataccttcgaatccatccacagtcttgggagcaccagattgcattgcgcatggaagtacttggatgcgaggctcaggacctctac

SEQ ID NO: 1754 - protein, 1457 aa, synthetic construct
  REGION 1..1457: note = Variant of human B-domain deleted Factor VIII
MQIELSTCFFLCLLRFCFSATRRYYLGAVELSWDYMQSDLGELPVDARFPPRVPKSFPFNTSQVYKKTLFVEFTDHLFNIAKPRPPWMGLLGPTIQAEVYDTVVITLKNMASHPVSLHAVGVSYWKASEGAEYDDQTSQREKEDDKVFPGGSHTYVWQVLKENGPMASDPPCLTYSYLSHVDLVKDLNSGLIGALLVCREGSLAKEKTQTLAKFILLFAVFDEGKSWHSETKNSLMQDRDAASARAWPKMHTVNGYVNRTLPGLIGCHRKSVYWHVIGMGTTPEVHSIFLEGHTFLVRNHRQASLGISPITFLTAQTLLRDLGQFLLFCHIPSHQHDGMEAYVKVDSCPEEPQLRMKNNEEAEDYDDDLTDSEMDVVRFDDDNSPSIIQARSGAKKHPKTWVHYIAAEEEDWDYAPLVLAPDDRSYKSQYLNNGPQRIGRKYKKVRFMAYTDETFKTREAIQHESGILGPLLYGEVGDTLLIIFKNQASRPYNIYPHGITDVRPLYSRRLPKGVKHLKDFPILPGEIFKYKWTITVEDGPTKSDPRCLTRYYSSFVNWERDLASGLIGPLLICYKESVDQRGNQIMSDKRNVILFSVFDENRSWYLTENIQRFLPNPAGVQLEDPEFQASNIMHSINGYVFDSLQLSVCLHEVAYWYILSIGAQTDFLSVFFSGYTFKHKGVYEDTLTLFPFSGETVFMSMENPGLWILGCHNSDFRNRGMTALLKVSSCDWNTGDYYEDSYEDISAYFDSGNNAIEPRSFSQNPPVLKRHQREGTRTTLQSDQEEIDYDDTISVEMKKEDFDIYDEDENQSPRSFQKKTRHYFIAAVERLWDYGMSSSPHVLRNRAQSGSVPQFKKVVFQEFTDGSFTQPLYRGELNEHLGLLGPYIRAEVEDNIMVTFRNQASRPYSFYSSLISYEEDQRQGAEPRKNFVKPNETKTYFWKVQHHMAPTKDEFDCKAWAYFSDVDLEKDVHSGLIGPLLVCHTNTLNPAHGRQVTVQEFALFFTIFDETKSWYFTENMERNCRAPCNIQMEDPTFKENYRFHAINGYIMDTLPGLVMAQDQRIRWYLLSMGSNENIHSIHFSGHVFTVRKKEEYKMALYNLYPGVFETVEMLPSKAGIWRVECLIGEHLHAGMSTLFLVYSNKCQNPLGMASGHIRDFQITASGQYGQWAPKLARLHYSGSINAWSTKEPFSWIKVDLLAPMIIHGIKTQGARQKFSSLYISQFIIMYSLDGKKWQTYRGNSTGTDMVFFGNVDSSGIKHNIFNPPIIARYIRLHPTHYSIRSTLRMELMGCDLNSCSMPLGMESKAISDAQITASSYFTNMFATWSPSKARLHLQGRSNAWRPQVNNPKEWLQVDFQKTMKVTGVTTQGVKSLDTSMYVKEFLISSSQDGHQWTLFFQNGKVKVFQGNQDSFTPVVNSLDPPLLTRYLRIHPQSWEHQIALRMEVLGCEAQDLY

SEQ ID NO: 1755 - DNA, 4371 bp, synthetic construct
  misc_feature 1..4371: note = Variant of human B-domain deleted Factor VIII
  source 1..4371: mol_type = other DNA
atgcagattgaactgtctacctgcttcttcctctgtttgctgaggttctgctttagcgccactagacggtactaccttggcgctgtggagctgtcctgggactatatgcagagtgatttgggagagcttcccgtcgacgcacgatttcctcctcgcgttccaaagtcatttccctttaacacaagccaggtgtacaagaagacgctcttcgtcgaattcaccgatcacctgttcaatatcgccaaacccagaccaccatggatgggtcttttggggcctaccatacaagcggaggtgtatgacacagttgttatcactctcaagaacatggcttctcatccggtaagtcttcacgcagtgggcgtgtcctactggaaagcttcagaaggagccgagtatgatgatcagacatcccagagggagaaagaagacgacaaggtatttccaggtgggtctcatacctatgtgtggcaagtgctcaaagagaatggccctatggcaagcgatccgccgtgtttgacttacagctacctttcacacgttgacctcgtcaaggacctcaactccgggttgattggagccttgttggtatgcagggaaggatctcttgccaaagagaagacacagaccctggccaagtttatccttctctttgctgtgttcgatgagggcaaaagttggcatagcgaaacgaagaattccctcatgcaggatcgcgacgcagccagcgccagagcttggcccaagatgcacactgtgaacggatatgtcaataggacgcttcctggcttgattgggtgtcatcggaaaagtgtctactggcacgtgatcggaatggggacaacaccagaggtccactccatatttctcgaaggccataccttccttgttcgaaaccacagacaggcatccttggggatctctcccattacctttctcactgcccaaacgctccttcgtgacttgggtcagttccttctcttttgccatatcccgtcacaccagcatgatggtatggaagcttatgtgaaagtcgacagttgtcctgaggagccacagttgcgcatgaagaataatgaagaagccgaggattacgacgacgatctcaccgattctgagatggacgtggtgaggtttgatgacgacaactctccctccatcattcaagctcggagcggggcgaagaaacaccccaagacttgggtccactatatagcggcggaagaggaggattgggattacgctcctcttgtattggcaccagatgaccgctcatacaaaagccagtacctcaacaacggaccgcagagaattggccggaagtataagaaagtgcgatttatggcctatacagacgaaacctttaagacaagggaggccatccagcatgagagtgggattttgggacctcttctttacggcgaagttggtgataccctcctcatcatcttcaagaatcaagcttctcgcccctataacatttacccacacgggatcactgacgttaggcctttgtatagcagaagacttcccaaaggcgtgaagcatctcaaagacttccccattttgccaggcgagatctttaagtacaaatggaccattacagtggaagatggaccgactaaatcagaccctcgatgccttacgcggtactattcctccttcgtgaattgggagagagatttggcaagcggactcataggaccactcctcatctgttacaaggaatctgtagaccagaggggtaaccagattatgagtgataaacgcaatgtgatcctttttagcgtcttcgacgagaaccggtcctggtacttgaccgagaatatacaaaggttccttcccaaccccgcaggcgttcagttggaagaccctgagtttcaggccagcaatattatgcactcaatcaacggctatgtgtttgatagtctccagctttctgtttgcctccatgaagtagcctattggtacatcttgtcaattggtgctcaaacagacttcctctccgtcttcttctccggctacacctttaagcacaagggcgtgtatgaggacactctcacactctttccattttctggagaaaccgtgttcatgagcatggagaatccaggcctttggatcttgggttgccacaacagtgattttcgcaatcggggaatgactgctctcctcaaagtcagcagctgtgattggaacacaggcgactattacgaagattcttacgaggacataagtgcctactttgactccaagaataacgccattgagcccagatcattctcccagaatcctcccgtgcttaaaaggcatcagcgcgaaggtaccagaactactcttcagtctgatcaagaggagattgactatgacgacaccattagcgtggaaatgaagaaggaggatttcgatatctatgacgaagatgagaaccagtctccgcggagctttcagaagaagacgcgacactacttcattgcagcagtcgaaaggctttgggactacggtatgtcatcatcccctcatgtgttgcgcaatagagctcagagtggaagtgttccacagttcaagaaagtcgtctttcaagagtttacagatggcagcttcacacagcctctctatcggggcgagcttaacgaacatttgggactccttggtccctatatccgagccgaagtggaggacaacattatggttacctttaggaatcaagcctctcgcccctacagcttctactcctccctcatcagttatgaggaggatcagagacaaggcgctgaaccacggaagaactttgtgaaaccgaatgagacgaagacctacttctggaaagtacagcaccacatggcccccacaaaagacgaattcgattgcaaagcatgggcgtatttttcagacgttgacttggagaaagatgtacattcaggacttattggtcctttgttggtgtgtcacactaacactctcaatccagcccatggcaggcaggtgacagtccaggaattcgctcttttctttaccatctttgatgagaccaagtcctggtacttcacggaaaacatggagcgcaattgcagagccccctgtaacatacagatggaggaccctacctttaaggaaaattatcggttccacgcaatcaacggatacattatggatacactccctggccttgtgatggctcaggaccaacgaatcaggtggtacctcctcagcatgggttctaatgagaacatacactccattcacttttcaggacatgtgttcactgtccggaagaaagaagagtataagatggccctctacaatttgtatccaggcgtgtgggagaccgttgaaatgcttccctctaaagctggcatctggagagtagagtgcttgatcggagaacatcttcacgcaggtatgagcaccttgttcctcgtgtacagcaacaaatgtcagaatccacttggcatggccagtggacacattcgcgactttcagatcacagcatctggccagtatggacaatgggccccaaagttggctcgcctccattactccggtagcataaatgcgtggtccactaaagaacctttcagctggattaaggtcgatcttcttgcccccatgatcatccacggcattaagacacagggagcgaggcagaaattctcctccctctacatctcacagttcattattatgtatagtttggacggcaagaagtggcaaacttatagaggtaacagtactggaacagacatggtgttcttcggcaacgttgatagctctggcatcaaacacaacatctttaatcctcccataatagctcggtacatcagattgcatccgacccactacagcattaggagtacactccgaatggagcttatgggttgcgacttgaattcctgttcaatgccactcggaatggagtctaaagccatctctgatgcacagataaccgccagtagctactttacgaacatgtttgctacgtggtcaccctctaaggcaaggcttcatttgcaaggccggtctaatgcctggagacctcaggtgaacaacccgaaagaatggctccaggtggactttcagaagaccatgaaagtaacaggtgtcactactcagggagttaagtccttggatactagcatgtatgtgaaggagttccttatttcctcatcacaagatggccaccagtggaccctcttctttcagaatggtaaggtcaaagtgtttcagggcaatcaagacagcttcacacccgtggtgaacagtcttgatcctccactcttgacacgataccttcgaatccatccacagtcttgggagcaccagattgcattgcgcatggaagtacttggatgcgaggctcaggacctctac

SEQ ID NO: 1756 - protein, 1457 aa, synthetic construct
  REGION 1..1457: note = Variant of human B-domain deleted Factor VIII
MQIELSTCFFLCLLRFCFSATRRYYLGAVELSWDYMQSDLGELPVDARFPPRVPKSFPFNTSQVYKKTLFVEFTDHLFNIAKPRPPWMGLLGPTIQAEVYDTVVITLKNMASHPVSLHAVGVSYWKASEGAEYDDQTSQREKEDDKVFPGGSHTYVWQVLKENGPMASDPPCLTYSYLSHVDLVKDLNSGLIGALLVCREGSLAKEKTQTLAKFILLFAVFDEGKSWHSETKNSLMQDRDAASARAWPKMHTVNGYVNRTLPGLIGCHRKSVYWHVIGMGTTPEVHSIFLEGHTFLVRNHRQASLGISPITFLTAQTLLRDLGQFLLFCHIPSHQHDGMEAYVKVDSCPEEPQLRMKNNEEAEDYDDDLTDSEMDVVRFDDDNSPSIIQARSGAKKHPKTWVHYIAAEEEDWDYAPLVLAPDDRSYKSQYLNNGPQRIGRKYKKVRFMAYTDETFKTREAIQHESGILGPLLYGEVGDTLLIIFKNQASRPYNIYPHGITDVRPLYSRRLPKGVKHLKDFPILPGEIFKYKWTITVEDGPTKSDPRCLTRYYSSFVNWERDLASGLIGPLLICYKESVDQRGNQIMSDKRNVILFSVFDENRSWYLTENIQRFLPNPAGVQLEDPEFQASNIMHSINGYVFDSLQLSVCLHEVAYWYILSIGAQTDFLSVFFSGYTFKHKGVYEDTLTLFPFSGETVFMSMENPGLWILGCHNSDFRNRGMTALLKVSSCDWNTGDYYEDSYEDISAYFDSKNNAIEPRSFSQNPPVLKRHQREGTRTTLQSDQEEIDYDDTISVEMKKEDFDIYDEDENQSPRSFQKKTRHYFIAAVERLWDYGMSSSPHVLRNRAQSGSVPQFKKVVFQEFTDGSFTQPLYRGELNEHLGLLGPYIRAEVEDNIMVTFRNQASRPYSFYSSLISYEEDQRQGAEPRKNFVKPNETKTYFWKVQHHMAPTKDEFDCKAWAYFSDVDLEKDVHSGLIGPLLVCHTNTLNPAHGRQVTVQEFALFFTIFDETKSWYFTENMERNCRAPCNIQMEDPTFKENYRFHAINGYIMDTLPGLVMAQDQRIRWYLLSMGSNENIHSIHFSGHVFTVRKKEEYKMALYNLYPGVWETVEMLPSKAGIWRVECLIGEHLHAGMSTLFLVYSNKCQNPLGMASGHIRDFQITASGQYGQWAPKLARLHYSGSINAWSTKEPFSWIKVDLLAPMIIHGIKTQGARQKFSSLYISQFIIMYSLDGKKWQTYRGNSTGTDMVFFGNVDSSGIKHNIFNPPIIARYIRLHPTHYSIRSTLRMELMGCDLNSCSMPLGMESKAISDAQITASSYFTNMFATWSPSKARLHLQGRSNAWRPQVNNPKEWLQVDFQKTMKVTGVTTQGVKSLDTSMYVKEFLISSSQDGHQWTLFFQNGKVKVFQGNQDSFTPVVNSLDPPLLTRYLRIHPQSWEHQIALRMEVLGCEAQDLY

SEQ ID NO: 1757 - DNA, 4371 bp, synthetic construct
  misc_feature 1..4371: note = Variant of human B-domain deleted Factor VIII
  source 1..4371: mol_type = other DNA
atgcagattgaactgtctacctgcttcttcctctgtttgctgaggttctgctttagcgccactagacggtactaccttggcgctgtggagctgtcctgggactatatgcagagtgatttgggagagcttcccgtcgacgcacgatttcctcctcgcgttccaaagtcatttccctttaacacaagccaggtgtacaagaagacgctcttcgtcgaattcaccgatcacctgttcaatatcgccaaacccagaccaccatggatgggtcttttggggcctaccatacaagcggaggtgtatgacacagttgttatcactctcaagaacatggcttctcatccggtaagtcttcacgcagtgggcgtgtcctactggaaagcttcagaaggagccgagtatgatgatcagacatcccagagggagaaagaagacgacaaggtatttccaggtgggtctcatacctatgtgtggcaagtgctcaaagagaatggccctatggcaagcgatccgccgtgtttgacttacagctacctttcacacgttgacctcgtcaaggacctcaactccgggttgattggagccttgttggtatgcagggaaggatctcttgccaaagagaagacacagaccctggccaagtttatccttctctttgctgtgttcgatgagggcaaaagttggcatagcgaaacgaagaattccctcatgcaggatcgcgacgcagccagcgccagagcttggcccaagatgcacactgtgaacggatatgtcaataggacgcttcctggcttgattgggtgtcatcggaaaagtgtctactggcacgtgatcggaatggggacaacaccagaggtccactccatatttctcgaaggccataccttccttgttcgaaaccacagacaggcatccttggggatctctcccattacctttctcactgcccaaacgctccttcgtgacttgggtcagttccttctcttttgccatatcccgtcacaccagcatgatggtatggaagcttatgtgaaagtcgacagttgtcctgaggagccacagttgcgcatgaagaataatgaagaagccgaggattacgacgacgatctcaccgattctgagatggacgtggtgaggtttgatgacgacaactctccctccatcattcaagctcggagcggggcgaagaaacaccccaagacttgggtccactatatagcggcggaagaggaggattgggattacgctcctcttgtattggcaccagatgaccgctcatacaaaagccagtacctcaacaacggaccgcagagaattggccggaagtataagaaagtgcgatttatggcctatacagacgaaacctttaagacaagggaggccatccagcatgagagtgggattttgggacctcttctttacggcgaagttggtgataccctcctcatcatcttcaagaatcaagcttctcgcccctataacatttacccacacgggatcactgacgttaggcctttgtatagcagaagacttcccaaaggcgtgaagcatctcaaagacttccccattttgccaggcgagatctttaagtacaaatggaccattacagtggaagatggaccgactaaatcagaccctcgatgccttacgcggtactattcctccttcgtgaattgggagagagatttggcaagcggactcataggaccactcctcatctgttacaaggaatctgtagaccagaggggtaaccagattatgagtgataaacgcaatgtgatcctttttagcgtcttcgacgagaaccggtcctggtacttgaccgagaatatacaaaggttccttcccaaccccgcaggcgttcagttggaagaccctgagtttcaggccagcaatattatgcactcaatcaacggctatgtgtttgatagtctccagctttctgtttgcctccatgaagtagcctattggtacatcttgtcaattggtgctcaaacagacttcctctccgtcttcttctccggctacacctttaagcacaagggcgtgtatgaggacactctcacactctttccattttctggagaaaccgtgttcatgagcatggagaatccaggcctttggatcttgggttgccacaacagtgattttcgcaatcggggaatgactgctctcctcaaagtcagcagctgtgattggaacacaggcgactatgatgaagattcttacgaggacataagtgcctactttgactccaagaataacgccattgagcccagatcattctcccagaatcctcccgtgcttaaaaggcatcagcgcgaaggtaccagaactactcttcagtctgatcaagaggagattgactatgacgacaccattagcgtggaaatgaagaaggaggatttcgatatctatgacgaagatgagaaccagtctccgcggagctttcagaagaagacgcgacactacttcattgcagcagtcgaaaggctttgggactacggtatgtcatcatcgcctcatgtgttgcgcaatagagctcagagtggaagtgttccacagttcaagaaagtcgtctttcaagagtttacagatggcagcttcacacagcctctctatcggggcgagcttaacgaacatttgggactccttggtccctatatccgagccgaagtggaggacaacattatggttacctttaggaatcaagcctctcgcccctacagcttctactcctccctcatcagttatgaggaggatcagagacaaggcgctgaaccacggaagaactttgtgaaaccgaatgagacgaagacctacttctggaaagtacagcaccacatggcccccacaaaagacgaattcgattgcaaagcatgggcgtatttttcagacgttgacttggagaaagatgtacattcaggacttattggtcctttgttggtgtgtcacactaacactctcaatccagcccatggcaggcaggtgacagtccaggaattcgctcttttctttaccatctttgatgagaccaagtcctggtacttcacggaaaacatggagcgcaattgcagagccccctgtaacatacagatggaggaccctacctttaaggaaaattatcggttccacgcaatcaacggatacattatggatacactccctggccttgtgatggctcaggaccaacgaatcaggtggtacctcctcagcatgggttctaatgagaacatacactccattcacttttcaggacatgtgttcactgtccggaagaaagaagagtataagatggccctctacaatttgtatccaggcgtgtttgagaccgttgaaatgcttccctctaaagctggcatctggagagtagagtgcttgatcggagaacatcttcacgcaggtatgagcaccttgttcctcgtgtacagcaacaaatgtcagaatccacttggcatggccagtggacacattcgcgactttcagatcacagcatctggccagtatggacaatgggccccaaagttggctcgcctccattactccggtagcataaatgcgtggtccactaaagaacctttcagctggattaaggtcgatcttcttgcccccatgatcatccacggcattaagacacagggagcgaggcagaaattctcctccctctacatctcacagttcattattatgtatagtttggacggcaagaagtggcaaacttatagaggtaacagtactggaacagacatggtgttcttcggcaacgttgatagctctggcatcaaacacaacatctttaatcctcccataatagctcggtacatcagattgcatccgacccactacagcattaggagtacactccgaatggagcttatgggttgcgacttgaattcctgttcaatgccactcggaatggagtctaaagccatctctgatgcacagataaccgccagtagctactttacgaacatgtttgctacgtggtcaccctctaaggcaaggcttcatttgcaaggccggtctaatgcctggagacctcaggtgaacaacccgaaagaatggctccaggtggactttcagaagaccatgaaagtaacaggtgtcactactcagggagttaagtccttggatactagcatgtatgtgaaggagttccttatttcctcatcacaagatggccaccagtggaccctcttctttcagaatggtaaggtcaaagtgtttcagggcaatcaagacagcttcacacccgtggtgaacagtcttgatcctccactcttgacacgataccttcgaatccatccacagtcttgggagcaccagattgcattgcgcatggaagtacttggatgcgaggctcaggacctctac

SEQ ID NO: 1758 - protein, 1457 aa, synthetic construct
  REGION 1..1457: note = Variant of human B-domain deleted Factor VIII
MQIELSTCFFLCLLRFCFSATRRYYLGAVELSWDYMQSDLGELPVDARFPPRVPKSFPFNTSQVYKKTLFVEFTDHLFNIAKPRPPWMGLLGPTIQAEVYDTVVITLKNMASHPVSLHAVGVSYWKASEGAEYDDQTSQREKEDDKVFPGGSHTYVWQVLKENGPMASDPPCLTYSYLSHVDLVKDLNSGLIGALLVCREGSLAKEKTQTLAKFILLFAVFDEGKSWHSETKNSLMQDRDAASARAWPKMHTVNGYVNRTLPGLIGCHRKSVYWHVIGMGTTPEVHSIFLEGHTFLVRNHRQASLGISPITFLTAQTLLRDLGQFLLFCHIPSHQHDGMEAYVKVDSCPEEPQLRMKNNEEAEDYDDDLTDSEMDVVRFDDDNSPSIIQARSGAKKHPKTWVHYIAAEEEDWDYAPLVLAPDDRSYKSQYLNNGPQRIGRKYKKVRFMAYTDETFKTREAIQHESGILGPLLYGEVGDTLLIIFKNQASRPYNIYPHGITDVRPLYSRRLPKGVKHLKDFPILPGEIFKYKWTITVEDGPTKSDPRCLTRYYSSFVNWERDLASGLIGPLLICYKESVDQRGNQIMSDKRNVILFSVFDENRSWYLTENIQRFLPNPAGVQLEDPEFQASNIMHSINGYVFDSLQLSVCLHEVAYWYILSIGAQTDFLSVFFSGYTFKHKGVYEDTLTLFPFSGETVFMSMENPGLWILGCHNSDFRNRGMTALLKVSSCDWNTGDYDEDSYEDISAYFDSKNNAIEPRSFSQNPPVLKRHQREGTRTTLQSDQEEIDYDDTISVEMKKEDFDIYDEDENQSPRSFQKKTRHYFIAAVERLWDYGMSSSPHVLRNRAQSGSVPQFKKVVFQEFTDGSFTQPLYRGELNEHLGLLGPYIRAEVEDNIMVTFRNQASRPYSFYSSLISYEEDQRQGAEPRKNFVKPNETKTYFWKVQHHMAPTKDEFDCKAWAYFSDVDLEKDVHSGLIGPLLVCHTNTLNPAHGRQVTVQEFALFFTIFDETKSWYFTENMERNCRAPCNIQMEDPTFKENYRFHAINGYIMDTLPGLVMAQDQRIRWYLLSMGSNENIHSIHFSGHVFTVRKKEEYKMALYNLYPGVFETVEMLPSKAGIWRVECLIGEHLHAGMSTLFLVYSNKCQNPLGMASGHIRDFQITASGQYGQWAPKLARLHYSGSINAWSTKEPFSWIKVDLLAPMIIHGIKTQGARQKFSSLYISQFIIMYSLDGKKWQTYRGNSTGTDMVFFGNVDSSGIKHNIFNPPIIARYIRLHPTHYSIRSTLRMELMGCDLNSCSMPLGMESKAISDAQITASSYFTNMFATWSPSKARLHLQGRSNAWRPQVNNPKEWLQVDFQKTMKVTGVTTQGVKSLDTSMYVKEFLISSSQDGHQWTLFFQNGKVKVFQGNQDSFTPVVNSLDPPLLTRYLRIHPQSWEHQIALRMEVLGCEAQDLY

SEQ ID NO: 1759 - DNA, 4371 bp, synthetic construct
  misc_feature 1..4371: note = Variant of human B-domain deleted Factor VIII
  source 1..4371: mol_type = other DNA
atgcagattgaactgtctacctgcttcttcctctgtttgctgaggttctgctttagcgccactagacggtactaccttggcgctgtggagctgtcctgggactatatgcagagtgatttgggagagcttcccgtcgacgcacgatttcctcctcgcgttccaaagtcatttccctttaacacaagccaggtgtacaagaagacgctcttcgtcgaattcaccgatcacctgttcaatatcgccaaacccagaccaccatggatgggtcttttggggcctaccatacaagcggaggtgtatgacacagttgttatcactctcaagaacatggcttctcatccggtaagtcttcacgcagtgggcgtgtcctactggaaagcttcagaaggagccgagtatgatgatcagacatcccagagggagaaagaagacgacaaggtatttccaggtgggtctcatacctatgtgtggcaagtgctcaaagagaatggccctatggcaagcgatccgccgtgtttgacttacagctacctttcacacgttgacctcgtcaaggacctcaactccgggttgattggagccttgttggtatgcagggaaggatctcttgccaaagagaagacacagaccctggccaagtttatccttctctttgctgtgttcgatgagggcaaaagttggcatagcgaaacgaagaattccctcatgcaggatcgcgacgcagccagcgccagagcttggcccaagatgcacactgtgaacggatatgtcaataggacgcttcctggcttgattgggtgtcatcggaaaagtgtctactggcacgtgatcggaatgggggctacaccagaggtccactccatatttctcgaaggccataccttccttgttcgaaaccacagacaggcatccttggggatctctcccattacctttctcactgcccaaacgctccttcgtgacttgggtcagttccttctcttttgccatatcccgtcacaccagcatgatggtatggaagcttatgtgaaagtcgacagttgtcctgaggagccacagttgcgcatgaagaataatgaagaagccgaggattacgacgacgatctcaccgattctgagatggacgtggtgaggtttgatgacgacaactctccctccatcattcaagctcggagcggggcgaagaaacaccccaagacttgggtccactatatagcggcggaagaggaggattgggattacgctcctcttgtattggcaccagatgaccgctcatacaaaagccagtacctcaacaacggaccgcagagaattggccggaagtataagaaagtgcgatttatggcctatacagacgaaacctttaagacaagggaggccatccagcatgagagtgggattttgggacctcttctttacggcgaagttggtgataccctcctcatcatcttcaagaatcaagcttctcgcccctataacatttacccacacgggatcactgacgttaggcctttgtatagcagaagacttcccaaaggcgtgaagcatctcaaagacttccccattttgccaggcgagatctttaagtacaaatggaccattacagtggaagatggaccgactaaatcagaccctcgatgccttacgcggtactattcctccttcgtgaattgggagagagatttggcaagcggactcataggaccactcctcatctgttacaaggaatctgtagaccagaggggtaaccagattatgagtgataaacgcaatgtgatcctttttagcgtcttcgacgagaaccggtcctggtacttgaccgagaatatacaaaggttccttcccaaccccgcaggcgttcagttggaagaccctgagtttcaggccagcaatattatgcactcaatcaacggctatgtgtttgatagtctccagctttctgtttgcctccatgaagtagcctattggtacatcttgtcaattggtgctcaaacagacttcctctccgtcttcttctccggctacacctttaagcacaagggcgtgtatgaggacactctcacactctttccattttctggagaaaccgtgttcatgagcatggagaatccaggcctttggatcttgggttgccacaacagtgattttcgcaatcggggaatgactgctctcctcaaagtcagcagctgtgattggaacacaggcgactattacgaagattcttacgaggacataagtgcctactttgactccaagaataacgccattgagcccagatcattctcccagaatcctcccgtgcttaaaaggcatcagcgcgaaggtaccagaactactcttcagtctgatcaagaggagattgactatgacgacaccattagcgtggaaatgaagaaggaggatttcgatatctatgacgaagatgagaaccagtctccgcggagctttcagaagaagacgcgacactacttcattgcagcagtcgaaaggctttgggactacggtatgtcatcatcccctcatgtgttgcgcaatagagctcagagtggaagtgttccacagttcaagaaagtcgtctttcaagagtttacagatggcagcttcacacagcctctctatcggggcgagcttaacgaacatttgggactccttggtccctatatccgagccgaagtggaggacaacattatggttacctttaggaatcaagcctctcgcccctacagcttctactcctccctcatcagttatgaggaggatcagagacaaggcgctgaaccacggaagaactttgtgaaaccgaatgagacgaagacctacttctggaaagtacagcaccacatggcccccacaaaagacgaattcgattgcaaagcatgggcgtatttttcagacgttgacttggagaaagatgtacattcaggacttattggtcctttgttggtgtgtcacactaacactctcaatccagcccatggcaggcaggtgacagtccaggaattcgctcttttctttaccatctttgatgagaccaagtcctggtacttcacggaaaacatggagcgcaattgcagagccccctgtaacatacagatggaggaccctacctttaaggaaaattatcggttccacgcaatcaacggatacattatggatacactccctggccttgtgatggctcaggaccaacgaatcaggtggtacctcctcagcatgggttctaatgagaacatacactccattcacttttcaggacatgtgttcactgtccggaagaaagaagagtataagatggccctctacaatttgtatccaggcgtgtttgagaccgttgaaatgcttccctctaaagctggcatctggagagtagagtgcttgatcggagaacatcttcacgcaggtatgagcaccttgttcctcgtgtacagcaacaaatgtcagaatccacttggcatggccagtggacacattcgcgactttcagatcacagcatctggccagtatggacaatgggccccaaagttggctcgcctccattactccggtagcataaatgcgtggtccactaaagaacctttcagctggattaaggtcgatcttcttgcccccatgatcatccacggcattaagacacagggagcgaggcagaaattctcctccctctacatctcacagttcattattatgtatagtttggacggcaagaagtggcaaacttatagaggtaacagtactggaacagacatggtgttcttcggcaacgttgatagctctggcatcaaacacaacatctttaatcctcccataatagctcggtacatcagattgcatccgacccactacagcattaggagtacactccgaatggagcttatgggttgcgacttgaattcctgttcaatgccactcggaatggagtctaaagccatctctgatgcacagataaccgccagtagctactttacgaacatgtttgctacgtggtcaccctctaaggcaaggcttcatttgcaaggccggtctaatgcctggagacctcaggtgaacaacccgaaagaatggctccaggtggactttcagaagaccatgaaagtaacaggtgtcactactcagggagttaagtccttggatactagcatgtatgtgaaggagttccttatttcctcatcacaagatggccaccagtggaccctcttctttcagaatggtaaggtcaaagtgtttcagggcaatcaagacagcttcacacccgtggtgaacagtcttgatcctccactcttgacacgataccttcgaatccatccacagtcttgggagcaccagattgcattgcgcatggaagtacttggatgcgaggctcaggacctctac

SEQ ID NO: 1760 - protein, 1457 aa, synthetic construct
  REGION 1..1457: note = Variant of human B-domain deleted Factor VIII
MQIELSTCFFLCLLRFCFSATRRYYLGAVELSWDYMQSDLGELPVDARFPPRVPKSFPFNTSQVYKKTLFVEFTDHLFNIAKPRPPWMGLLGPTIQAEVYDTVVITLKNMASHPVSLHAVGVSYWKASEGAEYDDQTSQREKEDDKVFPGGSHTYVWQVLKENGPMASDPPCLTYSYLSHVDLVKDLNSGLIGALLVCREGSLAKEKTQTLAKFILLFAVFDEGKSWHSETKNSLMQDRDAASARAWPKMHTVNGYVNRTLPGLIGCHRKSVYWHVIGMGATPEVHSIFLEGHTFLVRNHRQASLGISPITFLTAQTLLRDLGQFLLFCHIPSHQHDGMEAYVKVDSCPEEPQLRMKNNEEAEDYDDDLTDSEMDVVRFDDDNSPSIIQARSGAKKHPKTWVHYIAAEEEDWDYAPLVLAPDDRSYKSQYLNNGPQRIGRKYKKVRFMAYTDETFKTREAIQHESGILGPLLYGEVGDTLLIIFKNQASRPYNIYPHGITDVRPLYSRRLPKGVKHLKDFPILPGEIFKYKWTITVEDGPTKSDPRCLTRYYSSFVNWERDLASGLIGPLLICYKESVDQRGNQIMSDKRNVILFSVFDENRSWYLTENIQRFLPNPAGVQLEDPEFQASNIMHSINGYVFDSLQLSVCLHEVAYWYILSIGAQTDFLSVFFSGYTFKHKGVYEDTLTLFPFSGETVFMSMENPGLWILGCHNSDFRNRGMTALLKVSSCDWNTGDYYEDSYEDISAYFDSKNNAIEPRSFSQNPPVLKRHQREGTRTTLQSDQEEIDYDDTISVEMKKEDFDIYDEDENQSPRSFQKKTRHYFIAAVERLWDYGMSSSPHVLRNRAQSGSVPQFKKVVFQEFTDGSFTQPLYRGELNEHLGLLGPYIRAEVEDNIMVTFRNQASRPYSFYSSLISYEEDQRQGAEPRKNFVKPNETKTYFWKVQHHMAPTKDEFDCKAWAYFSDVDLEKDVHSGLIGPLLVCHTNTLNPAHGRQVTVQEFALFFTIFDETKSWYFTENMERNCRAPCNIQMEDPTFKENYRFHAINGYIMDTLPGLVMAQDQRIRWYLLSMGSNENIHSIHFSGHVFTVRKKEEYKMALYNLYPGVFETVEMLPSKAGIWRVECLIGEHLHAGMSTLFLVYSNKCQNPLGMASGHIRDFQITASGQYGQWAPKLARLHYSGSINAWSTKEPFSWIKVDLLAPMIIHGIKTQGARQKFSSLYISQFIIMYSLDGKKWQTYRGNSTGTDMVFFGNVDSSGIKHNIFNPPIIARYIRLHPTHYSIRSTLRMELMGCDLNSCSMPLGMESKAISDAQITASSYFTNMFATWSPSKARLHLQGRSNAWRPQVNNPKEWLQVDFQKTMKVTGVTTQGVKSLDTSMYVKEFLISSSQDGHQWTLFFQNGKVKVFQGNQDSFTPVVNSLDPPLLTRYLRIHPQSWEHQIALRMEVLGCEAQDLY

SEQ ID NO: 1761 - DNA, 4371 bp, synthetic construct
  misc_feature 1..4371: note = Variant of human B-domain deleted Factor VIII
  source 1..4371: mol_type = other DNA
atgcagattgaactgtctacctgcttcttcctctgtttgctgaggttctgctttagcgccactagacggtactaccttggcgctgtggagctgtcctgggactatatgcagagtgatttgggagagcttcccgtcgacgcacgatttcctcctcgcgttccaaagtcatttccctttaacacaagccaggtgtacaagaagacgctcttcgtcgaattcaccgatcacctgttcaatatcgccaaacccagaccaccatggatgggtcttttggggcctaccatacaagcggaggtgtatgacacagttgttatcactctcaagaacatggcttctcatccggtaagtcttcacgcagtgggcgtgtcctactggaaagcttcagaaggagccgagtatgatgatcagacatcccagagggagaaagaagacgacaaggtatttccaggtgggtctcatacctatgtgtggcaagtgctcaaagagaatggccctatggcaagcgatccgccgtgtttgacttacagctacctttcacacgttgacctcgtcaaggacctcaactccgggttgattggagccttgttggtatgcagggaaggatctcttgccaaagagaagacacagaccctggccaagtttatccttctctttgctgtgttcgatgagggcaaaagttggcatagcgaaacgaagaattccctcatgcaggatcgcgacgcagccagcgccagagcttggcccaagatgcacactgtgaacggatatgtcaataggacgcttcctggcttgattgggtgtcatcggaaaagtgtctactggcacgtgatcggaatggggacaacaccagaggtccactccatatttctcgaaggccataccttccttgttcgaaaccacagacaggcatccttggggatctctcccattacctttctcactgcccaaacgctccttcgtgacttgggtcagttccttctcttttgccatatcccgtcacaccagcatgatggtatggaagcttatgtgaaagtcgacagttgtcctgaggagccacagttgcgcatgaagaataatgaagaagccgaggattacgacgacgatctcaccgattctgagatggacgtggtgaggtttgatgacgacaactctccctccatcattcaagctcggagcggggcgaagaaacaccccaagacttgggtccactatatagcggcggaagaggaggattgggattacgctcctcttgtattggcaccagatgaccgctcatacaaaagccagtacctcaacaacggaccgcagagaattggccggaagtataagaaagtgcgatttatggcctatacagacgaaacctttaagacaagggaggccatccagcatgagagtgggattttgggacctcttctttacggcgaagttggtgataccctcctcatcatcttcaagaatcaagcttctcgcccctataacatttacccacacgggatcactgacgttaggcctttgtatagcagaagacttcccaaaggcgtgaagcatctcaaagacttccccattttgccaggcgagatctttaagtacaaatggaccattacagtggaagatggaccgactaaatcagaccctcgatgccttacgcggtactattcctccttcgtgaattgggagagagatttggcaagcggactcataggaccactcctcatctgttacaaggaatctgtagaccagaggggtaaccagattatgagtgataaacgcaatgtgatcctttttagcgtcttcgacgagaaccggtcctggtacttgaccgagaatatacaaaggttccttcccaaccccgcaggcgttcagttggaagaccctgagtttcaggccagcaatattatgcactcaatcaacggctatgtgtttgatagtctccagctttctgtttgcctccatgaagtagcctattggtacatcttgtcaattggtgctcaaacagacttcctctccgtcttcttctccggctacacctttaagcacaagggcgtgtatgaggacactctcacactctttccattttctggagaaaccgtgttcatgagcatggagaatccaggcctttggatcttgggttgccacaacagtgattttcgcaatcggggaatgactgctctcctcaaagtcagcagctgtgattggaacacaggcgactattacgaagattcttacgaggacataagtgcctactttgactccaagaataacgccattgagcccagatcattctcccagaatcctcccgtgcttaaaaggcatcagcgcgaaggtaccagaactactcttcagtctgatcaagaggagattgactatgacgacaccattagcgtggaaatgaagaaggaggatttcgatatctatgacgaagatgagaaccagtctccgcggagctttcagaagaagacgcgacactacttcattgcagcagtcgaaaggctttgggactacggtatgtcatcatcccctcatgtgttgcgcaatagagctcagagtggaagtgttccacagttcaagaaagtcgtctttcaagagtttacagatggcagcttcacacagcctctctatcggggcgagcttaacgaacatttgggactccttggtccctatatccgagccgaagtggaggacaacattatggttacctttaggaatcaagcctctcgcccctacagcttctactcctccctcatcagtggtgaggaggatcagagacaaggcgctgaaccacggaagaactttgtgaaaccgaatgagacgaagacctacttctggaaagtacagcaccacatggcccccacaaaagacgaattcgattgcaaagcatgggcgtatttttcagacgttgacttggagaaagatgtacattcaggacttattggtcctttgttggtgtgtcacactaacactctcaatccagcccatggcaggcaggtgacagtccaggaattcgctcttttctttaccatctttgatgagaccaagtcctggtacttcacggaaaacatggagcgcaattgcagagccccctgtaacatacagatggaggaccctacctttaaggaaaattatcggttccacgcaatcaacggatacattatggatacactccctggccttgtgatggctcaggaccaacgaatcaggtggtacctcctcagcatgggttctaatgagaacatacactccattcacttttcaggacatgtgttcactgtccggaagaaagaagagtataagatggccctctacaatttgtatccaggcgtgtttgagaccgttgaaatgcttccctctaaagctggcatctggagagtagagtgcttgatcggagaacatcttcacgcaggtatgagcaccttgttcctcgtgtacagcaacaaatgtcagaatccacttggcatggccagtggacacattcgcgactttcagatcacagcatctggccagtatggacaatgggccccaaagttggctcgcctccattactccggtagcataaatgcgtggtccactaaagaacctttcagctggattaaggtcgatcttcttgcccccatgatcatccacggcattaagacacagggagcgaggcagaaattctcctccctctacatctcacagttcattattatgtatagtttggacggcaagaagtggcaaacttatagaggtaacagtactggaacagacatggtgttcttcggcaacgttgatagctctggcatcaaacacaacatctttaatcctcccataatagctcggtacatcagattgcatccgacccactacagcattaggagtacactccgaatggagcttatgggttgcgacttgaattcctgttcaatgccactcggaatggagtctaaagccatctctgatgcacagataaccgccagtagctactttacgaacatgtttgctacgtggtcaccctctaaggcaaggcttcatttgcaaggccggtctaatgcctggagacctcaggtgaacaacccgaaagaatggctccaggtggactttcagaagaccatgaaagtaacaggtgtcactactcagggagttaagtccttggatactagcatgtatgtgaaggagttccttatttcctcatcacaagatggccaccagtggaccctcttctttcagaatggtaaggtcaaagtgtttcagggcaatcaagacagcttcacacccgtggtgaacagtcttgatcctccactcttgacacgataccttcgaatccatccacagtcttgggagcaccagattgcattgcgcatggaagtacttggatgcgaggctcaggacctctac

SEQ ID NO: 1762 - protein, 1457 aa, synthetic construct
  REGION 1..1457: note = Variant of human B-domain deleted Factor VIII
MQIELSTCFFLCLLRFCFSATRRYYLGAVELSWDYMQSDLGELPVDARFPPRVPKSFPFNTSQVYKKTLFVEFTDHLFNIAKPRPPWMGLLGPTIQAEVYDTVVITLKNMASHPVSLHAVGVSYWKASEGAEYDDQTSQREKEDDKVFPGGSHTYVWQVLKENGPMASDPPCLTYSYLSHVDLVKDLNSGLIGALLVCREGSLAKEKTQTLAKFILLFAVFDEGKSWHSETKNSLMQDRDAASARAWPKMHTVNGYVNRTLPGLIGCHRKSVYWHVIGMGTTPEVHSIFLEGHTFLVRNHRQASLGISPITFLTAQTLLRDLGQFLLFCHIPSHQHDGMEAYVKVDSCPEEPQLRMKNNEEAEDYDDDLTDSEMDVVRFDDDNSPSIIQARSGAKKHPKTWVHYIAAEEEDWDYAPLVLAPDDRSYKSQYLNNGPQRIGRKYKKVRFMAYTDETFKTREAIQHESGILGPLLYGEVGDTLLIIFKNQASRPYNIYPHGITDVRPLYSRRLPKGVKHLKDFPILPGEIFKYKWTITVEDGPTKSDPRCLTRYYSSFVNWERDLASGLIGPLLICYKESVDQRGNQIMSDKRNVILFSVFDENRSWYLTENIQRFLPNPAGVQLEDPEFQASNIMHSINGYVFDSLQLSVCLHEVAYWYILSIGAQTDFLSVFFSGYTFKHKGVYEDTLTLFPFSGETVFMSMENPGLWILGCHNSDFRNRGMTALLKVSSCDWNTGDYYEDSYEDISAYFDSKNNAIEPRSFSQNPPVLKRHQREGTRTTLQSDQEEIDYDDTISVEMKKEDFDIYDEDENQSPRSFQKKTRHYFIAAVERLWDYGMSSSPHVLRNRAQSGSVPQFKKVVFQEFTDGSFTQPLYRGELNEHLGLLGPYIRAEVEDNIMVTFRNQASRPYSFYSSLISGEEDQRQGAEPRKNFVKPNETKTYFWKVQHHMAPTKDEFDCKAWAYFSDVDLEKDVHSGLIGPLLVCHTNTLNPAHGRQVTVQEFALFFTIFDETKSWYFTENMERNCRAPCNIQMEDPTFKENYRFHAINGYIMDTLPGLVMAQDQRIRWYLLSMGSNENIHSIHFSGHVFTVRKKEEYKMALYNLYPGVFETVEMLPSKAGIWRVECLIGEHLHAGMSTLFLVYSNKCQNPLGMASGHIRDFQITASGQYGQWAPKLARLHYSGSINAWSTKEPFSWIKVDLLAPMIIHGIKTQGARQKFSSLYISQFIIMYSLDGKKWQTYRGNSTGTDMVFFGNVDSSGIKHNIFNPPIIARYIRLHPTHYSIRSTLRMELMGCDLNSCSMPLGMESKAISDAQITASSYFTNMFATWSPSKARLHLQGRSNAWRPQVNNPKEWLQVDFQKTMKVTGVTTQGVKSLDTSMYVKEFLISSSQDGHQWTLFFQNGKVKVFQGNQDSFTPVVNSLDPPLLTRYLRIHPQSWEHQIALRMEVLGCEAQDLY

SEQ ID NO: 1763 - DNA, 4371 bp, synthetic construct
  misc_feature 1..4371: note = Variant of human B-domain deleted Factor VIII
  source 1..4371: mol_type = other DNA
atgcagattgaactgtctacctgcttcttcctctgtttgctgaggttctgctttagcgccactagacggtactaccttggcgctgtggagctgtcctgggactatatgcagagtgatttgggagagcttcccgtcgacgcacgatttcctcctcgcgttccaaagtcatttccctttaacacaagccaggtgtacaagaagacgctcttcgtcgaattcaccgatcacctgttcaatatcgccaaacccagaccaccatggatgggtcttttggggcctaccatacaagcggaggtgtatgacacagttgttatcactctcaagaacatggcttctcatccggtaagtcttcacgcagtgggcgtgtcctactggaaagcttcagaaggagccgagtatgatgatcagacatcccagagggagaaagaagacgacaaggtatttccaggtgggtctcatacctatgtgtggcaagtgctcaaagagaatggccctatggcaagcgatccgccgtgtttgacttacagctacctttcacacgttgacctcgtcaaggacctcaactccgggttgattggagccttgttggtatgcagggaaggatctcttgccaaagagaagacacagaccctggccaagtttatccttctctttgctgtgttcgatgagggcaaaagttggcatagcgaaacgaagaattccctcatgcaggatcgcgacgcagccagcgccagagcttggcccaagatgcacactgtgaacggatatgtcaataggacgcttcctggcttgattgggtgtcatcggaaaagtgtctactggcacgtgatcggaatggggacaacaccagaggtccactccatatttctcgaaggccataccttccttgttcgaaaccacagacaggcatccttggggatctctcccattacctttctcactgcccaaacgctccttcgtgacttgggtcagttccttctcttttgccatatcccgtcacaccagcatgatggtatggaagcttatgtgaaagtcgacagttgtcctgaggagccacagttgcgcatgaagaataatgaagaagccgaggattacgacgacgatctcaccgattctgagatggacgtggtgaggtttgatgacgacaactctccctccatcattcaagctcggagcggggcgaagaaacaccccaagacttgggtccactatatagcggcggaagaggaggattgggattacgctcctcttgtattggcaccagatgaccgctcatacaaaagccagtacctcaacaacggaccgcagagaattggccggaagtataagaaagtgcgatttatggcctatacagacgaaacctttaagacaagggaggccatccagcatgagagtgggattttgggacctcttctttacggcgaagttggtgataccctcctcatcatcttcaagaatcaagcttctcgcccctataacatttacccacacgggatcactgacgttaggcctttgtatagcagaagacttcccaaaggcgtgaagcatctcaaagacttccccattttgccaggcgagatctttaagtacaaatggaccattacagtggaagatggaccgactaaatcagaccctcgatgccttacgcggtactattcctccttcgtgaattgggagagagatttggcaagcggactcataggaccactcctcatctgttacaaggaatctgtagaccagaggggtaaccagattatgagtgataaacgcaatgtgatcctttttagcgtcttcgacgagaaccggtcctggtacttgaccgagaatatacaaaggttccttcccaaccccgcaggcgttcagttggaagaccctgagtttcaggccagcaatattatgcactcaatcaacggctatgtgtttgatagtctccagctttctgtttgcctccatgaagtagcctattggtacatcttgtcaattggtgctcaaacagacttcctctccgtcttcttctccggctacacctttaagcacaagggcgtgtatgaggacactctcacactctttccattttctggagaaaccgtgttcatgagcatggagaatccaggcctttggatcttgggttgcatgaacagtgattttcgcaatcggggaatgactgctctcctcaaagtcagcagctgtgattggaacacaggcgactattacgaagattcttacgaggacataagtgcctactttgactccaagaataacgccattgagcccagatcattctcccagaatcctcccgtgcttaaaaggcatcagcgcgaaggtaccagaactactcttcagtctgatcaagaggagattgactatgacgacaccattagcgtggaaatgaagaaggaggatttcgatatctatgacgaagatgagaaccagtctccgcggagctttcagaagaagacgcgacactacttcattgcagcagtcgaaaggctttgggactacggtatgtcatcatcccctcatgtgttgcgcaatagagctcagagtggaagtgttccacagttcaagaaagtcgtctttcaagagtttacagatggcagcttcacacagcctctctatcggggcgagcttaacgaacatttgggactccttggtccctatatccgagccgaagtggaggacaacattatggttacctttaggaatcaagcctctcgcccctacagcttctactcctccctcatcagttatgaggaggatcagagacaaggcgctgaaccacggaagaactttgtgaaaccgaatgagacgaagacctacttctggaaagtacagcaccacatggcccccacaaaagacgaattcgattgcaaagcatgggcgtatttttcagacgttgacttggagaaagatgtacattcaggacttattggtcctttgttggtgtgtcacactaacactctcaatccagcccatggcaggcaggtgacagtccaggaattcgctcttttctttaccatctttgatgagaccaagtcctggtacttcacggaaaacatggagcgcaattgcagagccccctgtaacatacagatggaggaccctacctttaaggaaaattatcggttccacgcaatcaacggatacattatggatacactccctggccttgtgatggctcaggaccaacgaatcaggtggtacctcctcagcatgggttctaatgagaacatacactccattcacttttcaggacatgtgttcactgtccggaagaaagaagagtataagatggccctctacaatttgtatccaggcgtgtttgagaccgttgaaatgcttccctctaaagctggcatctggagagtagagtgcttgatcggagaacatcttcacgcaggtatgagcaccttgttcctcgtgtacagcaacaaatgtcagaatccacttggcatggccagtggacacattcgcgactttcagatcacagcatctggccagtatggacaatgggccccaaagttggctcgcctccattactccggtagcataaatgcgtggtccactaaagaacctttcagctggattaaggtcgatcttcttgcccccatgatcatccacggcattaagacacagggagcgaggcagaaattctcctccctctacatctcacagttcattattatgtatagtttggacggcaagaagtggcaaacttatagaggtaacagtactggaacagacatggtgttcttcggcaacgttgatagctctggcatcaaacacaacatctttaatcctcccataatagctcggtacatcagattgcatccgacccactacagcattaggagtacactccgaatggagcttatgggttgcgacttgaattcctgttcaatgccactcggaatggagtctaaagccatctctgatgcacagataaccgccagtagctactttacgaacatgtttgctacgtggtcaccctctaaggcaaggcttcatttgcaaggccggtctaatgcctggagacctcaggtgaacaacccgaaagaatggctccaggtggactttcagaagaccatgaaagtaacaggtgtcactactcagggagttaagtccttggatactagcatgtatgtgaaggagttccttatttcctcatcacaagatggccaccagtggaccctcttctttcagaatggtaaggtcaaagtgtttcagggcaatcaagacagcttcacacccgtggtgaacagtcttgatcctccactcttgacacgataccttcgaatccatccacagtcttgggagcaccagattgcattgcgcatggaagtacttggatgcgaggctcaggacctctac

SEQ ID NO: 1764 - protein, 1457 aa, synthetic construct
  REGION 1..1457: note = Variant of human B-domain deleted Factor VIII
MQIELSTCFFLCLLRFCFSATRRYYLGAVELSWDYMQSDLGELPVDARFPPRVPKSFPFNTSQVYKKTLFVEFTDHLFNIAKPRPPWMGLLGPTIQAEVYDTVVITLKNMASHPVSLHAVGVSYWKASEGAEYDDQTSQREKEDDKVFPGGSHTYVWQVLKENGPMASDPPCLTYSYLSHVDLVKDLNSGLIGALLVCREGSLAKEKTQTLAKFILLFAVFDEGKSWHSETKNSLMQDRDAASARAWPKMHTVNGYVNRTLPGLIGCHRKSVYWHVIGMGTTPEVHSIFLEGHTFLVRNHRQASLGISPITFLTAQTLLRDLGQFLLFCHIPSHQHDGMEAYVKVDSCPEEPQLRMKNNEEAEDYDDDLTDSEMDVVRFDDDNSPSIIQARSGAKKHPKTWVHYIAAEEEDWDYAPLVLAPDDRSYKSQYLNNGPQRIGRKYKKVRFMAYTDETFKTREAIQHESGILGPLLYGEVGDTLLIIFKNQASRPYNIYPHGITDVRPLYSRRLPKGVKHLKDFPILPGEIFKYKWTITVEDGPTKSDPRCLTRYYSSFVNWERDLASGLIGPLLICYKESVDQRGNQIMSDKRNVILFSVFDENRSWYLTENIQRFLPNPAGVQLEDPEFQASNIMHSINGYVFDSLQLSVCLHEVAYWYILSIGAQTDFLSVFFSGYTFKHKGVYEDTLTLFPFSGETVFMSMENPGLWILGCMNSDFRNRGMTALLKVSSCDWNTGDYYEDSYEDISAYFDSKNNAIEPRSFSQNPPVLKRHQREGTRTTLQSDQEEIDYDDTISVEMKKEDFDIYDEDENQSPRSFQKKTRHYFIAAVERLWDYGMSSSPHVLRNRAQSGSVPQFKKVVFQEFTDGSFTQPLYRGELNEHLGLLGPYIRAEVEDNIMVTFRNQASRPYSFYSSLISYEEDQRQGAEPRKNFVKPNETKTYFWKVQHHMAPTKDEFDCKAWAYFSDVDLEKDVHSGLIGPLLVCHTNTLNPAHGRQVTVQEFALFFTIFDETKSWYFTENMERNCRAPCNIQMEDPTFKENYRFHAINGYIMDTLPGLVMAQDQRIRWYLLSMGSNENIHSIHFSGHVFTVRKKEEYKMALYNLYPGVFETVEMLPSKAGIWRVECLIGEHLHAGMSTLFLVYSNKCQNPLGMASGHIRDFQITASGQYGQWAPKLARLHYSGSINAWSTKEPFSWIKVDLLAPMIIHGIKTQGARQKFSSLYISQFIIMYSLDGKKWQTYRGNSTGTDMVFFGNVDSSGIKHNIFNPPIIARYIRLHPTHYSIRSTLRMELMGCDLNSCSMPLGMESKAISDAQITASSYFTNMFATWSPSKARLHLQGRSNAWRPQVNNPKEWLQVDFQKTMKVTGVTTQGVKSLDTSMYVKEFLISSSQDGHQWTLFFQNGKVKVFQGNQDSFTPVVNSLDPPLLTRYLRIHPQSWEHQIALRMEVLGCEAQDLY

SEQ ID NO: 1765 - DNA, 4371 bp, synthetic construct
  misc_feature 1..4371: note = Variant of human B-domain deleted Factor VIII
  source 1..4371: mol_type = other DNA
atgcagattgaactgtctacctgcttcttcctctgtttgctgaggttctgctttagcgccactagacggtactaccttggcgctgtggagctgtcctgggactatatgcagagtgatttgggagagcttcccgtcgacgcacgatttcctcctcgcgttccaaagtcatttccctttaacacaagccaggtgtacaagaagacgctcttcgtcgaattcaccgatcacctgttcaatatcgccaaacccagaccaccatggatgggtcttttggggcctaccatacaagcggaggtgtatgacacagttgttatcactctcaagaacatggcttctcatccggtaagtcttcacgcagtgggcgtgtcctactggaaagcttcagaaggagccgagtatgatgatcagacatcccagagggagaaagaagacgacaaggtatttccaggtgggtctcatacctatgtgtggcaagtgctcaaagagaatggccctatggcaagcgatccgccgtgtttgacttacagctacctttcacacgttgacctcgtcaaggacctcaactccgggttgattggagccttgttggtatgcagggaaggatctcttgccaaagagaagacacagaccctggccaagtttatccttctctttgctgtgttcgatgagggcaaaagttggcatagcgaaacgaagaattccctcatgcaggatcgcgacgcagccagcgccagagcttggcccaagatgcacactgtgaacggatatgtcaataggacgcttcctggcttgattgggtgtcatcggaaaagtgtctactggcacgtgatcggaatggggacaacaccagaggtccactccatatttctcgaaggccataccttccttgttcgaaaccacagacaggcatccttggggatctctcccattacctttctcactgcccaaacgctccttcgtgacttgggtcagttccttctcttttgccatatcccgtcacaccagcatgatggtatggaagcttatgtgaaagtcgacagttgtcctgaggagccacagttgcgcatgaagaataatgaagaagccgaggattacgacgacgatctcaccgattctgagatggacgtggtgaggtttgatgacgacaactctccctccatcattcaagctcggagcggggcgaagaaacaccccaagacttgggtccactatatagcggcggaagaggaggattgggattacgctcctcttgtattggcaccagatgaccgctcatacaaaagccagtacctcaacaacggaccgcagagaattggccggaagtataagaaagtgcgatttatggcctatacagacgaaacctttaagacaagggaggccatccagcatgagagtgggattttgggacctcttctttacggcgaagttggtgataccctcctcatcatcttcaagaatcaagcttctcgcccctataacatttacccacacgggatcactgacgttaggcctttgtatagcagaagacttcccaaaggcgtgaagcatctcaaagacttccccattttgccaggcgagatctttaagtacaaatggaccattacagtggaagatggaccgactaaatcagaccctcgatgccttacgcggtactattcctccttcgtgaattgggagagagatttggcaagcggactcataggaccactcctcatctgttacaaggaatctgtagaccagaggggtaaccagattatgagtgataaacgcaatgtgatcctttttagcgtcttcgacgagaaccggtcctggtacttgaccgagaatatacaaaggttccttcccaaccccgcaggcgttcagttggaagaccctgagtttcaggccagcaatattatgcactcaatcaacggctatgtgtttgatagtctccagctttctgtttgcctccatgaagtagcctattggtacatcttgtcaattggtgctcaaacagacttcctctccgtcttcttctccggctacacctttaagcacaagggcgtgtatgaggacactctcacactctttccattttctggagaaaccgtgttcatgagcatggagaatccaggcctttggatcttgggttgccacaacagtgattttcgcaatcggggaatgactgctctcctcaaagtcagcagctgtgattggaacacaggcgactattacgaagattcttacgaggacataagtgcctactttgactccaagaataacgccattgagcccagatcattctcccagaatcctcccgtgcttaaaaggcatcagcgcgaaggtaccagaactactcttcagtctgatcaagaggagattgactatgacgacaccattagcgtggaaatgaagaaggaggatttcgatatctatgacgaagatgagaaccagtctccgcggagctttcagaagaagacgcgacactacttcattgcagcagtcgaaaggctttgggactacggtatgtcatcatcccctcatgtgttgcgcaatagagctcagagtggaagtgttccacagttcaagaaagtcgtctttcaagagtttacagatggcagcttcacacagcctctctatcggggcgagcttaacgaacatttgggactccttggtccctatatccgagccgaagtggaggacaacattatggttacctttaggaatcaagcctctcgcccctacagcttctactcctccctcatcagttatgaggaggatcagagacaaggcgctgaaccacggaagaactttgtgaaaccgaatgagacgaagacctacttctggaaagtacagcaccacatggcccccacaaaagacgaattcgattgcaaagcatgggcgtatttttcagacgttgacttggagaaagatgtacattcaggacttattggtcctttgttggtgtgtcacactaacactctcaatccagcccatggcaggcaggtgacagtccaggaattcgctcttttctttaccatctttgatgagaccaagtcctggtacttcacggaaaacatggagcgcaattgcagagccccctgtaacatacagatggaggaccctacctttaaggaaaattatcggttccacgcaatcaacggatacattatggatacactccctggccttgtgatggctcaggaccaacgaatcaggtggtacctcctcagcatgggttctaatgagaacatacacgtgattcacttttcaggacatgtgttcactgtccggaagaaagaagagtataagatggccctctacaatttgtatccaggcgtgtttgagaccgttgaaatgcttccctctaaagctggcatctggagagtagagtgcttgatcggagaacatcttcacgcaggtatgagcaccttgttcctcgtgtacagcaacaaatgtcagaatccacttggcatggccagtggacacattcgcgactttcagatcacagcatctggccagtatggacaatgggccccaaagttggctcgcctccattactccggtagcataaatgcgtggtccactaaagaacctttcagctggattaaggtcgatcttcttgcccccatgatcatccacggcattaagacacagggagcgaggcagaaattctcctccctctacatctcacagttcattattatgtatagtttggacggcaagaagtggcaaacttatagaggtaacagtactggaacagacatggtgttcttcggcaacgttgatagctctggcatcaaacacaacatctttaatcctcccataatagctcggtacatcagattgcatccgacccactacagcattaggagtacactccgaatggagcttatgggttgcgacttgaattcctgttcaatgccactcggaatggagtctaaagccatctctgatgcacagataaccgccagtagctactttacgaacatgtttgctacgtggtcaccctctaaggcaaggcttcatttgcaaggccggtctaatgcctggagacctcaggtgaacaacccgaaagaatggctccaggtggactttcagaagaccatgaaagtaacaggtgtcactactcagggagttaagtccttggatactagcatgtatgtgaaggagttccttatttcctcatcacaagatggccaccagtggaccctcttctttcagaatggtaaggtcaaagtgtttcagggcaatcaagacagcttcacacccgtggtgaacagtcttgatcctccactcttgacacgataccttcgaatccatccacagtcttgggagcaccagattgcattgcgcatggaagtacttggatgcgaggctcaggacctctac

SEQ ID NO: 1766 - protein, 1457 aa, synthetic construct
  REGION 1..1457: note = Variant of human B-domain deleted Factor VIII
MQIELSTCFFLCLLRFCFSATRRYYLGAVELSWDYMQSDLGELPVDARFPPRVPKSFPFNTSQVYKKTLFVEFTDHLFNIAKPRPPWMGLLGPTIQAEVYDTVVITLKNMASHPVSLHAVGVSYWKASEGAEYDDQTSQREKEDDKVFPGGSHTYVWQVLKENGPMASDPPCLTYSYLSHVDLVKDLNSGLIGALLVCREGSLAKEKTQTLAKFILLFAVFDEGKSWHSETKNSLMQDRDAASARAWPKMHTVNGYVNRTLPGLIGCHRKSVYWHVIGMGTTPEVHSIFLEGHTFLVRNHRQASLGISPITFLTAQTLLRDLGQFLLFCHIPSHQHDGMEAYVKVDSCPEEPQLRMKNNEEAEDYDDDLTDSEMDVVRFDDDNSPSIIQARSGAKKHPKTWVHYIAAEEEDWDYAPLVLAPDDRSYKSQYLNNGPQRIGRKYKKVRFMAYTDETFKTREAIQHESGILGPLLYGEVGDTLLIIFKNQASRPYNIYPHGITDVRPLYSRRLPKGVKHLKDFPILPGEIFKYKWTITVEDGPTKSDPRCLTRYYSSFVNWERDLASGLIGPLLICYKESVDQRGNQIMSDKRNVILFSVFDENRSWYLTENIQRFLPNPAGVQLEDPEFQASNIMHSINGYVFDSLQLSVCLHEVAYWYILSIGAQTDFLSVFFSGYTFKHKGVYEDTLTLFPFSGETVFMSMENPGLWILGCHNSDFRNRGMTALLKVSSCDWNTGDYYEDSYEDISAYFDSKNNAIEPRSFSQNPPVLKRHQREGTRTTLQSDQEEIDYDDTISVEMKKEDFDIYDEDENQSPRSFQKKTRHYFIAAVERLWDYGMSSSPHVLRNRAQSGSVPQFKKVVFQEFTDGSFTQPLYRGELNEHLGLLGPYIRAEVEDNIMVTFRNQASRPYSFYSSLISYEEDQRQGAEPRKNFVKPNETKTYFWKVQHHMAPTKDEFDCKAWAYFSDVDLEKDVHSGLIGPLLVCHTNTLNPAHGRQVTVQEFALFFTIFDETKSWYFTENMERNCRAPCNIQMEDPTFKENYRFHAINGYIMDTLPGLVMAQDQRIRWYLLSMGSNENIHVIHFSGHVFTVRKKEEYKMALYNLYPGVFETVEMLPSKAGIWRVECLIGEHLHAGMSTLFLVYSNKCQNPLGMASGHIRDFQITASGQYGQWAPKLARLHYSGSINAWSTKEPFSWIKVDLLAPMIIHGIKTQGARQKFSSLYISQFIIMYSLDGKKWQTYRGNSTGTDMVFFGNVDSSGIKHNIFNPPIIARYIRLHPTHYSIRSTLRMELMGCDLNSCSMPLGMESKAISDAQITASSYFTNMFATWSPSKARLHLQGRSNAWRPQVNNPKEWLQVDFQKTMKVTGVTTQGVKSLDTSMYVKEFLISSSQDGHQWTLFFQNGKVKVFQGNQDSFTPVVNSLDPPLLTRYLRIHPQSWEHQIALRMEVLGCEAQDLY

SEQ ID NO: 1767 - DNA, 4371 bp, synthetic construct
  misc_feature 1..4371: note = Variant of human B-domain deleted Factor VIII
  source 1..4371: mol_type = other DNA
atgcagattgaactgtctacctgcttcttcctctgtttgctgaggttctgctttagcgccactagacggtactaccttggcgctgtggagctgtcctgggactatatgcagagtgatttgggagagcttcccgtcgacgcacgatttcctcctcgcgttccaaagtcatttccctttaacacaagccaggtgtacaagaagacgctcttcgtcgaattcaccgatcacctgttcaatatcgccaaacccagaccaccatggatgggtcttttggggcctaccatacaagcggaggtgtatgacacagttgttatcactctcaagaacatggcttctcatccggtaagtcttcacgcagtgggcgtgtcctactggaaagcttcagaaggagccgagtatgatgatcagacatcccagagggagaaagaagacgacaaggtatttccaggtgggtctcatacctatgtgtggcaagtgctcaaagagaatggccctatggcaagcgatccgccgtgtttgacttacagctacctttcacacgttgacctcgtcaaggacctcaactccgggttgattggagccttgttggtatgcagggaaggatctcttgccaaagagaagacacagaccctggccaagtttatccttctctttgctgtgttcgatgagggcaaaagttggcatagcgaaacgaagaattccctcatgcaggatcgcgacgcagccagcgccagagcttggcccaagatgcacactgtgaacggatatgtcaataggacgcttcctggcttgattgggtgtcatcggaaaagtgtctactggcacgtgatcggaatggggacaacaccagaggtccactccatatttctcgaaggccataccttccttgttcgaaaccacagacaggcatccttggggatctctcccattacctttctcactgcccaaacgctccttcgtgacttgggtcagttccttctcttttgccatatcccgtcacaccagcatgatggtatggaagcttatgtgaaagtcgacagttgtcctgaggagccacagttgcgcatgaagaataatgaagaagccgaggattacgacgacgatctcaccgattctgagatggacgtggtgaggtttgatgacgacaactctccctccatcattcaagctcggagcggggcgaagaaacaccccaagacttgggtccactatatagcggcggaagaggaggattgggattacgctcctcttgtattggcaccagatgaccgctcatacaaaagccagtacctcaacaacggaccgcagagaattggccggaagtataagaaagtgcgatttatggcctatacagacgaaacctttaagacaagggaggccatccagcatgagagtgggattttgggacctcttctttacggcgaagttggtgataccctcctcatcatcttcaagaatcaagcttctcgcccctataacatttacccacacgggatcactgacgttaggcctttgtatagcagaagacttcccaaaggcgtgaagcatctcaaagacttccccattttgccaggcgagatctttaagtacaaatggaccattacagtggaagatggaccgactaaatcagaccctcgatgccttacgcggtactattcctccttcgtgaattgggagagagatttggcaagcggactcataggaccactcctcatctgttacaaggaatctgtagaccagaggggtaaccagattatgagtgataaacgcaatgtgatcctttttagcgtcttcgacgagaaccggtcctggtacttgaccgagaatatacaaaggttccttcccaaccccgcaggcgttcagttggaagaccctgagtttcaggccagcaatattatgcactcaatcaacggctatgtgtttgatagtctccagctttctgtttgcctccatgaagtagcctattggtacatcttgtcaattggtgctcaaacagacttcctctccgtcttcttctccggctacacctttaagcacaagggcgtgtatgaggacactctcacactctttccattttctggagaaaccgtgttcatgagcatggagaatccaggcctttggatcttgggttgccacaacagtgattttcgcaatcggggaatgactgctctcctcaaagtcagcagctgtgattggaacacaggcgactattacgaagattcttacgaggacataagtgcctactttgactccaagaataacgccattgagcccagatcattctcccagaatcctcccgtgcttaaaaggcatcagcgcgaaggtaccagaactactcttcagtctgatcaagaggagattgactatgacgacaccattagcgtggaaatgaagaaggaggatttcgatatctatggggaagatgagaaccagtctccgcggagctttcagaagaagacgcgacactacttcattgcagcagtcgaaaggctttgggactacggtatgtcatcatcccctcatgtgttgcgcaatagagctcagagtggaagtgttccacagttcaagaaagtcgtctttcaagagtttacagatggcagcttcacacagcctctctatcggggcgagcttaacgaacatttgggactccttggtccctatatccgagccgaagtggaggacaacattatggttacctttaggaatcaagcctctcgcccctacagcttctactcctccctcatcagttatgaggaggatcagagacaaggcgctgaaccacggaagaactttgtgaaaccgaatgagacgaagacctacttctggaaagtacagcaccacatggcccccacaaaagacgaattcgattgcaaagcatgggcgtatttttcagacgttgacttggagaaagatgtacattcaggacttattggtcctttgttggtgtgtcacactaacactctcaatccagcccatggcaggcaggtgacagtccaggaattcgctcttttctttaccatctttgatgagaccaagtcctggtacttcacggaaaacatggagcgcaattgcagagccccctgtaacatacagatggaggaccctacctttaaggaaaattatcggttccacgcaatcaacggatacattatggatacactccctggccttgtgatggctcaggaccaacgaatcaggtggtacctcctcagcatgggttctaatgagaacatacactccattcacttttcaggacatgtgttcactgtccggaagaaagaagagtataagatggccctctacaatttgtatccaggcgtgtttgagaccgttgaaatgcttccctctaaagctggcatctggagagtagagtgcttgatcggagaacatcttcacgcaggtatgagcaccttgttcctcgtgtacagcaacaaatgtcagaatccacttggcatggccagtggacacattcgcgactttcagatcacagcatctggccagtatggacaatgggccccaaagttggctcgcctccattactccggtagcataaatgcgtggtccactaaagaacctttcagctggattaaggtcgatcttcttgcccccatgatcatccacggcattaagacacagggagcgaggcagaaattctcctccctctacatctcacagttcattattatgtatagtttggacggcaagaagtggcaaacttatagaggtaacagtactggaacagacatggtgttcttcggcaacgttgatagctctggcatcaaacacaacatctttaatcctcccataatagctcggtacatcagattgcatccgacccactacagcattaggagtacactccgaatggagcttatgggttgcgacttgaattcctgttcaatgccactcggaatggagtctaaagccatctctgatgcacagataaccgccagtagctactttacgaacatgtttgctacgtggtcaccctctaaggcaaggcttcatttgcaaggccggtctaatgcctggagacctcaggtgaacaacccggaagaatggctccaggtggactttcagaagaccatgaaagtaacaggtgtcactactcagggagttaagtccttggatactagcatgtatgtgaaggagttccttatttcctcatcacaagatggccaccagtggaccctcttctttcagaatggtaaggtcaaagtgtttcagggcaatcaagacagcttcacacccgtggtgaacagtcttgatcctccactcttgacacgataccttcgaatccatccacagtcttgggagcaccagattgcattgcgcatggaagtacttggatgcgaggctcaggacctctac

SEQ ID NO: 1768 - protein, 1457 aa, synthetic construct
  REGION 1..1457: note = Variant of human B-domain deleted Factor VIII
MQIELSTCFFLCLLRFCFSATRRYYLGAVELSWDYMQSDLGELPVDARFPPRVPKSFPFNTSQVYKKTLFVEFTDHLFNIAKPRPPWMGLLGPTIQAEVYDTVVITLKNMASHPVSLHAVGVSYWKASEGAEYDDQTSQREKEDDKVFPGGSHTYVWQVLKENGPMASDPPCLTYSYLSHVDLVKDLNSGLIGALLVCREGSLAKEKTQTLAKFILLFAVFDEGKSWHSETKNSLMQDRDAASARAWPKMHTVNGYVNRTLPGLIGCHRKSVYWHVIGMGTTPEVHSIFLEGHTFLVRNHRQASLGISPITFLTAQTLLRDLGQFLLFCHIPSHQHDGMEAYVKVDSCPEEPQLRMKNNEEAEDYDDDLTDSEMDVVRFDDDNSPSIIQARSGAKKHPKTWVHYIAAEEEDWDYAPLVLAPDDRSYKSQYLNNGPQRIGRKYKKVRFMAYTDETFKTREAIQHESGILGPLLYGEVGDTLLIIFKNQASRPYNIYPHGITDVRPLYSRRLPKGVKHLKDFPILPGEIFKYKWTITVEDGPTKSDPRCLTRYYSSFVNWERDLASGLIGPLLICYKESVDQRGNQIMSDKRNVILFSVFDENRSWYLTENIQRFLPNPAGVQLEDPEFQASNIMHSINGYVFDSLQLSVCLHEVAYWYILSIGAQTDFLSVFFSGYTFKHKGVYEDTLTLFPFSGETVFMSMENPGLWILGCHNSDFRNRGMTALLKVSSCDWNTGDYYEDSYEDISAYFDSKNNAIEPRSFSQNPPVLKRHQREGTRTTLQSDQEEIDYDDTISVEMKKEDFDIYGEDENQSPRSFQKKTRHYFIAAVERLWDYGMSSSPHVLRNRAQSGSVPQFKKVVFQEFTDGSFTQPLYRGELNEHLGLLGPYIRAEVEDNIMVTFRNQASRPYSFYSSLISYEEDQRQGAEPRKNFVKPNETKTYFWKVQHHMAPTKDEFDCKAWAYFSDVDLEKDVHSGLIGPLLVCHTNTLNPAHGRQVTVQEFALFFTIFDETKSWYFTENMERNCRAPCNIQMEDPTFKENYRFHAINGYIMDTLPGLVMAQDQRIRWYLLSMGSNENIHSIHFSGHVFTVRKKEEYKMALYNLYPGVFETVEMLPSKAGIWRVECLIGEHLHAGMSTLFLVYSNKCQNPLGMASGHIRDFQITASGQYGQWAPKLARLHYSGSINAWSTKEPFSWIKVDLLAPMIIHGIKTQGARQKFSSLYISQFIIMYSLDGKKWQTYRGNSTGTDMVFFGNVDSSGIKHNIFNPPIIARYIRLHPTHYSIRSTLRMELMGCDLNSCSMPLGMESKAISDAQITASSYFTNMFATWSPSKARLHLQGRSNAWRPQVNNPEEWLQVDFQKTMKVTGVTTQGVKSLDTSMYVKEFLISSSQDGHQWTLFFQNGKVKVFQGNQDSFTPVVNSLDPPLLTRYLRIHPQSWEHQIALRMEVLGCEAQDLY

SEQ ID NO: 1769 - DNA, 4371 bp, synthetic construct
  misc_feature 1..4371: note = Variant of human B-domain deleted Factor VIII
  source 1..4371: mol_type = other DNA
atgcagattgaactgtctacctgcttcttcctctgtttgctgaggttctgctttagcgccactagacggtactaccttggcgctgtggagctgtcctgggactatatgcagagtgatttgggagagcttcccgtcgacgcacgatttcctcctcgcgttccaaagtcatttccctttaacacaagccaggtgtacaagaagacgctcttcgtcgaattcaccgatcacctgttcaatatcgccaaacccagaccaccatggatgggtcttttggggcctaccatacaagcggaggtgtatgacacagttgttatcactctcaagaacatggcttctcatccggtaagtcttcacgcagtgggcgtgtcctactggaaagcttcagaaggagccgagtatgatgatcagacatcccagagggagaaagaagacgacaaggtatttccaggtgggtctcatacctatgtgtggcaagtgctcaaagagaatggccctatggcaagcgatccgccgtgtttgacttacagctacctttcacacgttgacctcgtcaaggacctcaactccgggttgattggagccttgttggtatgcagggaaggatctcttgccaaagagaagacacagaccctggccaagtttatccttctctttgctgtgttcgatgagggcaaaagttggcatagcgaaacgaagaattccctcatgcaggatcgcgacgcagccagcgccagagcttggcccaagatgcacactgtgaacggatatgtcaataggacgcttcctggcttgattgggtgtcatcggaaaagtgtctactggcacgtgatcggaatggggacaacaccagaggtccactccatatttctcgaaggccataccttccttgttcgaaaccacagacaggcatccttggggatctctcccattacctttctcactgcccaaacgctccttcgtgacttgggtcagttccttctcttttgccatatcccgtcacaccagcatgatggtatggaagcttatgtgaaagtcgacagttgtcctgaggagccacagttgcgcatgaagaataatgaagaagccgaggattacgacgacgatctcaccgattctgagatggacgtggtgaggtttgatgacgacaactctccctccatcattcaagctcggagcggggcgaagaaacaccccaagacttgggtccactatatagcggcggaagaggaggattgggattacgctcctcttgtattggcaccagatgaccgctcatacaaaagccagtacctcaacaacggaccgcagagaattggccggaagtataagaaagtgcgatttatggcctatacagacgaaacctttaagacaagggaggccatccagcatgagagtgggattttgggacctcttctttacggcgaagttggtgataccctcctcatcatcttcaagaatcaagcttctcgcccctataacatttacccacacgggatcactgacgttaggcctttgtatagcagaagacttcccaaaggcgtgaagcatctcaaagacttccccattttgccaggcgagatctttaagtacaaatggaccattacagtggaagatggaccgactaaatcagaccctcgatgccttacgcggtactattcctccttcgtgaattgggagagagatttggcaagcggactcataggaccactcctcatctgttacaaggaatctgtagaccagaggggtaaccagattatgagtgataaacgcaatgtgatcctttttagcgtcttcgacgagaaccggtcctggtacttgaccgagaatatacaaaggttccttcccaaccccgcaggcgttcagttggaagaccctgagtttcaggccagcaatattatgcactcaatcaacggctatgtgtttgatagtctccagctttctgtttgcctccatgaagtagcctattggtacatcttgtcaattggtgctcaaacagacttcctctccgtcttcttctccggctacacctttaagcacaagggcgtgtatgaggacactctcacactctttccattttctggagaaaccgtgttcatgagcatggagaatccaggcctttggatcttgggttgccacaacagtgattttcgcaatcggggaatgactgctctcctcaaagtcagcagctgtgattggaacacaggcgactattacgaagattcttacgaggacataagtgcctactttgactccaagaataacgccattgagcccagatcattctcccagaatcctcccgtgcttaaaaggcatcagcgcgaaggtaccagaactactcttcagtctgatcaagaggagattgactatgacgacaccattagcgtggaaatgaagaaggaggatttcgatatctatgacgaagatgagaaccagtctccgcggagctttcagaagaagacgcgacactacttcattgcagcagtcgaaaggctttgggactacggtatgtcatcatcccctcatgtgttgcgcaatagagctcagagtggaagtgttccacagttcaagaaagtcgtctttcaagagtttacagatggcagcttcacacagcctctctatcggggcgagcttaacgaacatttgggactccttggtccctatatccgagccgaagtggaggacaacattatggttacctttaggaatcaagcctctcgcccctacagcttctactcctccctcatcagttatgaggaggatcagagacaaggcgctgaaccacggaagaactttgtgaaaccgaatgagacgaagacctacttctggaaagtacagcaccacatggcccccacaaaagacgaattcgattgcaaagcatgggcgtatttttcagacgttgacttggagaaagatgtacattcaggacttattggtcctttgttggtgtgtcacactaacactctcaatccagcccatggcaggcaggtgacagtccaggaattcgctcttttctttaccatctttgatgagaccaagtcctggtacttcacggaaaacatggagcgcaattgcagagccccctgtaacatacagatggaggaccctacctttaaggaaaattatcggttccacgcaatcaacggatacattatggatacactccctggccttgtgatggctcaggaccaacgaatcaggtggtacctcctcagcatgggttctaatgagaacatacactccattcacttttcaggacatgtgttcactgtccggaagaaagaagggtataagatggccctctacaatttgtatccaggcgtgtttgagaccgttgaaatgcttccctctaaagctggcatctggagagtagagtgcttgatcggagaacatcttcacgcaggtatgagcaccttgttcctcgtgtacagcaacaaatgtcagaatccacttggcatggccagtggacacattcgcgactttcagatcacagcatctggccagtatggacaatgggccccaaagttggctcgcctccattactccggtagcataaatgcgtggtccactaaagaacctttcagctggattaaggtcgatcttcttgcccccatgatcatccacggcattaagacacagggagcgaggcagaaattctcctccctctacatctcacagttcattattatgtatagtttggacggcaagaagtggcaaacttatagaggtaacagtactggaacagacatggtgttcttcggcaacgttgatagctctggcatcaaacacaacatctttaatcctcccataatagctcggtacatcagattgcatccgacccactacagcattaggagtacactccgaatggagcttatgggttgcgacttgaattcctgttcaatgccactcggaatggagtctaaagccatctctgatgcacagataaccgccagtagctactttacgaacatgtttgctacgtggtcaccctctaaggcaaggcttcatttgcaaggccggtctaatgcctggagacctcaggtgaacaacccgaaagaatggctccaggtggactttcagaagaccatgaaagtaacaggtgtcactactcagggagttaagtccttggatactagcatgtatgtgaaggagttccttatttcctcatcacaagatggccaccagtggaccctcttctttcagaatggtaaggtcaaagtgtttcagggcaatcaagacagcttcacacccgtggtgaacagtcttgatcctccactcttgacacgataccttcgaatccatccacagtcttgggagcaccagattgcattgcgcatggaagtacttggatgcgaggctcaggacctctac

SEQ ID NO: 1770 - protein, 1457 aa, synthetic construct
  REGION 1..1457: note = Variant of human B-domain deleted Factor VIII
MQIELSTCFFLCLLRFCFSATRRYYLGAVELSWDYMQSDLGELPVDARFPPRVPKSFPFNTSQVYKKTLFVEFTDHLFNIAKPRPPWMGLLGPTIQAEVYDTVVITLKNMASHPVSLHAVGVSYWKASEGAEYDDQTSQREKEDDKVFPGGSHTYVWQVLKENGPMASDPPCLTYSYLSHVDLVKDLNSGLIGALLVCREGSLAKEKTQTLAKFILLFAVFDEGKSWHSETKNSLMQDRDAASARAWPKMHTVNGYVNRTLPGLIGCHRKSVYWHVIGMGTTPEVHSIFLEGHTFLVRNHRQASLGISPITFLTAQTLLRDLGQFLLFCHIPSHQHDGMEAYVKVDSCPEEPQLRMKNNEEAEDYDDDLTDSEMDVVRFDDDNSPSIIQARSGAKKHPKTWVHYIAAEEEDWDYAPLVLAPDDRSYKSQYLNNGPQRIGRKYKKVRFMAYTDETFKTREAIQHESGILGPLLYGEVGDTLLIIFKNQASRPYNIYPHGITDVRPLYSRRLPKGVKHLKDFPILPGEIFKYKWTITVEDGPTKSDPRCLTRYYSSFVNWERDLASGLIGPLLICYKESVDQRGNQIMSDKRNVILFSVFDENRSWYLTENIQRFLPNPAGVQLEDPEFQASNIMHSINGYVFDSLQLSVCLHEVAYWYILSIGAQTDFLSVFFSGYTFKHKGVYEDTLTLFPFSGETVFMSMENPGLWILGCHNSDFRNRGMTALLKVSSCDWNTGDYYEDSYEDISAYFDSKNNAIEPRSFSQNPPVLKRHQREGTRTTLQSDQEEIDYDDTISVEMKKEDFDIYDEDENQSPRSFQKKTRHYFIAAVERLWDYGMSSSPHVLRNRAQSGSVPQFKKVVFQEFTDGSFTQPLYRGELNEHLGLLGPYIRAEVEDNIMVTFRNQASRPYSFYSSLISYEEDQRQGAEPRKNFVKPNETKTYFWKVQHHMAPTKDEFDCKAWAYFSDVDLEKDVHSGLIGPLLVCHTNTLNPAHGRQVTVQEFALFFTIFDETKSWYFTENMERNCRAPCNIQMEDPTFKENYRFHAINGYIMDTLPGLVMAQDQRIRWYLLSMGSNENIHSIHFSGHVFTVRKKEGYKMALYNLYPGVFETVEMLPSKAGIWRVECLIGEHLHAGMSTLFLVYSNKCQNPLGMASGHIRDFQITASGQYGQWAPKLARLHYSGSINAWSTKEPFSWIKVDLLAPMIIHGIKTQGARQKFSSLYISQFIIMYSLDGKKWQTYRGNSTGTDMVFFGNVDSSGIKHNIFNPPIIARYIRLHPTHYSIRSTLRMELMGCDLNSCSMPLGMESKAISDAQITASSYFTNMFATWSPSKARLHLQGRSNAWRPQVNNPKEWLQVDFQKTMKVTGVTTQGVKSLDTSMYVKEFLISSSQDGHQWTLFFQNGKVKVFQGNQDSFTPVVNSLDPPLLTRYLRIHPQSWEHQIALRMEVLGCEAQDLY

SEQ ID NO: 1771 - DNA, 4371 bp, synthetic construct
  misc_feature 1..4371: note = Variant of human B-domain deleted Factor VIII
  source 1..4371: mol_type = other DNA
atgcagattgaactgtctacctgcttcttcctctgtttgctgaggttctgctttagcgccactagacggtactaccttggcgctgtggagctgtcctgggactatatgcagagtgatttgggagagcttcccgtcgacgcacgatttcctcctcgcgttccaaagtcatttccctttaacacaagccaggtgtacaagaagacgctcttcgtcgaattcaccgatcacctgttcaatatcgccaaacccagaccaccatggatgggtcttttggggcctaccatacaagcggaggtgtatgacacagttgttatcactctcaagaacatggcttctcatccggtaagtcttcacgcagtgggcgtgtcctactggaaagcttcagaaggagccgagtatgatgatcagacatcccagagggagaaagaagacgacaaggtatttccaggtgggtctcatacctatgtgtggcaagtgctcaaagagaatggccctatggcaagcgatccgccgtgtttgacttacagctacctttcacacgttgacctcgtcaaggacctcaactccgggttgattggagccttgttggtatgcagggaaggatctcttgccaaagagaagacacagaccctggccaagtttatccttctctttgctgtgttcgatgagggcaaaagttggcatagcgaaacgaagaattccctcatgcaggatcgcgacgcagccagcgccagagcttggcccaagatgcacactgtgaacggatatgtcaataggacgcttcctggcttgattgggtgtcatcggaaaagtgtctactggcacgtgatcggaatggggacaacaccagaggtccactccatatttctcgaaggccataccttccttgttcgaaaccacagacaggcatccttggggatctctcccattacctttctcactgcccaaacgctccttcgtgacttgggtcagttccttctcttttgccatatcccgtcacaccagcatgatggtatggaagcttatgtgaaagtcgacagttgtcctgaggagccacagttgcgcatgaagaataatgaagaagccgaggattacgacgacgatctcaccgattctgagatggacgtggtgaggtttgatgacgacaactctccctccatcattcaagctcggagcggggcgaagaaacaccccaagacttgggtccactatatagcggcggaagaggaggattgggattacgctcctcttgtattggcaccagatgaccgctcatacaaaagccagtacctcaacaacggaccgcagagaattggccggaagtataagaaagtgcgatttatggcctatacagacgaaacctttaagacaagggaggccatccagcatgagagtgggattttgggacctcttctttacggcgaagttggtgataccctcctcatcatcttcaagaatcaagcttctcgcccctataacatttacccacacgggatcactgacgttaggcctttgtatagcagaagacttcccaaaggcgtgaagcatctcaaagacttccccattttgccaggcgagatctttaagtacaaatggaccattacagtggaagatggaccgactaaatcagaccctcgatgccttacgcggtactattcctccttcgtgaattgggagagagatttggcaagcggactcataggaccactcctcatctgttacaaggaatctgtagaccagaggggtaaccagattatgagtgataaacgcaatgtgatcctttttagcgtcttcgacgagaaccggtcctggtacttgaccgagaatatacaaaggttccttcccaaccccgcaggcgttcagttggaagaccctgagtttcaggccagcaatattatgcactcaatcaacggctatgtgtttgatagtctccagctttctgtttgcctccatgaagtagcctattggtacatcttgtcaattggtgctcaaacagacttcctctccgtcttcttctccggctacacctttaagcacaagggcgtgtatgaggacactctcacactctttccattttctggagaaaccgtgttcatgagcatggagaatccaggcctttggatcttgggttgccacaacagtgattttcgcaatcggggaatgactgctctcctcaaagtcagcagctgtgattggaacacaggcgactattacgaagattcttacgaggacataagtgcctactttgactccaagaataacgccattgagcccagatcattctcccagaatcctcccgtgcttaaaaggcatcagcgcgaaggtaccagaactactcttcagtctgatcaagaggagattgactatgacgacaccattagcgtggaaatgaagaaggaggatttcgatatctatgacgaagatgagaaccagtctccgcggagctttcagaagaagacgcgacactacttcattgcagcagtcgaaaggctttgggactacggtatgtcatcatcccctcatgtgttgcgcaatagagctcagagtggaagtgttccacagttcaagaaagtcgtctttcaagagtttacagatggcagcttcacacagcctctctatcggggcgagcttaacgaacatttgggactccttggtccctatatccgagccgaagtggaggacaacattatggttacctttaggaatcaagcctctcgcccctacagcttctactcctccctcatcagttatgaggaggatcagagacaaggcgctgaaccacggaagaactttgtgaaaccgaatgagacgaagacctacttctggaaagtacagcaccacatggcccccacaaaagacgaattcgattgcaaagcatgggcgtatttttcagacgttgacttggagaaagatgtacattcaggacttattggtcctttgttggtgtgtcacactaacactctcaatccagcccatggcaggcaggtgacagtccaggaattcgctcttttctttaccatctttgatgagaccaagtcctggtacttcacggaaaacatggagcgcaattgcagagccccctgtaacatacagatggaggaccctacctttaaggaaaattatcggttccacgcaatcaacggatacattatggatacactccctggccttgtgatggctcaggaccaacgaatcaggtggtacctcctcagcatgggttctaatgagaacatacactccattcacttttcaggacatgtgttcactgtccggaagggggaagagtataagatggccctctacaatttgtatccaggcgtgtttgagaccgttgaaatgcttccctctaaagctggcatctggagagtagagtgcttgatcggagaacatcttcacgcaggtatgagcaccttgttcctcgtgtacagcaacaaatgtcagaatccacttggcatggccagtggacacattcgcgactttcagatcacagcatctggccagtatggacaatgggccccaaagttggctcgcctccattactccggtagcataaatgcgtggtccactaaagaacctttcagctggattaaggtcgatcttcttgcccccatgatcatccacggcattaagacacagggagcgaggcagaaattctcctccctctacatctcacagttcattattatgtatagtttggacggcaagaagtggcaaacttatagaggtaacagtactggaacagacatggtgttcttcggcaacgttgatagctctggcatcaaacacaacatctttaatcctcccataatagctcggtacatcagattgcatccgacccactacagcattaggagtacactccgaatggagcttatgggttgcgacttgaattcctgttcaatgccactcggaatggagtctaaagccatctctgatgcacagataaccgccagtagctactttacgaacatgtttgctacgtggtcaccctctaaggcaaggcttcatttgcaaggccggtctaatgcctggagacctcaggtgaacaacccgaaagaatggctccaggtggactttcagaagaccatgaaagtaacaggtgtcactactcagggagttaagtccttggatactagcatgtatgtgaaggagttccttatttcctcatcacaagatggccaccagtggaccctcttctttcagaatggtaaggtcaaagtgtttcagggcaatcaagacagcttcacacccgtggtgaacagtcttgatcctccactcttgacacgataccttcgaatccatccacagtcttgggagcaccagattgcattgcgcatggaagtacttggatgcgaggctcaggacctctac

SEQ ID NO: 1772 - protein, 1457 aa, synthetic construct
  REGION 1..1457: note = Variant of human B-domain deleted Factor VIII
MQIELSTCFFLCLLRFCFSATRRYYLGAVELSWDYMQSDLGELPVDARFPPRVPKSFPFNTSQVYKKTLFVEFTDHLFNIAKPRPPWMGLLGPTIQAEVYDTVVITLKNMASHPVSLHAVGVSYWKASEGAEYDDQTSQREKEDDKVFPGGSHTYVWQVLKENGPMASDPPCLTYSYLSHVDLVKDLNSGLIGALLVCREGSLAKEKTQTLAKFILLFAVFDEGKSWHSETKNSLMQDRDAASARAWPKMHTVNGYVNRTLPGLIGCHRKSVYWHVIGMGTTPEVHSIFLEGHTFLVRNHRQASLGISPITFLTAQTLLRDLGQFLLFCHIPSHQHDGMEAYVKVDSCPEEPQLRMKNNEEAEDYDDDLTDSEMDVVRFDDDNSPSIIQARSGAKKHPKTWVHYIAAEEEDWDYAPLVLAPDDRSYKSQYLNNGPQRIGRKYKKVRFMAYTDETFKTREAIQHESGILGPLLYGEVGDTLLIIFKNQASRPYNIYPHGITDVRPLYSRRLPKGVKHLKDFPILPGEIFKYKWTITVEDGPTKSDPRCLTRYYSSFVNWERDLASGLIGPLLICYKESVDQRGNQIMSDKRNVILFSVFDENRSWYLTENIQRFLPNPAGVQLEDPEFQASNIMHSINGYVFDSLQLSVCLHEVAYWYILSIGAQTDFLSVFFSGYTFKHKGVYEDTLTLFPFSGETVFMSMENPGLWILGCHNSDFRNRGMTALLKVSSCDWNTGDYYEDSYEDISAYFDSKNNAIEPRSFSQNPPVLKRHQREGTRTTLQSDQEEIDYDDTISVEMKKEDFDIYDEDENQSPRSFQKKTRHYFIAAVERLWDYGMSSSPHVLRNRAQSGSVPQFKKVVFQEFTDGSFTQPLYRGELNEHLGLLGPYIRAEVEDNIMVTFRNQASRPYSFYSSLISYEEDQRQGAEPRKNFVKPNETKTYFWKVQHHMAPTKDEFDCKAWAYFSDVDLEKDVHSGLIGPLLVCHTNTLNPAHGRQVTVQEFALFFTIFDETKSWYFTENMERNCRAPCNIQMEDPTFKENYRFHAINGYIMDTLPGLVMAQDQRIRWYLLSMGSNENIHSIHFSGHVFTVRKGEEYKMALYNLYPGVFETVEMLPSKAGIWRVECLIGEHLHAGMSTLFLVYSNKCQNPLGMASGHIRDFQITASGQYGQWAPKLARLHYSGSINAWSTKEPFSWIKVDLLAPMIIHGIKTQGARQKFSSLYISQFIIMYSLDGKKWQTYRGNSTGTDMVFFGNVDSSGIKHNIFNPPIIARYIRLHPTHYSIRSTLRMELMGCDLNSCSMPLGMESKAISDAQITASSYFTNMFATWSPSKARLHLQGRSNAWRPQVNNPKEWLQVDFQKTMKVTGVTTQGVKSLDTSMYVKEFLISSSQDGHQWTLFFQNGKVKVFQGNQDSFTPVVNSLDPPLLTRYLRIHPQSWEHQIALRMEVLGCEAQDLY

SEQ ID NO: 1773 - DNA, 4371 bp, synthetic construct
  misc_feature 1..4371: note = Variant of human B-domain deleted Factor VIII
  source 1..4371: mol_type = other DNA
atgcagattgaactgtctacctgcttcttcctctgtttgctgaggttctgctttagcgccactagacggtactaccttggcgctgtggagctgtcctgggactatatgcagagtgatttgggagagcttcccgtcgacgcacgatttcctcctcgcgttccaaagtcatttccctttaacacaagccaggtgtacaagaagacgctcttcgtcgaattcaccgatcacctgttcaatatcgccaaacccagaccaccatggatgggtcttttggggcctaccatacaagcggaggtgtatgacacagttgttatcactctcaagaacatggcttctcatccggtaagtcttcacgcagtgggcgtgtcctactggaaagcttcagaaggagccgagtatgatgatcagacatcccagagggagaaagaagacgacaaggtatttccaggtgggtctcatacctatgtgtggcaagtgctcaaagagaatggccctatggcaagcgatccgccgtgtttgacttacagctacctttcacacgttgacctcgtcaaggacctcaactccgggttgattggagccttgttggtatgcagggaaggatctcttgccaaagagaagacacagaccctggccaagtttatccttctctttgctgtgttcgatgagggcaaaagttggcatagcgaaacgaagaattccctcatgcaggatcgcgacgcagccagcgccagagcttggcccaagatgcacactgtgaacggatatgtcaataggacgcttcctggcttgattgggtgtcatcggaaaagtgtctactggcacgtgatcggaatggggacaacaccagaggtccactccatatttctcgaaggccataccttccttgttcgaaaccacagacaggcatccttggggatctctcccattacctttctcactgcccaaacgctccttcgtgacttgggtcagttccttctcttttgccatatcccgtcacaccagcatgatggtatggaagcttatgtgaaagtcgacagttgtcctgaggagccacagttgcgcatgaagaataatgaagaagccgaggattacgacgacgatctcaccgattctgagatggacgtggtgaggtttgatgacgacaactctccctccatcattcaagctcggagcggggcgaagaaacaccccaagacttgggtccactatatagcggcggaagaggaggattgggattacgctcctcttgtattggcaccagatgaccgctcatacaaaagccagtacctcaacaacggaccgcagagaattggccggaagtataagaaagtgcgatttatggcctatacagacgaaacctttaagacaagggaggccatccagcatgagagtgggattttgggacctcttctttacggcgaagttggtgataccctcctcatcatcttcaagaatcaagcttctcgcccctataacatttacccacacgggatcactgacgttaggcctttgtatagcagaagacttcccaaaggcgtgaagcatctcaaagacttccccattttgccaggcgagatctttaagtacaaatggaccattacagtggaagatggaccgactaaatcagaccctcgatgccttacgcggtactattcctccttcgtgaattgggagagagatttggcaagcggactcataggaccactcctcatctgttacaaggaatctgtagaccagaggggtaaccagattatgagtgataaacgcaatgtgatcctttttagcgtcttcgacgagaaccggtcctggtacttgaccgagaatatacaaaggttccttcccaaccccgcaggcgttcagttggaagaccctgagtttcaggccagcaatattatgcactcaatcaacggctatgtgtttgatagtctccagctttctgtttgcctccatgaagtagcctattggtacatcttgtcaattggtgctcaaacagacttcctctccgtcttcttctccggctacacctttaagcacaagggcgtgtatgaggacactctcacactctttccattttctggagaaaccgtgttcatgagcatggagaatccaggcctttggatcttgggttgccacaacagtgattttcgcaatcggggaatgactgctctcctcaaagtcagcagctgtgattggaacacaggcgactattacgaagattcttacgaggcgataagtgcctactttgactccaagaataacgccattgagcccagatcattctcccagaatcctcccgtgcttaaaaggcatcagcgcgaaggtaccagaactactcttcagtctgatcaagaggagattgactatgacgacaccattagcgtggaaatgaagaaggaggatttcgatatctatgacgaagatgagaaccagtctccgcggagctttcagaagaagacgcgacactacttcattgcagcagtcgaaaggctttgggactacggtatgtcatcatcccctcatgtgttgcgcaatagagctcagagtggaagtgttccacagttcaagaaagtcgtctttcaagagtttacagatggcagcttcacacagcctctctatcggggcgagcttaacgaacatttgggactccttggtccctatatccgagccgaagtggaggacaacattatggttacctttaggaatcaagcctctcgcccctacagcttctactcctccctcatcagttatgaggaggatcagagacaaggcgctgaaccacggaagaactttgtgaaaccgaatgagacgaagacctacttctggaaagtacagcaccacatggcccccacaaaagacgaattcgattgcaaagcatgggcgtatttttcagacgttgacttggagaaagatgtacattcaggacttattggtcctttgttggtgtgtcacactaacactctcaatccagcccatggcaggcaggtgacagtccaggaattcgctcttttctttaccatctttgatgagaccaagtcctggtacttcacggaaaacatggagcgcaattgcagagccccctgtaacatacagatggaggaccctacctttaaggaaaattatcggttccacgcaatcaacggatacattatggatacactccctggccttgtgatggctcaggaccaacgaatcaggtggtacctcctcagcatgggttctaatgagaacatacactccattcacttttcaggacatgtgttcactgtccggaagaaagaagagtataagatggccctctacaatttgtatccaggcgtgtttgagaccgttgaaatgcttccctctaaagctggcatctggagagtagagtgcttgatcggagaacatcttcacgcaggtatgagcaccttgttcctcgtgtacagcaacaaatgtcagaatccacttggcatggccagtggacacattcgcgactttcagatcacagcatctggccagtatggacaatgggccccaaagttggctcgcctccattactccggtagcataaatgcgtggtccactaaagaacctttcagctggattaaggtcgatcttcttgcccccatgatcatccacggcattaagacacagggagcgaggcagaaattctcctccctctacatctcacagttcattattatgtatagtttggacggcaagaagtggcaaacttatagaggtaacagtactggaacagacatggtgttcttcggcaacgttgatagctctggcatcaaacacaacatctttaatcctcccataatagctcggtacatcagattgcatccgacccactacagcattaggagtacactccgaatggagcttatgggttgcgacttgaattcctgttcaatgccactcggaatggagtctaaagccatctctgatgcacagataaccgccagtagctactttacgaacatgtttgctacgtggtcaccctctaaggcaaggcttcatttgcaaggccggtctaatgcctggagacctcaggtgaacaacccgaaagaatggctccaggtggactttcagaagaccatgaaagtaacaggtgtcactactcagggagttaagtccttggatactagcatgtatgtgaaggagttccttatttcctcatcacaagatggccaccagtggaccctcttctttcagaatggtaaggtcaaagtgtttcagggcaatcaagacagcttcacacccgtggtgaacagtcttgatcctccactcttgacacgataccttcgaatccatccacagtcttgggagcaccagattgcattgcgcatggaagtacttggatgcgaggctcaggacctctac

SEQ ID NO: 1774 - protein, 1457 aa, synthetic construct
  REGION 1..1457: note = Variant of human B-domain deleted Factor VIII
MQIELSTCFFLCLLRFCFSATRRYYLGAVELSWDYMQSDLGELPVDARFPPRVPKSFPFNTSQVYKKTLFVEFTDHLFNIAKPRPPWMGLLGPTIQAEVYDTVVITLKNMASHPVSLHAVGVSYWKASEGAEYDDQTSQREKEDDKVFPGGSHTYVWQVLKENGPMASDPPCLTYSYLSHVDLVKDLNSGLIGALLVCREGSLAKEKTQTLAKFILLFAVFDEGKSWHSETKNSLMQDRDAASARAWPKMHTVNGYVNRTLPGLIGCHRKSVYWHVIGMGTTPEVHSIFLEGHTFLVRNHRQASLGISPITFLTAQTLLRDLGQFLLFCHIPSHQHDGMEAYVKVDSCPEEPQLRMKNNEEAEDYDDDLTDSEMDVVRFDDDNSPSIIQARSGAKKHPKTWVHYIAAEEEDWDYAPLVLAPDDRSYKSQYLNNGPQRIGRKYKKVRFMAYTDETFKTREAIQHESGILGPLLYGEVGDTLLIIFKNQASRPYNIYPHGITDVRPLYSRRLPKGVKHLKDFPILPGEIFKYKWTITVEDGPTKSDPRCLTRYYSSFVNWERDLASGLIGPLLICYKESVDQRGNQIMSDKRNVILFSVFDENRSWYLTENIQRFLPNPAGVQLEDPEFQASNIMHSINGYVFDSLQLSVCLHEVAYWYILSIGAQTDFLSVFFSGYTFKHKGVYEDTLTLFPFSGETVFMSMENPGLWILGCHNSDFRNRGMTALLKVSSCDWNTGDYYEDSYEAISAYFDSKNNAIEPRSFSQNPPVLKRHQREGTRTTLQSDQEEIDYDDTISVEMKKEDFDIYDEDENQSPRSFQKKTRHYFIAAVERLWDYGMSSSPHVLRNRAQSGSVPQFKKVVFQEFTDGSFTQPLYRGELNEHLGLLGPYIRAEVEDNIMVTFRNQASRPYSFYSSLISYEEDQRQGAEPRKNFVKPNETKTYFWKVQHHMAPTKDEFDCKAWAYFSDVDLEKDVHSGLIGPLLVCHTNTLNPAHGRQVTVQEFALFFTIFDETKSWYFTENMERNCRAPCNIQMEDPTFKENYRFHAINGYIMDTLPGLVMAQDQRIRWYLLSMGSNENIHSIHFSGHVFTVRKKEEYKMALYNLYPGVFETVEMLPSKAGIWRVECLIGEHLHAGMSTLFLVYSNKCQNPLGMASGHIRDFQITASGQYGQWAPKLARLHYSGSINAWSTKEPFSWIKVDLLAPMIIHGIKTQGARQKFSSLYISQFIIMYSLDGKKWQTYRGNSTGTDMVFFGNVDSSGIKHNIFNPPIIARYIRLHPTHYSIRSTLRMELMGCDLNSCSMPLGMESKAISDAQITASSYFTNMFATWSPSKARLHLQGRSNAWRPQVNNPKEWLQVDFQKTMKVTGVTTQGVKSLDTSMYVKEFLISSSQDGHQWTLFFQNGKVKVFQGNQDSFTPVVNSLDPPLLTRYLRIHPQSWEHQIALRMEVLGCEAQDLY

SEQ ID NO: 1775 - DNA, 4371 bp, synthetic construct
  misc_feature 1..4371: note = Variant of human B-domain deleted Factor VIII
  source 1..4371: mol_type = other DNA
atgcagattgaactgtctacctgcttcttcctctgtttgctgaggttctgctttagcgccactagacggtactaccttggcgctgtggagctgtcctgggactatatgcagagtgatttgggagagcttcccgtcgacgcacgatttcctcctcgcgttccaaagtcatttccctttaacacaagccaggtgtacaagaagacgctcttcgtcgaattcaccgatcacctgttcaatatcgccaaacccagaccaccatggatgggtcttttggggcctaccatacaagcggaggtgtatgacacagttgttatcactctcaagaacatggcttctcatccggtaagtcttcacgcagtgggcgtgtcctactggaaagcttcagaaggagccgagtatgatgatcagacatcccagagggagaaagaagacgacaaggtatttccaggtgggtctcatacctatgtgtggcaagtgctcaaagagaatggccctatggcaagcgatccgccgtgtttgacttacagctacctttcacacgttgacctcgtcaaggacctcaactccgggttgattggagccttgttggtatgcagggaaggatctcttgccaaagagaagacacagaccctggccaagtttatccttctctttgctgtgttcgatgagggcaaaagttggcatagcgaaacgaagaattccctcatgcaggatcgcgacgcagccagcgccagagcttggcccaagatgcacactgtgaacggatatgtcaataggacgcttcctggcttgattgggtgtcatcggaaaagtgtctactggcacgtgatcggaatggggacaacaccagaggtccactccatatttctcgaaggccataccttccttgttcgaaaccacagacaggcatccttggggatctctcccattacctttctcactgcccaaacgctccttcgtgacttgggtcagttccttctcttttgccatatcccgtcacaccagcatgatggtatggaagcttatgtgaaagtcgacagttgtcctgaggagccacagttgcgcatgaagaataatgaagaagccgaggattacgacgacgatctcaccgattctgagatggacgtggtgaggtttgatgacgacaactctccctccatcattcaagctcggagcggggcgaagaaacaccccaagacttgggtccactatatagcggcggaagaggaggattgggattacgctcctcttgtattggcaccagatgaccgctcatacaaaagccagtacctcaacaacggaccgcagagaattggccggaagtataagaaagtgcgatttatggcctatacagacgaaacctttaagacaagggaggccatccagcatgagagtgggattttgggacctcttctttacggcgaagttggtgataccctcctcatcatcttcaagaatcaagcttctcgcccctataacatttacccacacgggatcactgacgttaggcctttgtatagcagaagacttcccaaaggcgtgaagcatctcaaagacttccccattttgccaggcgagatctttaagtacaaatggaccattacagtggaagatggaccgactaaaggggaccctcgatgccttacgcggtactattcctccttcgtgaattgggagagagatttggcaagcggactcataggaccactcctcatctgttacaaggaatctgtagaccagaggggtaaccagattatgagtgataaacgcaatgtgatcctttttagcgtcttcgacgagaaccggtcctggtacttgaccgagaatatacaaaggttccttcccaaccccgcaggcgttcagttggaagaccctgagtttcaggccagcaatattatgcactcaatcaacggctatgtgtttgatagtctccagctttctgtttgcctccatgaagtagcctattggtacatcttgtcaattggtgctcaaacagacttcctctccgtcttcttctccggctacacctttaagcacaagggcgtgtatgaggacactctcacactctttccattttctggagaaaccgtgttcatgagcatggagaatccaggcctttggatcttgggttgccacaacagtgattttcgcaatcggggaatgactgctctcctcaaagtcagcagctgtgattggaacacaggcgactattacgaagattcttacgaggacataagtgcctactttgactccaagaataacgccattgagcccagatcattctcccagaatcctcccgtgcttaaaaggcatcagcgcgaaggtaccagaactactcttcagtctgatcaagaggagattgactatgacgacaccattagcgtggaaatgaagaaggaggatttcgatatctatgacgaagatgagaaccagtctccgcggagctttcagaagaagacgcgacactacttcattgcagcagtcgaaaggctttgggactacggtatgtcatcatcccctcatgtgttgcgcaatagagctcagagtggaagtgttccacagttcaagaaagtcgtctttcaagagtttacagatggcagcttcacacagcctctctatcggggcgagcttaacgaacatttgggactccttggtccctatatccgagccgaggtggaggacaacattatggttacctttaggaatcaagcctctcgcccctacagcttctactcctccctcatcagttatgaggaggatcagagacaaggcgctgaaccacggaagaactttgtgaaaccgaatgagacgaagacctacttctggaaagtacagcaccacatggcccccacaaaagacgaattcgattgcaaagcatgggcgtatttttcagacgttgacttggagaaagatgtacattcaggacttattggtcctttgttggtgtgtcacactaacactctcaatccagcccatggcaggcaggtgacagtccaggaattcgctcttttctttaccatctttgatgagaccaagtcctggtacttcacggaaaacatggagcgcaattgcagagccccctgtaacatacagatggaggaccctacctttaaggaaaattatcggttccacgcaatcaacggatacattatggatacactccctggccttgtgatggctcaggaccaacgaatcaggtggtacctcctcagcatgggttctaatgagaacatacactccattcacttttcaggacatgtgttcactgtccggaagaaagaagagtataagatggccctctacaatttgtatccaggcgtgtttgagaccgttgaaatgcttccctctaaagctggcatctggagagtagagtgcttgatcggagaacatcttcacgcaggtatgagcaccttgttcctcgtgtacagcaacaaatgtcagaatccacttggcatggccagtggacacattcgcgactttcagatcacagcatctggccagtatggacaatgggccccaaagttggctcgcctccattactccggtagcataaatgcgtggtccactaaagaacctttcagctggattaaggtcgatcttcttgcccccatgatcatccacggcattaagacacagggagcgaggcagaaattctcctccctctacatctcacagttcattattatgtatagtttggacggcaagaagtggcaaacttatagaggtaacagtactggaacagacatggtgttcttcggcaacgttgatagctctggcatcaaacacaacatctttaatcctcccataatagctcggtacatcagattgcatccgacccactacagcattaggagtacactccgaatggagcttatgggttgcgacttgaattcctgttcaatgccactcggaatggagtctaaagccatctctgatgcacagataaccgccagtagctactttacgaacatgtttgctacgtggtcaccctctaaggcaaggcttcatttgcaaggccggtctaatgcctggagacctcaggtgaacaacccgaaagaatggctccaggtggactttcagaagaccatgaaagtaacaggtgtcactactcagggagttaagtccttggatactagcatgtatgtgaaggagttccttatttcctcatcacaagatggccaccagtggaccctcttctttcagaatggtaaggtcaaagtgtttcagggcaatcaagacagcttcacacccgtggtgaacagtcttgatcctccactcttgacacgataccttcgaatccatccacagtcttgggagcaccagattgcattgcgcatggaagtacttggatgcgaggctcaggacctctac

SEQ ID NO: 1776 - protein, 1457 aa, synthetic construct
  REGION 1..1457: note = Variant of human B-domain deleted Factor VIII
MQIELSTCFFLCLLRFCFSATRRYYLGAVELSWDYMQSDLGELPVDARFPPRVPKSFPFNTSQVYKKTLFVEFTDHLFNIAKPRPPWMGLLGPTIQAEVYDTVVITLKNMASHPVSLHAVGVSYWKASEGAEYDDQTSQREKEDDKVFPGGSHTYVWQVLKENGPMASDPPCLTYSYLSHVDLVKDLNSGLIGALLVCREGSLAKEKTQTLAKFILLFAVFDEGKSWHSETKNSLMQDRDAASARAWPKMHTVNGYVNRTLPGLIGCHRKSVYWHVIGMGTTPEVHSIFLEGHTFLVRNHRQASLGISPITFLTAQTLLRDLGQFLLFCHIPSHQHDGMEAYVKVDSCPEEPQLRMKNNEEAEDYDDDLTDSEMDVVRFDDDNSPSIIQARSGAKKHPKTWVHYIAAEEEDWDYAPLVLAPDDRSYKSQYLNNGPQRIGRKYKKVRFMAYTDETFKTREAIQHESGILGPLLYGEVGDTLLIIFKNQASRPYNIYPHGITDVRPLYSRRLPKGVKHLKDFPILPGEIFKYKWTITVEDGPTKGDPRCLTRYYSSFVNWERDLASGLIGPLLICYKESVDQRGNQIMSDKRNVILFSVFDENRSWYLTENIQRFLPNPAGVQLEDPEFQASNIMHSINGYVFDSLQLSVCLHEVAYWYILSIGAQTDFLSVFFSGYTFKHKGVYEDTLTLFPFSGETVFMSMENPGLWILGCHNSDFRNRGMTALLKVSSCDWNTGDYYEDSYEDISAYFDSKNNAIEPRSFSQNPPVLKRHQREGTRTTLQSDQEEIDYDDTISVEMKKEDFDIYDEDENQSPRSFQKKTRHYFIAAVERLWDYGMSSSPHVLRNRAQSGSVPQFKKVVFQEFTDGSFTQPLYRGELNEHLGLLGPYIRAEVEDNIMVTFRNQASRPYSFYSSLISYEEDQRQGAEPRKNFVKPNETKTYFWKVQHHMAPTKDEFDCKAWAYFSDVDLEKDVHSGLIGPLLVCHTNTLNPAHGRQVTVQEFALFFTIFDETKSWYFTENMERNCRAPCNIQMEDPTFKENYRFHAINGYIMDTLPGLVMAQDQRIRWYLLSMGSNENIHSIHFSGHVFTVRKKEEYKMALYNLYPGVFETVEMLPSKAGIWRVECLIGEHLHAGMSTLFLVYSNKCQNPLGMASGHIRDFQITASGQYGQWAPKLARLHYSGSINAWSTKEPFSWIKVDLLAPMIIHGIKTQGARQKFSSLYISQFIIMYSLDGKKWQTYRGNSTGTDMVFFGNVDSSGIKHNIFNPPIIARYIRLHPTHYSIRSTLRMELMGCDLNSCSMPLGMESKAISDAQITASSYFTNMFATWSPSKARLHLQGRSNAWRPQVNNPKEWLQVDFQKTMKVTGVTTQGVKSLDTSMYVKEFLISSSQDGHQWTLFFQNGKVKVFQGNQDSFTPVVNSLDPPLLTRYLRIHPQSWEHQIALRMEVLGCEAQDLY

SEQ ID NO: 1777 - DNA, 4371 bp, synthetic construct
  misc_feature 1..4371: note = Variant of human B-domain deleted Factor VIII
  source 1..4371: mol_type = other DNA
atgcagattgaactgtctacctgcttcttcctctgtttgctgaggttctgctttagcgccactagacggtactaccttggcgctgtggagctgtcctgggactatatgcagagtgatttgggagagcttcccgtcgacgcacgatttcctcctcgcgttccaaagtcatttccctttaacacaagccaggtgtacaagaagacgctcttcgtcgaattcaccgatcacctgttcaatatcgccaaacccagaccaccatggatgggtcttttggggcctaccatacaagcggaggtgtatgacacagttgttatcactctcaagaacatggcttctcatccggtaagtcttcacgcagtgggcgtgtcctactggaaagcttcagaaggagccgagtatgatgatcagacatcccagagggagaaagaagacgacaaggtatttccaggtgggtctcatacctatgtgtggcaagtgctcaaagagaatggccctatggcaagcgatccgccgtgtttgacttacagctacctttcacacgttgacctcgtcaaggacctcaactccgggttgattggagccttgttggtatgcagggaaggatctcttgccaaagagaagacacagaccctggccaagtttatccttctctttgctgtgttcgatgagggcaaaagttggcatagcgaaacgaagaattccctcatgcaggatcgcgacgcagccagcgccagagcttggcccaagatgcacactgtgaacggatatgtcaataggacgcttcctggcttgattgggtgtcatcggaaaagtgtctactggcacgtgatcggaatggggacaacaccagaggtccactccatatttctcgaaggccataccttccttgttcgaaaccacagacaggcatccttggggatctctcccattacctttctcactgcccaaacgctccttcgtgacttgggtcagttccttctcttttgccatatcccgtcacaccagcatgatggtatggaagcttatgtgaaagtcgacagttgtcctgaggagccacagttgcgcatgaagaataatgaagaagccgaggattacgacgacgatctcaccgattctgagatggacgtggtgaggtttgatgacgacaactctccctccatcattcaagctcggagcggggcgaagaaacaccccaagacttgggtccactatatagcggcggaagaggaggattgggattacgctcctcttgtattggcaccagatgaccgctcatacaaaagccagtacctcaacaacggaccgcagagaattggccggaagtataagaaagtgcgatttatggcctatacagacgaaacctttaagacaagggaggccatccagcatgagagtgggattttgggacctcttctttacggcgaagttggtgataccctcctcatcatcttcaagaatcaagcttctcgcccctataacatttacccacacgggatcactgacgttaggcctttgtatagcagaagacttcccaaaggcgtgaagcatctcaaagacttccccattttgccaggcgagatctttaagtacaaatggaccattacagtggaagatggaccgactaaatcagaccctcgatgccttacgcggtactattcctccttcgtgaattgggagagagatttggcaagcggactcataggaccactcctcatctgttacaaggaatctgtagaccagaggggtaaccagattatgagtgataaacgcaatgtgatcctttttagcgtcttcgacgagaaccggtcctggtacttgaccgagaatatacaaaggttccttcccaaccccgcaggcgttcagttggaagaccctgagtttcaggccagcaatattatgcactcaatcaacggctatgtgtttgatagtctccagctttctgtttgcctccatgaagtagcctattggtacatcttgtcaattggtgctcaaacagacttcctctccgtcttcttctccggctacacctttaagcacaagggcgtgtatgaggacactctcacactctttccattttctggagaaaccgtgttcatgagcatggagaatccaggcctttggatcttgggttgccacaacagtgattttcgcaatcggggaatgactgctctcctcaaagtcagcagctgtgattggaacacaggcgactattacgaagattcttacgaggacataagtgcctactttgactccaagaataacgccattgagcccagatcattctcccagaatcctcccgtgcttaaaaggcatcagcgcgaaggtaccagaactactcttcagtctgatcaagaggagattgactatgacgacaccattagcgtggaaatgaagaaggaggatttcgatatctatgacgaagatgagaaccagtctccgcggagctttcagaagaagacgcgacactacttcattgcagcagtcgaaaggctttgggactacggtatgtcatcatcccctcatgtgttgcgcaatagagctcagagtggaagtgttccacagttcaagaaagtcgtctttcaagagtttacagatggcagcttcacacagcctctctatcggggcgagcttaacgaacatttgggactccttggtccctatatccgagccgaagtggaggacaacattatggttacctttaggaatcaagcctctcgcccctacagcttctactcctccctcatcagttatgaggaggatcagagacaaggcgctgaaccacggaagaactttgtgaaaccgaatgagacgaagacctacttctggaaagtacagcaccacatggcccccacaaaagacgaattcgattgcaaagcatgggcgtatttttcagacgttgacttggagaaagatgtacattcaggacttattggtcctttgttggtgtgtcacactaacactctcaatccagcccatggcaggcaggtgacagtccaggaattcgctcttttctttaccatctttgatgagaccaagtcctggtacttcacggaaaacatggagcgcaattgcagagccccctgtaacatacagatggaggaccctacctttaaggaaaattatcggttccacgcaatcaacggatacattatggatacactccctggccttgtgatggctcaggaccaacgaatcaggtggtacctcctcagcatgggttctaatgagaacatacactccattcacttttcaggacatgtgttcactgtccggaagaaagaagagtataagggggccctctacaatttgtatccaggcgtgtttgagaccgttgaaatgcttccctctaaagctggcatctggagagtagagtgcttgatcggagaacatcttcacgcaggtatgagcaccttgttcctcgtgtacagcaacaaatgtcagaatccacttggcatggccagtggacacattcgcgactttcagatcacagcatctggccagtatggacaatgggccccaaagttggctcgcctccattactccggtagcataaatgcgtggtccactaaagaacctttcagctggattaaggtcgatcttcttgcccccatgatcatccacggcattaagacacagggagcgaggcagaaattctcctccctctacatctcacagttcattattatgtatagtttggacggcaagaagtggcaaacttatagaggtaacagtactggaacagacatggtgttcttcggcaacgttgatagctctggcatcaaacacaacatctttaatcctcccataatagctcggtacatcagattgcatccgacccactacagcattaggagtacactccgaatggagcttatgggttgcgacttgaattcctgttcaatgccactcggaatggagtctaaagccatctctgatgcacagataaccgccagtagctactttacgaacatgtttgctacgtggtcaccctctaaggcaaggcttcatttgcaaggccggtctaatgcctggagacctcaggtgaacaacccgaaagaatggctccaggtggactttcagaagaccatgaaagtaacaggtgtcactactcagggagttaagtccttggatactagcatgtatgtgaaggagttccttatttcctcatcacaagatggccaccagtggaccctcttctttcagaatggtaaggtcaaagtgtttcagggcaatcaagacagcttcacacccgtggtgaacagtcttgatcctccactcttgacacgataccttcgaatccatccacagtcttgggagcaccagattgcattgcgcatggaagtacttggatgcgaggctcaggacctctac

SEQ ID NO: 1778 - protein, 1457 aa, synthetic construct
  REGION 1..1457: note = Variant of human B-domain deleted Factor VIII
MQIELSTCFFLCLLRFCFSATRRYYLGAVELSWDYMQSDLGELPVDARFPPRVPKSFPFNTSQVYKKTLFVEFTDHLFNIAKPRPPWMGLLGPTIQAEVYDTVVITLKNMASHPVSLHAVGVSYWKASEGAEYDDQTSQREKEDDKVFPGGSHTYVWQVLKENGPMASDPPCLTYSYLSHVDLVKDLNSGLIGALLVCREGSLAKEKTQTLAKFILLFAVFDEGKSWHSETKNSLMQDRDAASARAWPKMHTVNGYVNRTLPGLIGCHRKSVYWHVIGMGTTPEVHSIFLEGHTFLVRNHRQASLGISPITFLTAQTLLRDLGQFLLFCHIPSHQHDGMEAYVKVDSCPEEPQLRMKNNEEAEDYDDDLTDSEMDVVRFDDDNSPSIIQARSGAKKHPKTWVHYIAAEEEDWDYAPLVLAPDDRSYKSQYLNNGPQRIGRKYKKVRFMAYTDETFKTREAIQHESGILGPLLYGEVGDTLLIIFKNQASRPYNIYPHGITDVRPLYSRRLPKGVKHLKDFPILPGEIFKYKWTITVEDGPTKSDPRCLTRYYSSFVNWERDLASGLIGPLLICYKESVDQRGNQIMSDKRNVILFSVFDENRSWYLTENIQRFLPNPAGVQLEDPEFQASNIMHSINGYVFDSLQLSVCLHEVAYWYILSIGAQTDFLSVFFSGYTFKHKGVYEDTLTLFPFSGETVFMSMENPGLWILGCHNSDFRNRGMTALLKVSSCDWNTGDYYEDSYEDISAYFDSKNNAIEPRSFSQNPPVLKRHQREGTRTTLQSDQEEIDYDDTISVEMKKEDFDIYDEDENQSPRSFQKKTRHYFIAAVERLWDYGMSSSPHVLRNRAQSGSVPQFKKVVFQEFTDGSFTQPLYRGELNEHLGLLGPYIRAEVEDNIMVTFRNQASRPYSFYSSLISYEEDQRQGAEPRKNFVKPNETKTYFWKVQHHMAPTKDEFDCKAWAYFSDVDLEKDVHSGLIGPLLVCHTNTLNPAHGRQVTVQEFALFFTIFDETKSWYFTENMERNCRAPCNIQMEDPTFKENYRFHAINGYIMDTLPGLVMAQDQRIRWYLLSMGSNENIHSIHFSGHVFTVRKKEEYKGALYNLYPGVFETVEMLPSKAGIWRVECLIGEHLHAGMSTLFLVYSNKCQNPLGMASGHIRDFQITASGQYGQWAPKLARLHYSGSINAWSTKEPFSWIKVDLLAPMIIHGIKTQGARQKFSSLYISQFIIMYSLDGKKWQTYRGNSTGTDMVFFGNVDSSGIKHNIFNPPIIARYIRLHPTHYSIRSTLRMELMGCDLNSCSMPLGMESKAISDAQITASSYFTNMFATWSPSKARLHLQGRSNAWRPQVNNPKEWLQVDFQKTMKVTGVTTQGVKSLDTSMYVKEFLISSSQDGHQWTLFFQNGKVKVFQGNQDSFTPVVNSLDPPLLTRYLRIHPQSWEHQIALRMEVLGCEAQDLY

SEQ ID NO: 1779 - DNA, 4371 bp, synthetic construct
  misc_feature 1..4371: note = Variant of human B-domain deleted Factor VIII
  source 1..4371: mol_type = other DNA
atgcagattgaactgtctacctgcttcttcctctgtttgctgaggttctgctttagcgccactagacggtactaccttggcgctgtggagctgtcctgggactatatgcagagtgatttgggagagcttcccgtcgacgcacgatttcctcctcgcgttccaaagtcatttccctttaacacaagccaggtgtacaagaagacgctcttcgtcgaattcaccgatcacctgttcaatatcgccaaacccagaccaccatggatgggtcttttggggcctaccatacaagcggaggtgtatgacacagttgttatcactctcaagaacatggcttctcatccggtaagtcttcacgcagtgggcgtgtcctactggaaagcttcagaaggagccgagtatgatgatcagacatcccagagggagaaagaagacgacaaggtatttccaggtgggtctcatacctatgtgtggcaagtgctcaaagagaatggccctatggcaagcgatccgccgtgtttgacttacagctacctttcacacgttgacctcgtcaaggacctcaactccgggttgattggagccttgttggtatgcagggaaggatctcttgccaaagagaagacacagaccctggccaagtttatccttctctttgctgtgttcgatgagggcaaaagttggcatagcgaaacgaagaattccctcatgcaggatcgcgacgcagccagcgccagagcttggcccaagatgcacactgtgaacggatatgtcaataggacgcttcctggcttgattgggtgtcatcggaaaagtgtctactggcacgtgatcggaatggggagtacaccagaggtccactccatatttctcgaaggccataccttccttgttcgaaaccacagacaggcatccttggggatctctcccattacctttctcactgcccaaacgctccttcgtgacttgggtcagttccttctcttttgccatatcccgtcacaccagcatgatggtatggaagcttatgtgaaagtcgacagttgtcctgaggagccacagttgcgcatgaagaataatgaagaagccgaggattacgacgacgatctcaccgattctgagatggacgtggtgaggtttgatgacgacaactctccctccatcattcaagctcggagcggggcgaagaaacaccccaagacttgggtccactatatagcggcggaagaggaggattgggattacgctcctcttgtattggcaccagatgaccgctcatacaaaagccagtacctcaacaacggaccgcagagaattggccggaagtataagaaagtgcgatttatggcctatacagacgaaacctttaagacaagggaggccatccagcatgagagtgggattttgggacctcttctttacggcgaagttggtgataccctcctcatcatcttcaagaatcaagcttctcgcccctataacatttacccacacgggatcactgacgttaggcctttgtatagcagaagacttcccaaaggcgtgaagcatctcaaagacttccccattttgccaggcgagatctttaagtacaaatggaccattacagtggaagatggaccgactaaatcagaccctcgatgccttacgcggtactattcctccttcgtgaattgggagagagatttggcaagcggactcataggaccactcctcatctgttacaaggaatctgtagaccagaggggtaaccagattatgagtgataaacgcaatgtgatcctttttagcgtcttcgacgagaaccggtcctggtacttgaccgagaatatacaaaggttccttcccaaccccgcaggcgttcagttggaagaccctgagtttcaggccagcaatattatgcactcaatcaacggctatgtgtttgatagtctccagctttctgtttgcctccatgaagtagcctattggtacatcttgtcaattggtgctcaaacagacttcctctccgtcttcttctccggctacacctttaagcacaagggcgtgtatgaggacactctcacactctttccattttctggagaaaccgtgttcatgagcatggagaatccaggcctttggatcttgggttgccacaacagtgattttcgcaatcggggaatgactgctctcctcaaagtcagcagctgtgattggaacacaggcgactattacgaagattcttacgaggacataagtgcctactttgactccaagaataacgccattgagcccagatcattctcccagaatcctcccgtgcttaaaaggcatcagcgcgaaggtaccagaactactcttcagtctgatcaagaggagattgactatgacgacaccattagcgtggaaatgaagaaggaggatttcgatatctatgacgaagatgagaaccagtctccgcggagctttcagaagaagacgcgacactacttcattgcagcagtcgaaaggctttgggactacggtatgtcatcatcccctcatgtgttgcgcaatagagctcagagtggaagtgttccacagttcaagaaagtcgtctttcaagagtttacagatggcagcttcacacagcctctctatcggggcgagcttaacgaacatttgggactccttggtccctatatccgagccgaagtggaggacaacattatggttacctttaggaatcaagcctctcgcccctacagcttctactcctccctcatcagttatgaggaggatcagagacaaggcgctgaaccacggaagaactttgtgaaaccgaatgagacgaagacctacttctggaaagtacagcaccacatggcccccacaaaagacgaattcgattgcaaagcatgggcgtatttttcagacgttgacttggagaaagatgtacattcaggacttattggtcctttgttggtgtgtcacactaacactctcaatccagcccatggcaggcaggtgacagtccaggaattcgctcttttctttaccatctttgatgagaccaagtcctggtacttcacggaaaacatggagcgcaattgcagagccccctgtaacatacagatggaggaccctacctttaaggaaaattatcggttccacgcaatcaacggatacattatggatacactccctggccttgtgatggctcaggaccaacgaatcaggtggtacctcctcagcatgggttctaatgagaacatacactccattcacttttcaggacatgtgttcactgtccggaagaaagaagagtataagatggccctctacaatttgtatccaggcgtgtttgagaccgttgaaatgcttccctctaaagctggcatctggagagtagagtgcttgatcggagaacatcttcacgcaggtatgagcaccttgttcctcgtgtacagcaacaaatgtcagaatccacttggcatggccagtggacacattcgcgactttcagatcacagcatctggccagtatggacaatgggccccaaagttggctcgcctccattactccggtagcataaatgcgtggtccactaaagaacctttcagctggattaaggtcgatcttcttgcccccatgatcatccacggcattaagacacagggagcgaggcagaaattctcctccctctacatctcacagttcattattatgtatagtttggacggcaagaagtggcaaacttatagaggtaacagtactggaacagacatggtgttcttcggcaacgttgatagctctggcatcaaacacaacatctttaatcctcccataatagctcggtacatcagattgcatccgacccactacagcattaggagtacactccgaatggagcttatgggttgcgacttgaattcctgttcaatgccactcggaatggagtctaaagccatctctgatgcacagataaccgccagtagctactttacgaacatgtttgctacgtggtcaccctctaaggcaaggcttcatttgcaaggccggtctaatgcctggagacctcaggtgaacaacccgaaagaatggctccaggtggactttcagaagaccatgaaagtaacaggtgtcactactcagggagttaagtccttggatactagcatgtatgtgaaggagttccttatttcctcatcacaagatggccaccagtggaccctcttctttcagaatggtaaggtcaaagtgtttcagggcaatcaagacagcttcacacccgtggtgaacagtcttgatcctccactcttgacacgataccttcgaatccatccacagtcttgggagcaccagattgcattgcgcatggaagtacttggatgcgaggctcaggacctctac

SEQ ID NO: 1780 - protein, 1457 aa, synthetic construct
  REGION 1..1457: note = Variant of human B-domain deleted Factor VIII
MQIELSTCFFLCLLRFCFSATRRYYLGAVELSWDYMQSDLGELPVDARFPPRVPKSFPFNTSQVYKKTLFVEFTDHLFNIAKPRPPWMGLLGPTIQAEVYDTVVITLKNMASHPVSLHAVGVSYWKASEGAEYDDQTSQREKEDDKVFPGGSHTYVWQVLKENGPMASDPPCLTYSYLSHVDLVKDLNSGLIGALLVCREGSLAKEKTQTLAKFILLFAVFDEGKSWHSETKNSLMQDRDAASARAWPKMHTVNGYVNRTLPGLIGCHRKSVYWHVIGMGSTPEVHSIFLEGHTFLVRNHRQASLGISPITFLTAQTLLRDLGQFLLFCHIPSHQHDGMEAYVKVDSCPEEPQLRMKNNEEAEDYDDDLTDSEMDVVRFDDDNSPSIIQARSGAKKHPKTWVHYIAAEEEDWDYAPLVLAPDDRSYKSQYLNNGPQRIGRKYKKVRFMAYTDETFKTREAIQHESGILGPLLYGEVGDTLLIIFKNQASRPYNIYPHGITDVRPLYSRRLPKGVKHLKDFPILPGEIFKYKWTITVEDGPTKSDPRCLTRYYSSFVNWERDLASGLIGPLLICYKESVDQRGNQIMSDKRNVILFSVFDENRSWYLTENIQRFLPNPAGVQLEDPEFQASNIMHSINGYVFDSLQLSVCLHEVAYWYILSIGAQTDFLSVFFSGYTFKHKGVYEDTLTLFPFSGETVFMSMENPGLWILGCHNSDFRNRGMTALLKVSSCDWNTGDYYEDSYEDISAYFDSKNNAIEPRSFSQNPPVLKRHQREGTRTTLQSDQEEIDYDDTISVEMKKEDFDIYDEDENQSPRSFQKKTRHYFIAAVERLWDYGMSSSPHVLRNRAQSGSVPQFKKVVFQEFTDGSFTQPLYRGELNEHLGLLGPYIRAEVEDNIMVTFRNQASRPYSFYSSLISYEEDQRQGAEPRKNFVKPNETKTYFWKVQHHMAPTKDEFDCKAWAYFSDVDLEKDVHSGLIGPLLVCHTNTLNPAHGRQVTVQEFALFFTIFDETKSWYFTENMERNCRAPCNIQMEDPTFKENYRFHAINGYIMDTLPGLVMAQDQRIRWYLLSMGSNENIHSIHFSGHVFTVRKKEEYKMALYNLYPGVFETVEMLPSKAGIWRVECLIGEHLHAGMSTLFLVYSNKCQNPLGMASGHIRDFQITASGQYGQWAPKLARLHYSGSINAWSTKEPFSWIKVDLLAPMIIHGIKTQGARQKFSSLYISQFIIMYSLDGKKWQTYRGNSTGTDMVFFGNVDSSGIKHNIFNPPIIARYIRLHPTHYSIRSTLRMELMGCDLNSCSMPLGMESKAISDAQITASSYFTNMFATWSPSKARLHLQGRSNAWRPQVNNPKEWLQVDFQKTMKVTGVTTQGVKSLDTSMYVKEFLISSSQDGHQWTLFFQNGKVKVFQGNQDSFTPVVNSLDPPLLTRYLRIHPQSWEHQIALRMEVLGCEAQDLY

SEQ ID NO: 1781 - DNA, 4371 bp, synthetic construct
  misc_feature 1..4371: note = Variant of human B-domain deleted Factor VIII
  source 1..4371: mol_type = other DNA
atgcagattgaactgtctacctgcttcttcctctgtttgctgaggttctgctttagcgccactagacggtactaccttggcgctgtggagctgtcctgggactatatgcagagtgatttgggagagcttcccgtcgacgcacgatttcctcctcgcgttccaaagtcatttccctttaacacaagccaggtgtacaagaagacgctcttcgtcgaattcaccgatcacctgttcaatatcgccaaacccagaccaccatggatgggtcttttggggcctaccatacaagcggaggtgtatgacacagttgttatcactctcaagaacatggcttctcatccggtaagtcttcacgcagtgggcgtgtcctactggaaagcttcagaaggagccgagtatgatgatcagacatcccagagggagaaagaagacgacaaggtatttccaggtgggtctcatacctatgtgtggcaagtgctcaaagagaatggccctatggcaagcgatccgccgtgtttgacttacagctacctttcacacgttgacctcgtcaaggacctcaactccgggttgattggagccttgttggtatgcagggaaggatctcttgccaaagagaagacacagaccctggccaagtttatccttctctttgctgtgttcgatgagggcaaaagttggcatagcgaaacgaagaattccctcatgcaggatcgcgacgcagccagcgccagagcttggcccaagatgcacactgtgaacggatatgtcaataggacgcttcctggcttgattgggtgtcatcggaaaagtgtctactggcacgtgatcggaatggggacaacaccagaggtccactccatatttctcgaaggccataccttccttgttcgaaaccacagacaggcatccttggggatctctcccattacctttctcactgcccaaacgctccttcgtgacttgggtcagttccttctcttttgccatatcccgtcacaccagcatgatggtatggaagcttatgtgaaagtcgacagttgtcctgaggagccacagttgcgcatgaagaataatgaagaagccgaggattacgacgacgatctcaccgattctgagatggacgtggtgaggtttgatgacgacaactctccctccatcattcaagctcggagcggggcgaagaaacaccccaagacttgggtccactatatagcggcggaagaggaggattgggattacgctcctcttgtattggcaccagatgaccgctcatacaaaagccagtacctcaacaacggaccgcagagaattggccggaagtataagaaagtgcgatttatggcctatacagacgaaacctttaagacaagggaggccatccagcatgagagtgggattttgggacctcttctttacggcgaagttggtgataccctcctcatcatcttcaagaatcaagcttctcgcccctataacatttacccacacgggatcactgacgttaggcctttgtatagcagaagacttcccaaaggcgtgaagcatctcaaagacttccccattttgccaggcgagatctttaagtacaaatggaccattacagtggaagatggaccgactaaatcagaccctcgatgccttacgcggtactattcctccttcgtgaattgggagagagatttggcaagcggactcataggaccactcctcatctgttacaaggaatctgtagaccagaggggtaaccagattatgagtgataaacgcaatgtgatcctttttagcgtcttcgacgagaaccggtcctggtacttgaccgagaatatacaaaggttccttcccaaccccgcaggcgttcagttggaagaccctgagtttcaggccagcaatattatgcactcaatcaacggctatgtgtttgatagtctccagctttctgtttgcctccatgaagtagcctattggtacatcttgtcaattggtgctcaaacagacttcctctccgtcttcttctccggctacacctttaagcacaagggcgtgtatgaggacactctcacactctttccattttctggagaaaccgtgttcatgagcatggagaatccaggcctttggatcttgggttgccacaacagtgattttcgcaatcggggaatgactgctctcctcaaagtcagcagctgtgattggaacacaggcgactattacgaagattcttacgaggacataagtgcctactttgactccaagaataacgccacggagcccagatcattctcccagaatcctcccgtgcttaaaaggcatcagcgcgaaggtaccagaactactcttcagtctgatcaagaggagattgactatgacgacaccattagcgtggaaatgaagaaggaggatttcgatatctatgacgaagatgagaaccagtctccgcggagctttcagaagaagacgcgacactacttcattgcagcagtcgaaaggctttgggactacggtatgtcatcatcccctcatgtgttgcgcaatagagctcagagtggaagtgttccacagttcaagaaagtcgtctttcaagagtttacagatggcagcttcacacagcctctctatcggggcgagcttaacgaacatttgggactccttggtccctatatccgagccgaagtggaggacaacattatggttacctttaggaatcaagcctctcgcccctacagcttctactcctccctcatcagttatgaggaggatcagagacaaggcgctgaaccacggaagaactttgtgaaaccgaatgagacgaagacctacttctggaaagtacagcaccacatggcccccacaaaagacgaattcgattgcaaagcatgggcgtatttttcagacgttgacttggagaaagatgtacattcaggacttattggtcctttgttggtgtgtcacactaacactctcaatccagcccatggcaggcaggtgacagtccaggaattcgctcttttctttaccatctttgatgagaccaagtcctggtacttcacggaaaacatggagcgcaattgcagagccccctgtaacatacagatggaggaccctacctttaaggaaaattatcggttccacgcaatcaacggatacattatggatacactccctggccttgtgatggctcaggaccaacgaatcaggtggtacctcctcagcatgggttctaatgagaacatacactccattcacttttcaggacatgtgttcactgtccggaagaaagaagagtataagatggccctctacaatttgtatccaggcgtgtttgagaccgttgaaatgcttccctctaaagctggcatctggagagtagagtgcttgatcggagaacatcttcacgcaggtatgagcaccttgttcctcgtgtacagcaacaaatgtcagaatccacttggcatggccagtggacacattcgcgactttcagatcacagcatctggccagtatggacaatgggccccaaagttggctcgcctccattactccggtagcataaatgcgtggtccactaaagaacctttcagctggattaaggtcgatcttcttgcccccatgatcatccacggcattaagacacagggagcgaggcagaaattctcctccctctacatctcacagttcattattatgtatagtttggacggcaagaagtggcaaacttatagaggtaacagtactggaacagacatggtgttcttcggcaacgttgatagctctggcatcaaacacaacatctttaatcctcccataatagctcggtacatcagattgcatccgacccactacagcattaggagtacactccgaatggagcttatgggttgcgacttgaattcctgttcaatgccactcggaatggagtctaaagccatctctgatgcacagataaccgccagtagctactttacgaacatgtttgctacgtggtcaccctctaaggcaaggcttcatttgcaaggccggtctaatgcctggagacctcaggtgaacaacccgaaagaatggctccaggtggactttcagaagaccatgaaagtaacaggtgtcactactcagggagttaagtccttggatactagcatgtatgtgaaggagttccttatttcctcatcacaagatggccaccagtggaccctcttctttcagaatggtaaggtcaaagtgtttcagggcaatcaagacagcttcacacccgtggtgaacagtcttgatcctccactcttgacacgataccttcgaatccatccacagtcttgggagcaccagattgcattgcgcatggaagtacttggatgcgaggctcaggacctctac

SEQ ID NO: 1782 - protein, 1457 aa, synthetic construct
  REGION 1..1457: note = Variant of human B-domain deleted Factor VIII
MQIELSTCFFLCLLRFCFSATRRYYLGAVELSWDYMQSDLGELPVDARFPPRVPKSFPFNTSQVYKKTLFVEFTDHLFNIAKPRPPWMGLLGPTIQAEVYDTVVITLKNMASHPVSLHAVGVSYWKASEGAEYDDQTSQREKEDDKVFPGGSHTYVWQVLKENGPMASDPPCLTYSYLSHVDLVKDLNSGLIGALLVCREGSLAKEKTQTLAKFILLFAVFDEGKSWHSETKNSLMQDRDAASARAWPKMHTVNGYVNRTLPGLIGCHRKSVYWHVIGMGTTPEVHSIFLEGHTFLVRNHRQASLGISPITFLTAQTLLRDLGQFLLFCHIPSHQHDGMEAYVKVDSCPEEPQLRMKNNEEAEDYDDDLTDSEMDVVRFDDDNSPSIIQARSGAKKHPKTWVHYIAAEEEDWDYAPLVLAPDDRSYKSQYLNNGPQRIGRKYKKVRFMAYTDETFKTREAIQHESGILGPLLYGEVGDTLLIIFKNQASRPYNIYPHGITDVRPLYSRRLPKGVKHLKDFPILPGEIFKYKWTITVEDGPTKSDPRCLTRYYSSFVNWERDLASGLIGPLLICYKESVDQRGNQIMSDKRNVILFSVFDENRSWYLTENIQRFLPNPAGVQLEDPEFQASNIMHSINGYVFDSLQLSVCLHEVAYWYILSIGAQTDFLSVFFSGYTFKHKGVYEDTLTLFPFSGETVFMSMENPGLWILGCHNSDFRNRGMTALLKVSSCDWNTGDYYEDSYEDISAYFDSKNNATEPRSFSQNPPVLKRHQREGTRTTLQSDQEEIDYDDTISVEMKKEDFDIYDEDENQSPRSFQKKTRHYFIAAVERLWDYGMSSSPHVLRNRAQSGSVPQFKKVVFQEFTDGSFTQPLYRGELNEHLGLLGPYIRAEVEDNIMVTFRNQASRPYSFYSSLISYEEDQRQGAEPRKNFVKPNETKTYFWKVQHHMAPTKDEFDCKAWAYFSDVDLEKDVHSGLIGPLLVCHTNTLNPAHGRQVTVQEFALFFTIFDETKSWYFTENMERNCRAPCNIQMEDPTFKENYRFHAINGYIMDTLPGLVMAQDQRIRWYLLSMGSNENIHSIHFSGHVFTVRKKEEYKMALYNLYPGVFETVEMLPSKAGIWRVECLIGEHLHAGMSTLFLVYSNKCQNPLGMASGHIRDFQITASGQYGQWAPKLARLHYSGSINAWSTKEPFSWIKVDLLAPMIIHGIKTQGARQKFSSLYISQFIIMYSLDGKKWQTYRGNSTGTDMVFFGNVDSSGIKHNIFNPPIIARYIRLHPTHYSIRSTLRMELMGCDLNSCSMPLGMESKAISDAQITASSYFTNMFATWSPSKARLHLQGRSNAWRPQVNNPKEWLQVDFQKTMKVTGVTTQGVKSLDTSMYVKEFLISSSQDGHQWTLFFQNGKVKVFQGNQDSFTPVVNSLDPPLLTRYLRIHPQSWEHQIALRMEVLGCEAQDLY

SEQ ID NO: 1783 - DNA, 4371 bp, synthetic construct
  misc_feature 1..4371: note = Variant of human B-domain deleted Factor VIII
  source 1..4371: mol_type = other DNA
atgcagattgaactgtctacctgcttcttcctctgtttgctgaggttctgctttagcgccactagacggtactaccttggcgctgtggagctgtcctgggactatatgcagagtgatttgggagagcttcccgtcgacgcacgatttcctcctcgcgttccaaagtcatttccctttaacacaagccaggtgtacaagaagacgctcttcgtcgaattcaccgatcacctgttcaatatcgccaaacccagaccaccatggatgggtcttttggggcctaccatacaagcggaggtgtatgacacagttgttatcactctcaagaacatggcttctcatccggtaagtcttcacgcagtgggcgtgtcctactggaaagcttcagaaggagccgagtatgatgatcagacatcccagagggagaaagaagacgacaaggtatttccaggtgggtctcatacctatgtgtggcaagtgctcaaagagaatggccctatggcaagcgatccgccgtgtttgacttacagctacctttcacacgttgacctcgtcaaggacctcaactccgggttgattggagccttgttggtatgcagggaaggatctcttgccaaagagaagacacagaccctggccaagtttatccttctctttgctgtgttcgatgagggcaaaagttggcatagcgaaacgaagaattccctcatgcaggatcgcgacgcagccagcgccagagcttggcccaagatgcacactgtgaacggatatgtcaataggacgcttcctggcttgattgggtgtcatcggaaaagtgtctactggcacgtgatcggaatggggacaacaccagaggtccactccatatttctcgaaggccataccttccttgttcgaaaccacagacaggcatccttggggatctctcccattacctttctcactgcccaaacgctccttcgtgacttgggtcagttccttctcttttgccatatcccgtcacaccagcatgatggtatggaagcttatgtgaaagtcgacagttgtcctgaggagccacagttgcgcatgaagaataatgaagaagccgaggattacgacgacgatctcaccgattctgagatggacgtggtgaggtttgatgacgacaactctccctccatcattcaagctcggagcggggcgaagaaacaccccaagacttgggtccactatatagcggcggaagaggaggattgggattacgctcctcttgtattggcaccagatgaccgctcatacaaaagccagtacctcaacaacggaccgcagagaattggccggaagtataagaaagtgcgatttatggcctatacagacgaaacctttaagacaagggaggccatccagcatgagagtgggattttgggacctcttctttacggcgaagttggtgataccctcctcatcatcttcaagaatcaagcttctcgcccctataacatttacccacacgggatcactgacgttaggcctttgtatagcagaagacttcccaaaggcgtgaagcatctcaaagacttccccattttgccaggcgagatctttaagtacaaatggaccattacagtggaagatggaccgactaaatcagaccctcgatgccttacgcggtactattcctccttcgtgaattgggagagagatttggcaagcggactcataggaccactcctcatctgttacaaggaatctgtagaccagaggggtaaccagattatgagtgataaacgcaatgtgatcctttttagcgtcttcgacgagaaccggtcctggtacttgaccgagaatatacaaaggttccttcccaaccccgcaggcgttcagttggaagaccctgagtttcaggccagcaatattatgcactcaatcaacggctatgtgtttgatagtctccagctttctgtttgcctccatgaagtagcctattggtacatcttgtcaattggtgctcaaacagacttcctctccgtcttcttctccggctacacctttaagcacaagggcgtgtatgaggacactctcacactctttccattttctggagaaaccgtgttcatgagcatggagaatccaggcctttggatcttgggttgccacaacagtgattttcgcaatcggggaatgactgctctcctcaaagtcagcagctgtgattggaacacaggcgactattacgaagattcttacgaggacataagtgcctactttgactccaagaataacgccattgagcccagatcattctcccagaatcctcccgtgcttaaaaggcatcagcgcgaaggtaccagaactactcttcagtctgatcaagaggagattgactatgacgacaccattagcgtggaaatgaagaaggaggatttcgatatctatgacgaagatgagaaccagtctccgcggagctttcagaagaagacgcgacactacttcattgcagcagtcgaaaggctttgggactacggtatgtcatcatcccctcatgtgttgcgcaatagagctcagagtggaagtgttccacagttcaagaaagtcgtctttcaagagtttacagatggcagcttcacacagcctctctatcggggcgagcttaacgaacatttgggactccttggtccctatatccgagccgaagtggaggacaacattatggttacctttaggaatcaagcctctcgcccctacagcttctactcctccctcatcagttatgaggaggatcagagacaaggcgctgaaccacggaagaactttgtgaaaccgaatgagacgaagacctacttctggaaagtacagcaccactctgcccccacaaaagacgaattcgattgcaaagcatgggcgtatttttcagacgttgacttggagaaagatgtacattcaggacttattggtcctttgttggtgtgtcacactaacactctcaatccagcccatggcaggcaggtgacagtccaggaattcgctcttttctttaccatctttgatgagaccaagtcctggtacttcacggaaaacatggagcgcaattgcagagccccctgtaacatacagatggaggaccctacctttaaggaaaattatcggttccacgcaatcaacggatacattatggatacactccctggccttgtgatggctcaggaccaacgaatcaggtggtacctcctcagcatgggttctaatgagaacatacactccattcacttttcaggacatgtgttcactgtccggaagaaagaagagtataagatggccctctacaatttgtatccaggcgtgtttgagaccgttgaaatgcttccctctaaagctggcatctggagagtagagtgcttgatcggagaacatcttcacgcaggtatgagcaccttgttcctcgtgtacagcaacaaatgtcagaatccacttggcatggccagtggacacattcgcgactttcagatcacagcatctggccagtatggacaatgggccccaaagttggctcgcctccattactccggtagcataaatgcgtggtccactaaagaacctttcagctggattaaggtcgatcttcttgcccccatgatcatccacggcattaagacacagggagcgaggcagaaattctcctccctctacatctcacagttcattattatgtatagtttggacggcaagaagtggcaaacttatagaggtaacagtactggaacagacatggtgttcttcggcaacgttgatagctctggcatcaaacacaacatctttaatcctcccataatagctcggtacatcagattgcatccgacccactacagcattaggagtacactccgaatggagcttatgggttgcgacttgaattcctgttcaatgccactcggaatggagtctaaagccatctctgatgcacagataaccgccagtagctactttacgaacatgtttgctacgtggtcaccctctaaggcaaggcttcatttgcaaggccggtctaatgcctggagacctcaggtgaacaacccgaaagaatggctccaggtggactttcagaagaccatgaaagtaacaggtgtcactactcagggagttaagtccttggatactagcatgtatgtgaaggagttccttatttcctcatcacaagatggccaccagtggaccctcttctttcagaatggtaaggtcaaagtgtttcagggcaatcaagacagcttcacacccgtggtgaacagtcttgatcctccactcttgacacgataccttcgaatccatccacagtcttgggagcaccagattgcattgcgcatggaagtacttggatgcgaggctcaggacctctac

SEQ ID NO: 1784 - protein, 1457 aa, synthetic construct
  REGION 1..1457: note = Variant of human B-domain deleted Factor VIII
MQIELSTCFFLCLLRFCFSATRRYYLGAVELSWDYMQSDLGELPVDARFPPRVPKSFPFNTSQVYKKTLFVEFTDHLFNIAKPRPPWMGLLGPTIQAEVYDTVVITLKNMASHPVSLHAVGVSYWKASEGAEYDDQTSQREKEDDKVFPGGSHTYVWQVLKENGPMASDPPCLTYSYLSHVDLVKDLNSGLIGALLVCREGSLAKEKTQTLAKFILLFAVFDEGKSWHSETKNSLMQDRDAASARAWPKMHTVNGYVNRTLPGLIGCHRKSVYWHVIGMGTTPEVHSIFLEGHTFLVRNHRQASLGISPITFLTAQTLLRDLGQFLLFCHIPSHQHDGMEAYVKVDSCPEEPQLRMKNNEEAEDYDDDLTDSEMDVVRFDDDNSPSIIQARSGAKKHPKTWVHYIAAEEEDWDYAPLVLAPDDRSYKSQYLNNGPQRIGRKYKKVRFMAYTDETFKTREAIQHESGILGPLLYGEVGDTLLIIFKNQASRPYNIYPHGITDVRPLYSRRLPKGVKHLKDFPILPGEIFKYKWTITVEDGPTKSDPRCLTRYYSSFVNWERDLASGLIGPLLICYKESVDQRGNQIMSDKRNVILFSVFDENRSWYLTENIQRFLPNPAGVQLEDPEFQASNIMHSINGYVFDSLQLSVCLHEVAYWYILSIGAQTDFLSVFFSGYTFKHKGVYEDTLTLFPFSGETVFMSMENPGLWILGCHNSDFRNRGMTALLKVSSCDWNTGDYYEDSYEDISAYFDSKNNAIEPRSFSQNPPVLKRHQREGTRTTLQSDQEEIDYDDTISVEMKKEDFDIYDEDENQSPRSFQKKTRHYFIAAVERLWDYGMSSSPHVLRNRAQSGSVPQFKKVVFQEFTDGSFTQPLYRGELNEHLGLLGPYIRAEVEDNIMVTFRNQASRPYSFYSSLISYEEDQRQGAEPRKNFVKPNETKTYFWKVQHHSAPTKDEFDCKAWAYFSDVDLEKDVHSGLIGPLLVCHTNTLNPAHGRQVTVQEFALFFTIFDETKSWYFTENMERNCRAPCNIQMEDPTFKENYRFHAINGYIMDTLPGLVMAQDQRIRWYLLSMGSNENIHSIHFSGHVFTVRKKEEYKMALYNLYPGVFETVEMLPSKAGIWRVECLIGEHLHAGMSTLFLVYSNKCQNPLGMASGHIRDFQITASGQYGQWAPKLARLHYSGSINAWSTKEPFSWIKVDLLAPMIIHGIKTQGARQKFSSLYISQFIIMYSLDGKKWQTYRGNSTGTDMVFFGNVDSSGIKHNIFNPPIIARYIRLHPTHYSIRSTLRMELMGCDLNSCSMPLGMESKAISDAQITASSYFTNMFATWSPSKARLHLQGRSNAWRPQVNNPKEWLQVDFQKTMKVTGVTTQGVKSLDTSMYVKEFLISSSQDGHQWTLFFQNGKVKVFQGNQDSFTPVVNSLDPPLLTRYLRIHPQSWEHQIALRMEVLGCEAQDLY

SEQ ID NO: 1785 - DNA, 4371 bp, synthetic construct
  misc_feature 1..4371: note = Variant of human B-domain deleted Factor VIII
  source 1..4371: mol_type = other DNA
atgcagattgaactgtctacctgcttcttcctctgtttgctgaggttctgctttagcgccactagacggtactaccttggcgctgtggagctgtcctgggactatatgcagagtgatttgggagagcttcccgtcgacgcacgatttcctcctcgcgttccaaagtcatttccctttaacacaagccaggtgtacaagaagacgctcttcgtcgaattcaccgatcacctgttcaatatcgccaaacccagaccaccatggatgggtcttttggggcctaccatacaagcggaggtgtatgacacagttgttatcactctcaagaacatggcttctcatccggtaagtcttcacgtggtgggcgtgtcctactggaaagcttcagaaggagccgagtatgatgatcagacatcccagagggagaaagaagacgacaaggtatttccaggtgggtctcatacctatgtgtggcaagtgctcaaagagaatggccctatggcaagcgatccgccgtgtttgacttacagctacctttcacacgttgacctcgtcaaggacctcaactccgggttgattggagccttgttggtatgcagggaaggatctcttgccaaagagaagacacagaccctggccaagtttatccttctctttgctgtgttcgatgagggcaaaagttggcatagcgaaacgaagaattccctcatgcaggatcgcgacgcagccagcgccagagcttggcccaagatgcacactgtgaacggatatgtcaataggacgcttcctggcttgattgggtgtcatcggaaaagtgtctactggcacgtgatcggaatggggacaacaccagaggtccactccatatttctcgaaggccataccttccttgttcgaaaccacagacaggcatccttggggatctctcccattacctttctcactgcccaaacgctccttcgtgacttgggtcagttccttctcttttgccatatcccgtcacaccagcatgatggtatggaagcttatgtgaaagtcgacagttgtcctgaggagccacagttgcgcatgaagaataatgaagaagccgaggattacgacgacgatctcaccgattctgagatggacgtggtgaggtttgatgacgacaactctccctccatcattcaagctcggagcggggcgaagaaacaccccaagacttgggtccactatatagcggcggaagaggaggattgggattacgctcctcttgtattggcaccagatgaccgctcatacaaaagccagtacctcaacaacggaccgcagagaattggccggaagtataagaaagtgcgatttatggcctatacagacgaaacctttaagacaagggaggccatccagcatgagagtgggattttgggacctcttctttacggcgaagttggtgataccctcctcatcatcttcaagaatcaagcttctcgcccctataacatttacccacacgggatcactgacgttaggcctttgtatagcagaagacttcccaaaggcgtgaagcatctcaaagacttccccattttgccaggcgagatctttaagtacaaatggaccattacagtggaagatggaccgactaaatcagaccctcgatgccttacgcggtactattcctccttcgtgaattgggagagagatttggcaagcggactcataggaccactcctcatctgttacaaggaatctgtagaccagaggggtaaccagattatgagtgataaacgcaatgtgatcctttttagcgtcttcgacgagaaccggtcctggtacttgaccgagaatatacaaaggttccttcccaaccccgcaggcgttcagttggaagaccctgagtttcaggccagcaatattatgcactcaatcaacggctatgtgtttgatagtctccagctttctgtttgcctccatgaagtagcctattggtacatcttgtcaattggtgctcaaacagacttcctctccgtcttcttctccggctacacctttaagcacaagggcgtgtatgaggacactctcacactctttccattttctggagaaaccgtgttcatgagcatggagaatccaggcctttggatcttgggttgccacaacagtgattttcgcaatcggggaatgactgctctcctcaaagtcagcagctgtgattggaacacaggcgactattacgaagattcttacgaggacataagtgcctactttgactccaagaataacgccattgagcccagatcattctcccagaatcctcccgtgcttaaaaggcatcagcgcgaaggtaccagaactactcttcagtctgatcaagaggagattgactatgacgacaccattagcgtggaaatgaagaaggaggatttcgatatctatgacgaagatgagaaccagtctccgcggagctttcagaagaagacgcgacactacttcattgcagcagtcgaaaggctttgggactacggtatgtcatcatcccctcatgtgttgcgcaatagagctcagagtggaagtgttccacagttcaagaaagtcgtctttcaagagtttacagatggcagcttcacacagcctctctatcggggcgagcttaacgaacatttgggactccttggtccctatatccgagccgaagtggaggacaacattatggttacctttaggaatcaagcctctcgcccctacagcttctactcctccctcatcagttatgaggaggatcagagacaaggcgctgaaccacggaagaactttgtgaaaccgaatgagacgaagacctacttctggaaagtacagcaccacatggcccccacaaaagacgaattcgattgcaaagcatgggcgtatttttcagacgttgacttggagaaagatgtacattcaggacttattggtcctttgttggtgtgtcacactaacactctcaatccagcccatggcaggcaggtgacagtccaggaattcgctcttttctttaccatctttgatgagaccaagtcctggtacttcacggaaaacatggagcgcaattgcagagccccctgtaacatacagatggaggaccctacctttaaggaaaattatcggttccacgcaatcaacggatacattatggatacactccctggccttgtgatggctcaggaccaacgaatcaggtggtacctcctcagcatgggttctaatgagaacatacactccattcacttttcaggacatgtgttcactgtccggaagaaagaagagtataagatggccctctacaatttgtatccaggcgtgtttgagaccgttgaaatgcttccctctaaagctggcatctggagagtagagtgcttgatcggagaacatcttcacgcaggtatgagcaccttgttcctcgtgtacagcaacaaatgtcagaatccacttggcatggccagtggacacattcgcgactttcagatcacagcatctggccagtatggacaatgggccccaaagttggctcgcctccattactccggtagcataaatgcgtggtccactaaagaacctttcagctggattaaggtcgatcttcttgcccccatgatcatccacggcattaagacacagggagcgaggcagaaattctcctccctctacatctcacagttcattattatgtatagtttggatggcaagaagtggcaaacttatagaggtaacagtactggaacagacatggtgttcttcggcaacgttgatagctctggcatcaaacacaacatctttaatcctcccataatagctcggtacatcagattgcatccgacccactacagcattaggagtacactccgaatggagcttatgggttgcgacttgaattcctgttcaatgccactcggaatggagtctaaagccatctctgatgcacagataaccgccagtagctactttacgaacatgtttgctacgtggtcaccctctaaggcaaggcttcatttgcaaggccggtctaatgcctggagacctcaggtgaacaacccgaaagaatggctccaggtggactttcagaagaccatgaaagtaacaggtgtcactactcagggagttaagtccttggatactagcatgtatgtgaaggagttccttatttcctcatcacaagatggccaccagtggaccctcttctttcagaatggtaaggtcaaagtgtttcagggcaatcaagacagcttcacacccgtggtgaacagtcttgatcctccactcttgacacgataccttcgaatccatccacagtcttgggagcaccagattgcattgcgcatggaagtacttggatgcgaggctcaggacctctac

SEQ ID NO: 1786 - protein, 1457 aa, synthetic construct
  REGION 1..1457: note = Variant of human B-domain deleted Factor VIII
MQIELSTCFFLCLLRFCFSATRRYYLGAVELSWDYMQSDLGELPVDARFPPRVPKSFPFNTSQVYKKTLFVEFTDHLFNIAKPRPPWMGLLGPTIQAEVYDTVVITLKNMASHPVSLHVVGVSYWKASEGAEYDDQTSQREKEDDKVFPGGSHTYVWQVLKENGPMASDPPCLTYSYLSHVDLVKDLNSGLIGALLVCREGSLAKEKTQTLAKFILLFAVFDEGKSWHSETKNSLMQDRDAASARAWPKMHTVNGYVNRTLPGLIGCHRKSVYWHVIGMGTTPEVHSIFLEGHTFLVRNHRQASLGISPITFLTAQTLLRDLGQFLLFCHIPSHQHDGMEAYVKVDSCPEEPQLRMKNNEEAEDYDDDLTDSEMDVVRFDDDNSPSIIQARSGAKKHPKTWVHYIAAEEEDWDYAPLVLAPDDRSYKSQYLNNGPQRIGRKYKKVRFMAYTDETFKTREAIQHESGILGPLLYGEVGDTLLIIFKNQASRPYNIYPHGITDVRPLYSRRLPKGVKHLKDFPILPGEIFKYKWTITVEDGPTKSDPRCLTRYYSSFVNWERDLASGLIGPLLICYKESVDQRGNQIMSDKRNVILFSVFDENRSWYLTENIQRFLPNPAGVQLEDPEFQASNIMHSINGYVFDSLQLSVCLHEVAYWYILSIGAQTDFLSVFFSGYTFKHKGVYEDTLTLFPFSGETVFMSMENPGLWILGCHNSDFRNRGMTALLKVSSCDWNTGDYYEDSYEDISAYFDSKNNAIEPRSFSQNPPVLKRHQREGTRTTLQSDQEEIDYDDTISVEMKKEDFDIYDEDENQSPRSFQKKTRHYFIAAVERLWDYGMSSSPHVLRNRAQSGSVPQFKKVVFQEFTDGSFTQPLYRGELNEHLGLLGPYIRAEVEDNIMVTFRNQASRPYSFYSSLISYEEDQRQGAEPRKNFVKPNETKTYFWKVQHHMAPTKDEFDCKAWAYFSDVDLEKDVHSGLIGPLLVCHTNTLNPAHGRQVTVQEFALFFTIFDETKSWYFTENMERNCRAPCNIQMEDPTFKENYRFHAINGYIMDTLPGLVMAQDQRIRWYLLSMGSNENIHSIHFSGHVFTVRKKEEYKMALYNLYPGVFETVEMLPSKAGIWRVECLIGEHLHAGMSTLFLVYSNKCQNPLGMASGHIRDFQITASGQYGQWAPKLARLHYSGSINAWSTKEPFSWIKVDLLAPMIIHGIKTQGARQKFSSLYISQFIIMYSLDGKKWQTYRGNSTGTDMVFFGNVDSSGIKHNIFNPPIIARYIRLHPTHYSIRSTLRMELMGCDLNSCSMPLGMESKAISDAQITASSYFTNMFATWSPSKARLHLQGRSNAWRPQVNNPKEWLQVDFQKTMKVTGVTTQGVKSLDTSMYVKEFLISSSQDGHQWTLFFQNGKVKVFQGNQDSFTPVVNSLDPPLLTRYLRIHPQSWEHQIALRMEVLGCEAQDLY

SEQ ID NO: 1787 - DNA, 4371 bp, synthetic construct
  misc_feature 1..4371: note = Variant of human B-domain deleted Factor VIII
  source 1..4371: mol_type = other DNA
atgcagattgaactgtctacctgcttcttcctctgtttgctgaggttctgctttagcgccactagacggtactaccttggcgctgtggagctgtcctgggactatatgcagagtgatttgggagagcttcccgtcgacgcacgatttcctcctcgcgttccaaagtcatttccctttaacacaagccaggtgtacaagaagacgctcttcgtcgaattcaccgatcacctgttcaatatcgccaaacccagaccaccatggatgggtcttttggggcctaccatacaagcggaggtgtatgacacagttgttatcactctcaagaacatggcttctcatccggtaagtcttcacgcagtgggcgtgtcctactggaaagcttcagaaggagccgagtatgatgatcagacatcccagagggagaaagaagacgacaaggtatttccaggtgggtctcatacctatgtgtggcaagtgctcaaagagaatggccctatggcaagcgatccgccgtgtttgacttacagctacctttcacacgttgacctcgtcaaggacctcaactccgggttgattggagccttgttggtatgcagggaaggatctcttgccaaagagaagacacagaccctggccaagtttatccttctctttgctgtgttcgatgagggcaaaagttggcatagcgaaacgaagaattccctcatgcaggatcgcgacgcagccagcgccagagcttggcccaagatgcacactgtgaacggatatgtcaataggacgcttcctggcttgattgggtgtcatcggaaaagtgtctactggcacgtgatcggaatggggacaacaccagaggtccactccatatttctcgaaggccataccttccttgttcgaaaccacagacaggcatccttggggatctctcccattacctttctcactgcccaaacgctccttcgtgacttgggtcagttccttctcttttgccatatcccgtcacaccagcatgatggtatggaagcttatgtgaaagtcgacagttgtcctgaggagccacagttgcgcatgaagaataatgaagaagccgaggattacgacgacgatctcaccgattctgagatggacgtggtgaggtttgatgacgacaactctccctccatcattcaagctcggagcggggcgaagaaacaccccaagacttgggtccactatatagcggcggaagaggaggattgggattacgctcctcttgtattggcaccagatgaccgctcatacaaaagccagtacctcaacaacggaccgcagagaattggccggaagtataagaaagtgcgatttatggcctatacagacgaaacctttaagacaagggaggccatccagcatgagagtgggattttgggacctcttctttacggcgaagttggtgataccctcctcatcatcttcaagaatcaagcttctcgcccctataacatttacccacacgggatcactgacgttaggcctttgtatagcagaagacttcccaaaggcgtgaagcatctcaaagacttccccattttgccaggcgagatctttaagtacaaatggaccattacagtggaagatggaccgactaaatcagaccctcgatgccttacgcggtactattcctccttcgtgaattgggagagagatttggcaagcggactcataggaccactcctcatctgttacaaggaatctgtagaccagaggggtaaccagattatgagtgataaacgcaatgtgatcctttttagcgtcttcgacgagaaccggtcctggtacttgaccgagaatatacaaaggttccttcccaaccccgcaggcgttcagttggaagaccctgagtttcaggccagcaatattatgcactcaatcaacggctatgtgtttgatagtctccagctttctgtttgcctccatgaagtagcctattggtacatcttgtcaattggtgctcaaacagacttcctctccgtcttcttctccggctacacctttaagcacaagggcgtgtatgaggacactctcacactctttccattttctggagaaaccgtgttcatgagcatggagaatccaggcctttggatcttgggttgccacaacagtgattttcgcaatcggggaatgactgctctcctcaaagtcagcagctgtgattggaacacaggcgactattacgaagattcttacgaggacataagtgcctactttgactccaagaataacgccattgagcccagatcattctcccagaatcctcccgtgcttaaaaggcatcagcgcgaaggtaccagaactactcttcagtctgatcaagaggagattgactatgacgacaccattagcgtggaaatgaagaaggaggatttcgatatctatgacgaagatgagaaccagtctccgcggagctttcagaagaagacgcgacactacttcattgcagcagtcgaaaggctttgggactacggtatgtcatcatcccctcatgtgttgcgcaatagagctcagagtggaagtgttccacagttcaagaaagtcgtctttcaagagtttacagatggcagcttcacacagcctctctatcggggcgagcttaacgaacatttgggactccttggtccctatatccgagccgaagtggaggacaacattatggttacctttaggaatcaagcctctcgcccctacagcttctactcctccctcatcagttatgaggaggatcagagacaaggcgctgaaccacggaagaactttgtgaaaccgaatgagacgaagacctacttctggaaagtacagcaccacatggcccccacaaaagacgaattcgattgcaaagcatgggcgtatttttcagacgttgacttggagaaagatgtacattcaggacttattggtcctttgttggtgtgtcacactaacactctcaatccagcccatggcaggcaggtgacagtccaggaattcgctcttttctttaccatctttgatgagaccaagtcctggtacttcacggaaaacatggagcgcaattgcagagccccctgtaacatacagatggaggaccctacctttaaggaaaattatcggttccacgcaatcaacggatacattatggatacactccctggccttgtgatggctcaggaccaacgaatcaggtggtacctcctcagcatgggttctaatgagaacatacactccattcacttttcaggacatgtgttcactgtccggaagaaagaagagtataagatggccctctacaatttgtatccaggcgtgtttgagaccgttgaaatgcttccccttaaagctggcatctggagagtagagtgcttgatcggagaacatcttcacgcaggtatgagcaccttgttcctcgtgtacagcaacaaatgtcagaatccacttggcatggccagtggacacattcgcgactttcagatcacagcatctggccagtatggacaatgggccccaaagttggctcgcctccattactccggtagcataaatgcgtggtccactaaagaacctttcagctggattaaggtcgatcttcttgcccccatgatcatccacggcattaagacacagggagcgaggcagaaattctcctccctctacatctcacagttcattattatgtatagtttggacggcaagaagtggcaaacttatagaggtaacagtactggaacagacatggtgttcttcggcaacgttgatagctctggcatcaaacacaacatctttaatcctcccataatagctcggtacatcagattgcatccgacccactacagcattaggagtacactccgaatggagcttatgggttgcgacttgaattcctgttcaatgccactcggaatggagtctaaagccatctctgatgcacagataaccgccagtagctactttacgaacatgtttgctacgtggtcaccctctaaggcaaggcttcatttgcaaggccggtctaatgcctggagacctcaggtgaacaacccgaaagaatggctccaggtggactttcagaagaccatgaaagtaacaggtgtcactactcagggagttaagtccttggatactagcatgtatgtgaaggagttccttatttcctcatcacaagatggccaccagtggaccctcttctttcagaatggtaaggtcaaagtgtttcagggcaatcaagacagcttcacacccgtggtgaacagtcttgatcctccactcttgacacgataccttcgaatccatccacagtcttgggagcaccagattgcattgcgcatggaagtacttggatgcgaggctcaggacctctac

SEQ ID NO: 1788 - protein, 1457 aa, synthetic construct
  REGION 1..1457: note = Variant of human B-domain deleted Factor VIII
MQIELSTCFFLCLLRFCFSATRRYYLGAVELSWDYMQSDLGELPVDARFPPRVPKSFPFNTSQVYKKTLFVEFTDHLFNIAKPRPPWMGLLGPTIQAEVYDTVVITLKNMASHPVSLHAVGVSYWKASEGAEYDDQTSQREKEDDKVFPGGSHTYVWQVLKENGPMASDPPCLTYSYLSHVDLVKDLNSGLIGALLVCREGSLAKEKTQTLAKFILLFAVFDEGKSWHSETKNSLMQDRDAASARAWPKMHTVNGYVNRTLPGLIGCHRKSVYWHVIGMGTTPEVHSIFLEGHTFLVRNHRQASLGISPITFLTAQTLLRDLGQFLLFCHIPSHQHDGMEAYVKVDSCPEEPQLRMKNNEEAEDYDDDLTDSEMDVVRFDDDNSPSIIQARSGAKKHPKTWVHYIAAEEEDWDYAPLVLAPDDRSYKSQYLNNGPQRIGRKYKKVRFMAYTDETFKTREAIQHESGILGPLLYGEVGDTLLIIFKNQASRPYNIYPHGITDVRPLYSRRLPKGVKHLKDFPILPGEIFKYKWTITVEDGPTKSDPRCLTRYYSSFVNWERDLASGLIGPLLICYKESVDQRGNQIMSDKRNVILFSVFDENRSWYLTENIQRFLPNPAGVQLEDPEFQASNIMHSINGYVFDSLQLSVCLHEVAYWYILSIGAQTDFLSVFFSGYTFKHKGVYEDTLTLFPFSGETVFMSMENPGLWILGCHNSDFRNRGMTALLKVSSCDWNTGDYYEDSYEDISAYFDSKNNAIEPRSFSQNPPVLKRHQREGTRTTLQSDQEEIDYDDTISVEMKKEDFDIYDEDENQSPRSFQKKTRHYFIAAVERLWDYGMSSSPHVLRNRAQSGSVPQFKKVVFQEFTDGSFTQPLYRGELNEHLGLLGPYIRAEVEDNIMVTFRNQASRPYSFYSSLISYEEDQRQGAEPRKNFVKPNETKTYFWKVQHHMAPTKDEFDCKAWAYFSDVDLEKDVHSGLIGPLLVCHTNTLNPAHGRQVTVQEFALFFTIFDETKSWYFTENMERNCRAPCNIQMEDPTFKENYRFHAINGYIMDTLPGLVMAQDQRIRWYLLSMGSNENIHSIHFSGHVFTVRKKEEYKMALYNLYPGVFETVEMLPLKAGIWRVECLIGEHLHAGMSTLFLVYSNKCQNPLGMASGHIRDFQITASGQYGQWAPKLARLHYSGSINAWSTKEPFSWIKVDLLAPMIIHGIKTQGARQKFSSLYISQFIIMYSLDGKKWQTYRGNSTGTDMVFFGNVDSSGIKHNIFNPPIIARYIRLHPTHYSIRSTLRMELMGCDLNSCSMPLGMESKAISDAQITASSYFTNMFATWSPSKARLHLQGRSNAWRPQVNNPKEWLQVDFQKTMKVTGVTTQGVKSLDTSMYVKEFLISSSQDGHQWTLFFQNGKVKVFQGNQDSFTPVVNSLDPPLLTRYLRIHPQSWEHQIALRMEVLGCEAQDLY

SEQ ID NO: 1789 - DNA, 4371 bp, synthetic construct
  misc_feature 1..4371: note = Variant of human B-domain deleted Factor VIII
  source 1..4371: mol_type = other DNA
atgcagattgaactgtctacctgcttcttcctctgtttgctgaggttctgctttagcgccactagacggtactaccttggcgctgtggagctgtcctgggactatatgcagagtgatttgggagagcttcccgtcgacgcacgatttcctcctcgcgttccaaagtcatttccctttaacacaagccaggtgtacaagaagacgctcttcgtcgaattcaccgatcacctgttcaatatcgccaaacccagaccaccatggatgggtcttttggggcctaccatacaagcggaggtgtatgacacagttgttatcactctcaagaacatggcttctcatccggtaagtcttcacgcagtgggcgtgtcctactggaaagcttcagaaggagccgagtatgatgatcagacatcccagagggagaaagaagacgacaaggtatttccaggtgggtctcatacctatgtgtggcaagtgctcaaagagaatggccctatggcaagcgatccgccgtgtttgacttacagctacctttcacacgttgacctcgtcaaggacctcaactccgggttgattggagccttgttggtatgcagggaaggatctcttgccaaagagaagacacagaccctggccaagtttatccttctctttgctgtgttcgatgagggcaaaagttggcatagcgaaacgaagaattccctcatgcaggatcgcgacgcagccagcgccagagcttggcccaagatgcacactgtgaacggatatgtcaataggacgcttcctggcttgattgggtgtcatcggaaaagtgtctactggcacgtgatcggaatggggacaacaccagaggtccactccatatttctcgaaggccataccttccttgttcgaaaccacagacaggcatccttggggatctctcccattacctttctcactgcccaaacgctccttcgtgacttgggtcagttccttctcttttgccatatcccgtcacaccagcatgatggtatggaagcttatgtgaaagtcgacagttgtcctgaggagccacagttgcgcatgaagaataatgaagaagccgaggattacgacgacgatctcaccgattctgagatggacgtggtgaggtttgatgacgacaactctccctccatcattcaagctcggagcggggcgaagaaacaccccaagacttgggtccactatatagcggcggaagaggaggattgggattacgctcctcttgtattggcaccagatgaccgctcatacaaaagccagtacctcaacaacggaccgcagagaattggccggaagtataagaaagtgcgatttatggcctatacagacgaaacctttaagacaagggaggccatccagcatgagagtgggattttgggacctcttctttacggcgaagttggtgataccctcctcatcatcttcaagaatcaagcttctcgcccctataacatttacccacacgggatcactgacgttaggcctttgtatagcagaagacttcccaaaggcgtgaagcatctcaaagacttccccattttgccaggcgagatctttaagtacaaatggaccattacagtggaagatggaccgactaaatcagaccctcgatgccttacgcggtactattcctccttcgtgaattgggagagagatttggcaagcggactcataggaccactcctcatctgttacaaggaatctgtagaccagaggggtaaccagattatgagtgataaacgcaatgtgatcctttttagcgtcttcgacgagaaccggtcctggtacttgaccgagaatatacaaaggttccttcccaaccccgcaggcgttcagttggaagaccctgagtttcaggccagcaatattatgcactcaatcaacggctatgtgtttgatagtctccagctttctgtttgcctccatgaagtagcctattggtacatcttgtcaattggtgctcaaacagacttcctctccgtcttcttctccggctacacctttaagcacaagggcgtgtatgaggacactctcacactctttccattttctggagaaaccgtgttcatgagcatggagaatccaggcctttggatcttgggttgccacaacagtgattttcgcaatcggggaatgactgctctcctcaaagtcagcagctgtgattggaacacaggcgactattacgaagattcttacgaggacataagtgcctactttgactccaagaataacgccattgagcccagatcattctcccagaatcctcccgtgcttaaaaggcatcagcgcgaaggtaccagaactactcttcagtctgatcaagtggagattgactatgacgacaccattagcgtggaaatgaagaaggaggatttcgatatctatgacgaagatgagaaccagtctccgcggagctttcagaagaagacgcgacactacttcattgcagcagtcgaaaggctttgggactacggtatgtcatcatcccctcatgtgttgcgcaatagagctcagagtggaagtgttccacagttcaagaaagtcgtctttcaagagtttacagatggcagcttcacacagcctctctatcggggcgagcttaacgaacatttgggactccttggtccctatatccgagccgaagtggaggacaacattatggttacctttaggaatcaagcctctcgcccctacagcttctactcctccctcatcagttatgaggaggatcagagacaaggcgctgaaccacggaagaactttgtgaaaccgaatgagacgaagacctacttctggaaagtacagcaccacatggcccccacaaaagacgaattcgattgcaaagcatgggcgtatttttcagacgttgacttggagaaagatgtacattcaggacttattggtcctttgttggtgtgtcacactaacactctcaatccagcccatggcaggcaggtgacagtccaggaattcgctcttttctttaccatctttgatgagaccaagtcctggtacttcacggaaaacatggagcgcaattgcagagccccctgtaacatacagatggaggaccctacctttaaggaaaattatcggttccacgcaatcaacggatacattatggatacactccctggccttgtgatggctcaggaccaacgaatcaggtggtacctcctcagcatgggttctaatgagaacatacactccattcacttttcaggacatgtgttcactgtccggaagaaagaagagtataagatggccctctacaatttgtatccaggcgtgtttgagaccgttgaaatgcttccctctaaagctggcatctggagagtagagtgcttgatcggagaacatcttcacgcaggtatgagcaccttgttcctcgtgtacagcaacaaatgtcagaatccacttggcatggccagtggacacattcgcgactttcagatcacagcatctggccagtatggacaatgggccccaaagttggctcgcctccattactccggtagcataaatgcgtggtccactaaagaacctttcagctggattaaggtcgatcttcttgcccccatgatcatccacggcattaagacacagggagcgaggcagaaattctcctccctctacatctcacagttcattattatgtatagtttggacggcaagaagtggcaaacttatagaggtaacagtactggaacagacatggtgttcttcggcaacgttgatagctctggcatcaaacacaacatctttaatcctcccataatagctcggtacatcagattgcatccgacccactacagcattaggagtacactccgaatggagcttatgggttgcgacttgaattcctgttcaatgccactcggaatggagtctaaagccatctctgatgcacagataaccgccagtagctactttacgaacatgtttgctacgtggtcaccctctaaggcaaggcttcatttgcaaggccggtctaatgcctggagacctcaggtgaacaacccgaaagaatggctccaggtggactttcagaagaccatgaaagtaacaggtgtcactactcagggagttaagtccttggatactagcatgtatgtgaaggagttccttatttcctcatcacaagatggccaccagtggaccctcttctttcagaatggtaaggtcaaagtgtttcagggcaatcaagacagcttcacacccgtggtgaacagtcttgatcctccactcttgacacgataccttcgaatccatccacagtcttgggagcaccagattgcattgcgcatggaagtacttggatgcgaggctcaggacctctac

SEQ ID NO: 1790 - protein, 1457 aa, synthetic construct
  REGION 1..1457: note = Variant of human B-domain deleted Factor VIII
MQIELSTCFFLCLLRFCFSATRRYYLGAVELSWDYMQSDLGELPVDARFPPRVPKSFPFNTSQVYKKTLFVEFTDHLFNIAKPRPPWMGLLGPTIQAEVYDTVVITLKNMASHPVSLHAVGVSYWKASEGAEYDDQTSQREKEDDKVFPGGSHTYVWQVLKENGPMASDPPCLTYSYLSHVDLVKDLNSGLIGALLVCREGSLAKEKTQTLAKFILLFAVFDEGKSWHSETKNSLMQDRDAASARAWPKMHTVNGYVNRTLPGLIGCHRKSVYWHVIGMGTTPEVHSIFLEGHTFLVRNHRQASLGISPITFLTAQTLLRDLGQFLLFCHIPSHQHDGMEAYVKVDSCPEEPQLRMKNNEEAEDYDDDLTDSEMDVVRFDDDNSPSIIQARSGAKKHPKTWVHYIAAEEEDWDYAPLVLAPDDRSYKSQYLNNGPQRIGRKYKKVRFMAYTDETFKTREAIQHESGILGPLLYGEVGDTLLIIFKNQASRPYNIYPHGITDVRPLYSRRLPKGVKHLKDFPILPGEIFKYKWTITVEDGPTKSDPRCLTRYYSSFVNWERDLASGLIGPLLICYKESVDQRGNQIMSDKRNVILFSVFDENRSWYLTENIQRFLPNPAGVQLEDPEFQASNIMHSINGYVFDSLQLSVCLHEVAYWYILSIGAQTDFLSVFFSGYTFKHKGVYEDTLTLFPFSGETVFMSMENPGLWILGCHNSDFRNRGMTALLKVSSCDWNTGDYYEDSYEDISAYFDSKNNAIEPRSFSQNPPVLKRHQREGTRTTLQSDQVEIDYDDTISVEMKKEDFDIYDEDENQSPRSFQKKTRHYFIAAVERLWDYGMSSSPHVLRNRAQSGSVPQFKKVVFQEFTDGSFTQPLYRGELNEHLGLLGPYIRAEVEDNIMVTFRNQASRPYSFYSSLISYEEDQRQGAEPRKNFVKPNETKTYFWKVQHHMAPTKDEFDCKAWAYFSDVDLEKDVHSGLIGPLLVCHTNTLNPAHGRQVTVQEFALFFTIFDETKSWYFTENMERNCRAPCNIQMEDPTFKENYRFHAINGYIMDTLPGLVMAQDQRIRWYLLSMGSNENIHSIHFSGHVFTVRKKEEYKMALYNLYPGVFETVEMLPSKAGIWRVECLIGEHLHAGMSTLFLVYSNKCQNPLGMASGHIRDFQITASGQYGQWAPKLARLHYSGSINAWSTKEPFSWIKVDLLAPMIIHGIKTQGARQKFSSLYISQFIIMYSLDGKKWQTYRGNSTGTDMVFFGNVDSSGIKHNIFNPPIIARYIRLHPTHYSIRSTLRMELMGCDLNSCSMPLGMESKAISDAQITASSYFTNMFATWSPSKARLHLQGRSNAWRPQVNNPKEWLQVDFQKTMKVTGVTTQGVKSLDTSMYVKEFLISSSQDGHQWTLFFQNGKVKVFQGNQDSFTPVVNSLDPPLLTRYLRIHPQSWEHQIALRMEVLGCEAQDLY

SEQ ID NO: 1791 - DNA, 4371 bp, synthetic construct
  misc_feature 1..4371: note = Variant of human B-domain deleted Factor VIII
  source 1..4371: mol_type = other DNA
atgcagattgaactgtctacctgcttcttcctctgtttgctgaggttctgctttagcgccactagacggtactaccttggcgctgtggagctgtcctgggactatatgcagagtgatttgggagagcttcccgtcgacgcacgatttcctcctcgcgttccaaagtcatttccctttaacacaagccaggtgtacaagaagacgctcttcgtcgaattcaccgatcacctgttcaatatcgccaaacccagaccaccatggatgggtcttttggggcctaccatacaagcggaggtgtatgacacagttgttatcactctcaagaacatggcttctcatccggtaagtcttcacgcagtgggcgtgtcctactggaaagcttcagaaggagccgagtatgatgatcagacatcccagagggagaaagaagacgacaaggtatttccaggtgggtctcatacctatgtgtggcaagtgctcaaagagaatggccctatggcaagcgatccgccgtgtttgacttacagctacctttcacacgttgacctcgtcaaggacctcaactccgggttgattggagccttgttggtatgcagggaaggatctcttgccaaagagaagacacagaccctggccaagtttatccttctctttgctgtgttcgatgagggcaaaagttggcatagcgaaacgaagaattccctcatgcaggatcgcgacgcagccagcgccagagcttggcccaagatgcacactgtgaacggatatgtcaataggacgcttcctggcttgattgggtgtcatcggaaaagtgtctactggcacgtgatcggaatggggacaacaccagaggtccactccatatttctcgaaggccataccttccttgttcgaaaccacagacaggcatccttggggatctctcccattacctttctcactgcccaaacgctccttcgtgacttgggtcagttccttctcttttgccatatcccgtcacaccagcatgatggtatggaagcttatgtgaaagtcgacagttgtcctgaggagccacagttgcgcatgaagaataatgaagaagccgaggattacgacgacgatctcaccgattctgagatggacgtggtgaggtttgatgacgacaactctccctccatcattcaagctcggagcggggcgaagaaacaccccaagacttgggtccactatatagcggcggaagaggaggattgggattacgctcctcttgtattggcaccagatgaccgctcatacaaaagccagtacctcaacaacggaccgcagagaattggccggaagtataagaaagtgcgatttatggcctatacagacgaaacctttaagacaagggaggccatccagcatgagagtgggattttgggacctcttctttacggcgaagttggtgataccctcctcatcatcttcaagaatcaagcttctcgcccctataacatttacccacacgggatcactgacgttaggcctttgtatagcagaagacttcccaaaggcgtgaagcatctcaaagacttccccattttgccaggcgagatctttaagtacaaatggaccattacagtggaagatggaccgactaaatcagaccctcgatgccttacgcggtactattcctccttcgtgaattgggagagagatttggcaagcggactcataggaccactcctcatctgttacaaggaatctgtagaccagaggggtaaccagattatgagtgataaacgcaatgtgatcctttttagcgtcttcgacgagaaccggtcctggtacttgaccgagaatatacaaaggttccttcccaaccccgcaggcgttcagttggaagaccctgagtttcaggccagcaatattatgcactcaatcaacggctatgtgtttgatagtctccagctttctgtttgcctccatgaagtagcctattggtacatcttgtcaattggtgctcaaacagacttcctctccgtcttcttctccggctacacctttaagcacaagggcgtgtatgaggacactctcacactctttccattttctggagaaaccgtgttcatgagcatggagaatccaggcctttggatcttgggttgccacaacagtgattttcgcaatcggggaatgactgctctcctcaaagtcagcagctgtgattggaacacaggcgactattacgaagattcttacgaggacataagtgcctactttgactccaagaataacgccattgagcccagatcattctcccagaatcctcccgtgcttaaaaggcatcagcgcgaaggtaccagaactactcttcagtctgatcaagaggagattgactatgacgacaccattagcgtggaaatgaagaaggaggatttcgatatctatgacgaagatgagaaccagtctccgcggagctttcagaagaagacgcgacactacttcattgcagcagtcgaaaggctttgggactacggtatgtcatcatcccctcatgtgttgcgcaatagagctcagagtggaagtgttccacagttcaagaaagtcgtctttcaagagtttacagatggcagcttcacacagcctctctatcggggcgagcttaacgaacatttgggactccttggtccctatatccgagccgaagtggaggacaacattatggttacctttaggaatcaagcctctcgcccctacagcttctactcctccctcatcagttatgaggaggatcagagacaaggcgctgaaccacggaagaactttgtgaaaccgaatgagacgaagacctacttctggaaagtacagcaccacatggcccccacaaaagacgaattcgattgcaaagcatgggcgtatttttcagacgttgacttggagaaagatgtacattcaggacttattggtcctttgttggtgtgtcacactaacactctcaatccagcccatggcaggcaggtgacagtccaggaattcgctcttttctttaccatctttgatgagaccaagtcctggtacttcacggaaaacatggagcgcaattgcagagccccctgtaacatacagatggaggaccctacctttaaggaaaattatcggttccacgcaatcaacggatacattatggatacactccctggccttgtgatggctcaggaccaacgaatcaggtggtacctcctcagcatgggttctaatgagaacatacactccattcacttttcaggacatgtgttcactgtccggaagaaagaagagtataagatggccctctacaatttgtatccaggcgtgtttgagaccgttgaatttcttccctctaaagctggcatctggagagtagagtgcttgatcggagaacatcttcacgcaggtatgagcaccttgttcctcgtgtacagcaacaaatgtcagaatccacttggcatggccagtggacacattcgcgactttcagatcacagcatctggccagtatggacaatgggccccaaagttggctcgcctccattactccggtagcataaatgcgtggtccactaaagaacctttcagctggattaaggtcgatcttcttgcccccatgatcatccacggcattaagacacagggagcgaggcagaaattctcctccctctacatctcacagttcattattatgtatagtttggacggcaagaagtggcaaacttatagaggtaacagtactggaacagacatggtgttcttcggcaacgttgatagctctggcatcaaacacaacatctttaatcctcccataatagctcggtacatcagattgcatccgacccactacagcattaggagtacactccgaatggagcttatgggttgcgacttgaattcctgttcaatgccactcggaatggagtctaaagccatctctgatgcacagataaccgccagtagctactttacgaacatgtttgctacgtggtcaccctctaaggcaaggcttcatttgcaaggccggtctaatgcctggagacctcaggtgaacaacccgaaagaatggctccaggtggactttcagaagaccatgaaagtaacaggtgtcactactcagggagttaagtccttggatactagcatgtatgtgaaggagttccttatttcctcatcacaagatggccaccagtggaccctcttctttcagaatggtaaggtcaaagtgtttcagggcaatcaagacagcttcacacccgtggtgaacagtcttgatcctccactcttgacacgataccttcgaatccatccacagtcttgggagcaccagattgcattgcgcatggaagtacttggatgcgaggctcaggacctctac

SEQ ID NO: 1792 - protein, 1457 aa, synthetic construct
  REGION 1..1457: note = Variant of human B-domain deleted Factor VIII
MQIELSTCFFLCLLRFCFSATRRYYLGAVELSWDYMQSDLGELPVDARFPPRVPKSFPFNTSQVYKKTLFVEFTDHLFNIAKPRPPWMGLLGPTIQAEVYDTVVITLKNMASHPVSLHAVGVSYWKASEGAEYDDQTSQREKEDDKVFPGGSHTYVWQVLKENGPMASDPPCLTYSYLSHVDLVKDLNSGLIGALLVCREGSLAKEKTQTLAKFILLFAVFDEGKSWHSETKNSLMQDRDAASARAWPKMHTVNGYVNRTLPGLIGCHRKSVYWHVIGMGTTPEVHSIFLEGHTFLVRNHRQASLGISPITFLTAQTLLRDLGQFLLFCHIPSHQHDGMEAYVKVDSCPEEPQLRMKNNEEAEDYDDDLTDSEMDVVRFDDDNSPSIIQARSGAKKHPKTWVHYIAAEEEDWDYAPLVLAPDDRSYKSQYLNNGPQRIGRKYKKVRFMAYTDETFKTREAIQHESGILGPLLYGEVGDTLLIIFKNQASRPYNIYPHGITDVRPLYSRRLPKGVKHLKDFPILPGEIFKYKWTITVEDGPTKSDPRCLTRYYSSFVNWERDLASGLIGPLLICYKESVDQRGNQIMSDKRNVILFSVFDENRSWYLTENIQRFLPNPAGVQLEDPEFQASNIMHSINGYVFDSLQLSVCLHEVAYWYILSIGAQTDFLSVFFSGYTFKHKGVYEDTLTLFPFSGETVFMSMENPGLWILGCHNSDFRNRGMTALLKVSSCDWNTGDYYEDSYEDISAYFDSKNNAIEPRSFSQNPPVLKRHQREGTRTTLQSDQEEIDYDDTISVEMKKEDFDIYDEDENQSPRSFQKKTRHYFIAAVERLWDYGMSSSPHVLRNRAQSGSVPQFKKVVFQEFTDGSFTQPLYRGELNEHLGLLGPYIRAEVEDNIMVTFRNQASRPYSFYSSLISYEEDQRQGAEPRKNFVKPNETKTYFWKVQHHMAPTKDEFDCKAWAYFSDVDLEKDVHSGLIGPLLVCHTNTLNPAHGRQVTVQEFALFFTIFDETKSWYFTENMERNCRAPCNIQMEDPTFKENYRFHAINGYIMDTLPGLVMAQDQRIRWYLLSMGSNENIHSIHFSGHVFTVRKKEEYKMALYNLYPGVFETVEFLPSKAGIWRVECLIGEHLHAGMSTLFLVYSNKCQNPLGMASGHIRDFQITASGQYGQWAPKLARLHYSGSINAWSTKEPFSWIKVDLLAPMIIHGIKTQGARQKFSSLYISQFIIMYSLDGKKWQTYRGNSTGTDMVFFGNVDSSGIKHNIFNPPIIARYIRLHPTHYSIRSTLRMELMGCDLNSCSMPLGMESKAISDAQITASSYFTNMFATWSPSKARLHLQGRSNAWRPQVNNPKEWLQVDFQKTMKVTGVTTQGVKSLDTSMYVKEFLISSSQDGHQWTLFFQNGKVKVFQGNQDSFTPVVNSLDPPLLTRYLRIHPQSWEHQIALRMEVLGCEAQDLY

SEQ ID NO: 1793 - DNA, 4371 bp, synthetic construct
  misc_feature 1..4371: note = Variant of human B-domain deleted Factor VIII
  source 1..4371: mol_type = other DNA
atgcagattgaactgtctacctgcttcttcctctgtttgctgaggttctgctttagcgccactagacggtactaccttggcgctgtggagctgtcctgggactatatgcagagtgatttgggagagcttcccgtcgacgcacgatttcctcctcgcgttccaaagtcatttccctttaacacaagccaggtgtacaagaagacgctcttcgtcgaattcaccgatcacctgttcaatatcgccaaacccagaccaccatggatgggtcttttggggcctaccatacaagcggaggtgtatgacacagttgttatcactctcaagaacatggcttctcatccggtaagtcttcacgcagtgggcgtgtcctactggaaagcttcagaaggagccgagtatgatgatcagacatcccagagggagaaagaagacgacaaggtatttccaggtgggtctcatacctatgtgtggcaagtgctcaaagagaatggccctatggcaagcgatccgccgtgtttgacttacagctacctttcacacgttgacctcgtcaaggacctcaactccgggttgattggagccttgttggtatgcagggaaggatctcttgccaaagagaagacacagaccctggccaagtttatccttctctttgctgtgttcgatgagggcaaaagttggcatagcgaaacgaagaattccctcatgcaggatcgcgacgcagccagcgccagagcttggcccaagatgcacactgtgaacggatatgtcaataggacgcttcctggcttgattgggtgtcatcggaaaagtgtctactggcacgtgatcggaatggggacaacaccagaggtccactccatatttctcgaaggccataccttccttgttcgaaaccacagacaggcatccttggggatctctcccattacctttctcactgcccaaacgctccttcgtgacttgggtcagttccttctcttttgccatatcccgtcacaccagcatgatggtatggaagcttatgtgaaagtcgacagttgtcctgaggagccacagttgcgcatgaagaataatgaagaagccgaggattacgacgacgatctcaccgattctgagatggacgtggtgaggtttgatgacgacaactctccctccatcattcaagctcggagcggggcgaagaaacaccccaagacttgggtccactatatagcggcggaagaggaggattgggattacgctcctcttgtattggcaccagatgaccgctcatacaaaagccagtacctcaacaacggaccgcagagaattggccggaagtataagaaagtgcgatttatggcctatacagacgaaacctttaagacaagggaggccatccagcatgagagtgggattttgggacctcttctttacggcgaagttggtgataccctcctcatcatcttcaagaatcaagcttctcgcccctataacatttacccacacgggatcactgacgttaggcctttgtatagcagaagacttcccaaaggcgtgaagcatctcaaagacttccccattttgccaggcgagatctttaagtacaaatggaccattacagtggaagatggaccgactaaatcagaccctcgatgccttacgcggtactattcctccttcgtgaattgggagagagatttggcaagcggactcataggaccactcctcatctgttacaaggaatctgtagaccagaggggtaaccagattatgagtgataaacgcaatgtgatcctttttagcgtcttcgacgagaaccggtcctggtacttgaccgagaatatacaaaggttccttcccaaccccgcaggcgttcagttggaagaccctgagtttcaggccagcaatattatgcactcaatcaacggctatgtgtttgatagtctccagctttctgtttgcctccatgaagtagcctattggtacatcttgtcaattggtgctcaaacagacttcctctccgtcttcttctccggctacacctttaagcacaagggcgtgtatgaggacactctcacactctttccattttctggagaaaccgtgttcatggcgatggagaatccaggcctttggatcttgggttgccacaacagtgattttcgcaatcggggaatgactgctctcctcaaagtcagcagctgtgattggaacacaggcgactattacgaagattcttacgaggacataagtgcctactttgactccaagaataacgccattgagcccagatcattctcccagaatcctcccgtgcttaaaaggcatcagcgcgaaggtaccagaactactcttcagtctgatcaagaggagattgactatgacgacaccattagcgtggaaatgaagaaggaggatttcgatatctatgacgaagatgagaaccagtctccgcggagctttcagaagaagacgcgacactacttcattgcagcagtcgaaaggctttgggactacggtatgtcatcatcccctcatgtgttgcgcaatagagctcagagtggaagtgttccacagttcaagaaagtcgtctttcaagagtttacagatggcagcttcacacagcctctctatcggggcgagcttaacgaacatttgggactccttggtccctatatccgagccgaagtggaggacaacattatggttacctttaggaatcaagcctctcgcccctacagcttctactcctccctcatcagttatgaggaggatcagagacaaggcgctgaaccacggaagaactttgtgaaaccgaatgagacgaagacctacttctggaaagtacagcaccacatggcccccacaaaagacgaattcgattgcaaagcatgggcgtatttttcagacgttgacttggagaaagatgtacattcaggacttattggtcctttgttggtgtgtcacactaacactctcaatccagcccatggcaggcaggtgacagtccaggaattcgctcttttctttaccatctttgatgagaccaagtcctggtacttcacggaaaacatggagcgcaattgcagagccccctgtaacatacagatggaggaccctacctttaaggaaaattatcggttccacgcaatcaacggatacattatggatacactccctggccttgtgatggctcaggaccaacgaatcaggtggtacctcctcagcatgggttctaatgagaacatacactccattcacttttcaggacatgtgttcactgtccggaagaaagaagagtataagatggccctctacaatttgtatccaggcgtgtttgagaccgttgaaatgcttccctctaaagctggcatctggagagtagagtgcttgatcggagaacatcttcacgcaggtatgagcaccttgttcctcgtgtacagcaacaaatgtcagaatccacttggcatggccagtggacacattcgcgactttcagatcacagcatctggccagtatggacaatgggccccaaagttggctcgcctccattactccggtagcataaatgcgtggtccactaaagaacctttcagctggattaaggtcgatcttcttgcccccatgatcatccacggcattaagacacagggagcgaggcagaaattctcctccctctacatctcacagttcattattatgtatagtttggacggcaagaagtggcaaacttatagaggtaacagtactggaacagacatggtgttcttcggcaacgttgatagctctggcatcaaacacaacatctttaatcctcccataatagctcggtacatcagattgcatccgacccactacagcattaggagtacactccgaatggagcttatgggttgcgacttgaattcctgttcaatgccactcggaatggagtctaaagccatctctgatgcacagataaccgccagtagctactttacgaacatgtttgctacgtggtcaccctctaaggcaaggcttcatttgcaaggccggtctaatgcctggagacctcaggtgaacaacccgaaagaatggctccaggtggactttcagaagaccatgaaagtaacaggtgtcactactcagggagttaagtccttggatactagcatgtatgtgaaggagttccttatttcctcatcacaagatggccaccagtggaccctcttctttcagaatggtaaggtcaaagtgtttcagggcaatcaagacagcttcacacccgtggtgaacagtcttgatcctccactcttgacacgataccttcgaatccatccacagtcttgggagcaccagattgcattgcgcatggaagtacttggatgcgaggctcaggacctctac

SEQ ID NO: 1794 - protein, 1457 aa, synthetic construct
  REGION 1..1457: note = Variant of human B-domain deleted Factor VIII
MQIELSTCFFLCLLRFCFSATRRYYLGAVELSWDYMQSDLGELPVDARFPPRVPKSFPFNTSQVYKKTLFVEFTDHLFNIAKPRPPWMGLLGPTIQAEVYDTVVITLKNMASHPVSLHAVGVSYWKASEGAEYDDQTSQREKEDDKVFPGGSHTYVWQVLKENGPMASDPPCLTYSYLSHVDLVKDLNSGLIGALLVCREGSLAKEKTQTLAKFILLFAVFDEGKSWHSETKNSLMQDRDAASARAWPKMHTVNGYVNRTLPGLIGCHRKSVYWHVIGMGTTPEVHSIFLEGHTFLVRNHRQASLGISPITFLTAQTLLRDLGQFLLFCHIPSHQHDGMEAYVKVDSCPEEPQLRMKNNEEAEDYDDDLTDSEMDVVRFDDDNSPSIIQARSGAKKHPKTWVHYIAAEEEDWDYAPLVLAPDDRSYKSQYLNNGPQRIGRKYKKVRFMAYTDETFKTREAIQHESGILGPLLYGEVGDTLLIIFKNQASRPYNIYPHGITDVRPLYSRRLPKGVKHLKDFPILPGEIFKYKWTITVEDGPTKSDPRCLTRYYSSFVNWERDLASGLIGPLLICYKESVDQRGNQIMSDKRNVILFSVFDENRSWYLTENIQRFLPNPAGVQLEDPEFQASNIMHSINGYVFDSLQLSVCLHEVAYWYILSIGAQTDFLSVFFSGYTFKHKGVYEDTLTLFPFSGETVFMAMENPGLWILGCHNSDFRNRGMTALLKVSSCDWNTGDYYEDSYEDISAYFDSKNNAIEPRSFSQNPPVLKRHQREGTRTTLQSDQEEIDYDDTISVEMKKEDFDIYDEDENQSPRSFQKKTRHYFIAAVERLWDYGMSSSPHVLRNRAQSGSVPQFKKVVFQEFTDGSFTQPLYRGELNEHLGLLGPYIRAEVEDNIMVTFRNQASRPYSFYSSLISYEEDQRQGAEPRKNFVKPNETKTYFWKVQHHMAPTKDEFDCKAWAYFSDVDLEKDVHSGLIGPLLVCHTNTLNPAHGRQVTVQEFALFFTIFDETKSWYFTENMERNCRAPCNIQMEDPTFKENYRFHAINGYIMDTLPGLVMAQDQRIRWYLLSMGSNENIHSIHFSGHVFTVRKKEEYKMALYNLYPGVFETVEMLPSKAGIWRVECLIGEHLHAGMSTLFLVYSNKCQNPLGMASGHIRDFQITASGQYGQWAPKLARLHYSGSINAWSTKEPFSWIKVDLLAPMIIHGIKTQGARQKFSSLYISQFIIMYSLDGKKWQTYRGNSTGTDMVFFGNVDSSGIKHNIFNPPIIARYIRLHPTHYSIRSTLRMELMGCDLNSCSMPLGMESKAISDAQITASSYFTNMFATWSPSKARLHLQGRSNAWRPQVNNPKEWLQVDFQKTMKVTGVTTQGVKSLDTSMYVKEFLISSSQDGHQWTLFFQNGKVKVFQGNQDSFTPVVNSLDPPLLTRYLRIHPQSWEHQIALRMEVLGCEAQDLY

SEQ ID NO: 1795 - DNA, 4371 bp, synthetic construct
  misc_feature 1..4371: note = Variant of human B-domain deleted Factor VIII
  source 1..4371: mol_type = other DNA
atgcagattgaactgtctacctgcttcttcctctgtttgctgaggttctgctttagcgccactagacggtactaccttggcgctgtggagctgtcctgggactatatgcagagtgatttgggagagcttcccgtcgacgcacgatttcctcctcgcgttccaaagtcatttccctttaacacaagccaggtgtacaagaagacgctcttcgtcgaattcaccgatcacctgttcaatatcgccaaacccagaccaccatggatgggtcttttggggcctaccatacaagcggaggtgtatgacacagttgttatcactctcaagaacatggcttctcatccggtaagtcttcacgcagtgggcgtgtcctactggaaagcttcagaaggagccgagtatgatgatcagacatcccagagggagaaagaagacgacaaggtatttccaggtgggtctcatacctatgtgtggcaagtgctcaaagagaatggccctatggcaagcgatccgccgtgtttgacttacagctacctttcacacgttgacctcgtcaaggacctcaactccgggttgattggagccttgttggtatgcagggaaggatctcttgccaaagagaagacacagaccctggccaagtttatccttctctttgctgtgttcgatgagggcaaaagttggcatagcgaaacgaagaattccctcatgcaggatcgcgacgcagccagcgccagagcttggcccaagatgcacactgtgaacggatatgtcaataggacgcttcctggcttgattgggtgtcatcggaaaagtgtctactggcacgtgatcggaatggggacaacaccagaggtccactccatatttctcgaaggccataccttccttgttcgaaaccacagacaggcatccttggggatctctcccattacctttctcactgcccaaacgctccttcgtgacttgggtcagttccttctcttttgccatatcccgtcacaccagcatgatggtatggaagcttatgtgaaagtcgacagttgtcctgaggagccacagttgcgcatgaagaataatgaagaagccgaggattacgacgacgatctcaccgattctgagatggacgtggtgaggtttgatgacgacaactctccctccatcattcaagctcggagcggggcgaagaaacaccccaagacttgggtccactatatagcggcggaagaggaggattgggattacgctcctcttgtattggcaccagatgaccgctcatacaaaagccagtacctcaacaacggaccgcagagaattggccggaagtataagaaagtgcgatttatggcctatacagacgaaacctttaagacaagggaggccatccagcatgagagtgggattttgggacctcttctttacggcgaagttggtgataccctcctcatcatcttcaagaatcaagcttctcgcccctataacatttacccacacgggatcactgacgttaggcctttgtatagcagaagacttcccaaaggcgtgaagcatctcaaagacttccccattttgccaggcgagatctttaagtacaaatggaccattacagtggaagatggaccgactaaatcagaccctcgatgccttacgcggtactattcctccttcgtgaattgggagagagatttggcaagcggactcataggaccactcctcatctgttacaaggaatctgtagaccagaggggtaaccagattatgagtgataaacgcaatgtgatcctttttagcgtcttcgacgagaaccggtcctggtacttgaccgagaatatacaaaggttccttcccaaccccgcaggcgttcagttggaagaccctgagtttcaggccagcaatattatgcactcaatcaacggctatgtgtttgatagtctccagctttctgtttgcctccatgaagtagcctattggtacatcttgtcaattggtgctcaaacagacttcctctccgtcttcttctccggctacacctttaagcacaagggcgtgtatgaggacactctcacactctttccattttctggagaaaccgtgttcatgagcatggagaatccaggcctttggatcttgggttgccacaacagtgattttcgcaatcggggaatgactgctctcctcaaagtcagcagctgtgattggaacacaggcgactattacgaagattcttacgaggacataagtgcctactttgactccaagaataacgccattgagcccagatcattctcccagaatcctcccgtgcttaaaaggcatcagcgcgaaggtaccagaactactcttcagtctgatcaagaggatattgactatgacgacaccattagcgtggaaatgaagaaggaggatttcgatatctatgacgaagatgagaaccagtctccgcggagctttcagaagaagacgcgacactacttcattgcagcagtcgaaaggctttgggactacggtatgtcatcatcccctcatgtgttgcgcaatagagctcagagtggaagtgttccacagttcaagaaagtcgtctttcaagagtttacagatggcagcttcacacagcctctctatcggggcgagcttaacgaacatttgggactccttggtccctatatccgagccgaagtggaggacaacattatggttacctttaggaatcaagcctctcgcccctacagcttctactcctccctcatcagttatgaggaggatcagagacaaggcgctgaaccacggaagaactttgtgaaaccgaatgagacgaagacctacttctggaaagtacagcaccacatggcccccacaaaagacgaattcgattgcaaagcatgggcgtatttttcagacgttgacttggagaaagatgtacattcaggacttattggtcctttgttggtgtgtcacactaacactctcaatccagcccatggcaggcaggtgacagtccaggaattcgctcttttctttaccatctttgatgagaccaagtcctggtacttcacggaaaacatggagcgcaattgcagagccccctgtaacatacagatggaggaccctacctttaaggaaaattatcggttccacgcaatcaacggatacattatggatacactccctggccttgtgatggctcaggaccaacgaatcaggtggtacctcctcagcatgggttctaatgagaacatacactccattcacttttcaggacatgtgttcactgtccggaagaaagaagagtataagatggccctctacaatttgtatccaggcgtgtttgagaccgttgaaatgcttccctctaaagctggcatctggagagtagagtgcttgatcggagaacatcttcacgcaggtatgagcaccttgttcctcgtgtacagcaacaaatgtcagaatccacttggcatggccagtggacacattcgcgactttcagatcacagcatctggccagtatggacaatgggccccaaagttggctcgcctccattactccggtagcataaatgcgtggtccactaaagaacctttcagctggattaaggtcgatcttcttgcccccatgatcatccacggcattaagacacagggagcgaggcagaaattctcctccctctacatctcacagttcattattatgtatagtttggacggcaagaagtggcaaacttatagaggtaacagtactggaacagacatggtgttcttcggcaacgttgatagctctggcatcaaacacaacatctttaatcctcccataatagctcggtacatcagattgcatccgacccactacagcattaggagtacactccgaatggagcttatgggttgcgacttgaattcctgttcaatgccactcggaatggagtctaaagccatctctgatgcacagataaccgccagtagctactttacgaacatgtttgctacgtggtcaccctctaaggcaaggcttcatttgcaaggccggtctaatgcctggagacctcaggtgaacaacccgaaagaatggctccaggtggactttcagaagaccatgaaagtaacaggtgtcactactcagggagttaagtccttggatactagcatgtatgtgaaggagttccttatttcctcatcacaagatggccaccagtggaccctcttctttcagaatggtaaggtcaaagtgtttcagggcaatcaagacagcttcacacccgtggtgaacagtcttgatcctccactcttgacacgataccttcgaatccatccacagtcttgggagcaccagattgcattgcgcatggaagtacttggatgcgaggctcaggacctctac

SEQ ID NO: 1796 - protein, 1457 aa, synthetic construct
  REGION 1..1457: note = Variant of human B-domain deleted Factor VIII
MQIELSTCFFLCLLRFCFSATRRYYLGAVELSWDYMQSDLGELPVDARFPPRVPKSFPFNTSQVYKKTLFVEFTDHLFNIAKPRPPWMGLLGPTIQAEVYDTVVITLKNMASHPVSLHAVGVSYWKASEGAEYDDQTSQREKEDDKVFPGGSHTYVWQVLKENGPMASDPPCLTYSYLSHVDLVKDLNSGLIGALLVCREGSLAKEKTQTLAKFILLFAVFDEGKSWHSETKNSLMQDRDAASARAWPKMHTVNGYVNRTLPGLIGCHRKSVYWHVIGMGTTPEVHSIFLEGHTFLVRNHRQASLGISPITFLTAQTLLRDLGQFLLFCHIPSHQHDGMEAYVKVDSCPEEPQLRMKNNEEAEDYDDDLTDSEMDVVRFDDDNSPSIIQARSGAKKHPKTWVHYIAAEEEDWDYAPLVLAPDDRSYKSQYLNNGPQRIGRKYKKVRFMAYTDETFKTREAIQHESGILGPLLYGEVGDTLLIIFKNQASRPYNIYPHGITDVRPLYSRRLPKGVKHLKDFPILPGEIFKYKWTITVEDGPTKSDPRCLTRYYSSFVNWERDLASGLIGPLLICYKESVDQRGNQIMSDKRNVILFSVFDENRSWYLTENIQRFLPNPAGVQLEDPEFQASNIMHSINGYVFDSLQLSVCLHEVAYWYILSIGAQTDFLSVFFSGYTFKHKGVYEDTLTLFPFSGETVFMSMENPGLWILGCHNSDFRNRGMTALLKVSSCDWNTGDYYEDSYEDISAYFDSKNNAIEPRSFSQNPPVLKRHQREGTRTTLQSDQEDIDYDDTISVEMKKEDFDIYDEDENQSPRSFQKKTRHYFIAAVERLWDYGMSSSPHVLRNRAQSGSVPQFKKVVFQEFTDGSFTQPLYRGELNEHLGLLGPYIRAEVEDNIMVTFRNQASRPYSFYSSLISYEEDQRQGAEPRKNFVKPNETKTYFWKVQHHMAPTKDEFDCKAWAYFSDVDLEKDVHSGLIGPLLVCHTNTLNPAHGRQVTVQEFALFFTIFDETKSWYFTENMERNCRAPCNIQMEDPTFKENYRFHAINGYIMDTLPGLVMAQDQRIRWYLLSMGSNENIHSIHFSGHVFTVRKKEEYKMALYNLYPGVFETVEMLPSKAGIWRVECLIGEHLHAGMSTLFLVYSNKCQNPLGMASGHIRDFQITASGQYGQWAPKLARLHYSGSINAWSTKEPFSWIKVDLLAPMIIHGIKTQGARQKFSSLYISQFIIMYSLDGKKWQTYRGNSTGTDMVFFGNVDSSGIKHNIFNPPIIARYIRLHPTHYSIRSTLRMELMGCDLNSCSMPLGMESKAISDAQITASSYFTNMFATWSPSKARLHLQGRSNAWRPQVNNPKEWLQVDFQKTMKVTGVTTQGVKSLDTSMYVKEFLISSSQDGHQWTLFFQNGKVKVFQGNQDSFTPVVNSLDPPLLTRYLRIHPQSWEHQIALRMEVLGCEAQDLY

SEQ ID NO: 1797 - DNA, 4371 bp, synthetic construct
  misc_feature 1..4371: note = Variant of human B-domain deleted Factor VIII
  source 1..4371: mol_type = other DNA
atgcagattgaactgtctacctgcttcttcctctgtttgctgaggttctgctttagcgccactagacggtactaccttggcgctgtggagctgtcctgggactatatgcagagtgatttgggagagcttcccgtcgacgcacgatttcctcctcgcgttccaaagtcatttccctttaacacaagccaggtgtacaagaagacgctcttcgtcgaattcaccgatcacctgttcaatatcgccaaacccagaccaccatggatgggtcttttggggcctaccatacaagcggaggtgtatgacacagttgttatcactctcaagaacatggcttctcatccggtaagtcttcacgcagtgggcgtgtcctactggaaagcttcagaaggagccgagtatgatgatcagacatcccagagggagaaagaagacgacaaggtatttccaggtgggtctcatacctatgtgtggcaagtgctcaaagagaatggccctatggcaagcgatccgccgtgtttgactgcgagctacctttcacacgttgacctcgtcaaggacctcaactccgggttgattggagccttgttggtatgcagggaaggatctcttgccaaagagaagacacagaccctggccaagtttatccttctctttgctgtgttcgatgagggcaaaagttggcatagcgaaacgaagaattccctcatgcaggatcgcgacgcagccagcgccagagcttggcccaagatgcacactgtgaacggatatgtcaataggacgcttcctggcttgattgggtgtcatcggaaaagtgtctactggcacgtgatcggaatggggacaacaccagaggtccactccatatttctcgaaggccataccttccttgttcgaaaccacagacaggcatccttggggatctctcccattacctttctcactgcccaaacgctccttcgtgacttgggtcagttccttctcttttgccatatcccgtcacaccagcatgatggtatggaagcttatgtgaaagtcgacagttgtcctgaggagccacagttgcgcatgaagaataatgaagaagccgaggattacgacgacgatctcaccgattctgagatggacgtggtgaggtttgatgacgacaactctccctccatcattcaagctcggagcggggcgaagaaacaccccaagacttgggtccactatatagcggcggaagaggaggattgggattacgctcctcttgtattggcaccagatgaccgctcatacaaaagccagtacctcaacaacggaccgcagagaattggccggaagtataagaaagtgcgatttatggcctatacagacgaaacctttaagacaagggaggccatccagcatgagagtgggattttgggacctcttctttacggcgaagttggtgataccctcctcatcatcttcaagaatcaagcttctcgcccctataacatttacccacacgggatcactgacgttaggcctttgtatagcagaagacttcccaaaggcgtgaagcatctcaaagacttccccattttgccaggcgagatctttaagtacaaatggaccattacagtggaagatggaccgactaaatcagaccctcgatgccttacgcggtactattcctccttcgtgaattgggagagagatttggcaagcggactcataggaccactcctcatctgttacaaggaatctgtagaccagaggggtaaccagattatgagtgataaacgcaatgtgatcctttttagcgtcttcgacgagaaccggtcctggtacttgaccgagaatatacaaaggttccttcccaaccccgcaggcgttcagttggaagaccctgagtttcaggccagcaatattatgcactcaatcaacggctatgtgtttgatagtctccagctttctgtttgcctccatgaagtagcctattggtacatcttgtcaattggtgctcaaacagacttcctctccgtcttcttctccggctacacctttaagcacaagggcgtgtatgaggacactctcacactctttccattttctggagaaaccgtgttcatgagcatggagaatccaggcctttggatcttgggttgccacaacagtgattttcgcaatcggggaatgactgctctcctcaaagtcagcagctgtgattggaacacaggcgactattacgaagattcttacgaggacataagtgcctactttgactccaagaataacgccattgagcccagatcattctcccagaatcctcccgtgcttaaaaggcatcagcgcgaaggtaccagaactactcttcagtctgatcaagaggagattgactatgacgacaccattagcgtggaaatgaagaaggaggatttcgatatctatgacgaagatgagaaccagtctccgcggagctttcagaagaagacgcgacactacttcattgcagcagtcgaaaggctttgggactacggtatgtcatcatcccctcatgtgttgcgcaatagagctcagagtggaagtgttccacagttcaagaaagtcgtctttcaagagtttacagatggcagcttcacacagcctctctatcggggcgagcttaacgaacatttgggactccttggtccctatatccgagccgaagtggaggacaacattatggttacctttaggaatcaagcctctcgcccctacagcttctactcctccctcatcagttatgaggaggatcagagacaaggcgctgaaccacggaagaactttgtgaaaccgaatgagacgaagacctacttctggaaagtacagcaccacatggcccccacaaaagacgaattcgattgcaaagcatgggcgtatttttcagacgttgacttggagaaagatgtacattcaggacttattggtcctttgttggtgtgtcacactaacactctcaatccagcccatggcaggcaggtgacagtccaggaattcgctcttttctttaccatctttgatgagaccaagtcctggtacttcacggaaaacatggagcgcaattgcagagccccctgtaacatacagatggaggaccctacctttaaggaaaattatcggttccacgcaatcaacggatacattatggatacactccctggccttgtgatggctcaggaccaacgaatcaggtggtacctcctcagcatgggttctaatgagaacatacactccattcacttttcaggacatgtgttcactgtccggaagaaagaagagtataagatggccctctacaatttgtatccaggcgtgtttgagaccgttgaaatgcttccctctaaagctggcatctggagagtagagtgcttgatcggagaacatcttcacgcaggtatgagcaccttgttcctcgtgtacagcaacaaatgtcagaatccacttggcatggccagtggacacattcgcgactttcagatcacagcatctggccagtatggacaatgggccccaaagttggctcgcctccattactccggtagcataaatgcgtggtccactaaagaacctttcagctggattaaggtcgatcttcttgcccccatgatcatccacggcattaagacacagggagcgaggcagaaattctcctccctctacatctcacagttcattattatgtatagtttggacggcaagaagtggcaaacttatagaggtaacagtactggaacagacatggtgttcttcggcaacgttgatagctctggcatcaaacacaacatctttaatcctcccataatagctcggtacatcagattgcatccgacccactacagcattaggagtacactccgaatggagcttatgggttgcgacttgaattcctgttcaatgccactcggaatggagtctaaagccatctctgatgcacagataaccgccagtagctactttacgaacatgtttgctacgtggtcaccctctaaggcaaggcttcatttgcaaggccggtctaatgcctggagacctcaggtgaacaacccgaaagaatggctccaggtggactttcagaagaccatgaaagtaacaggtgtcactactcagggagttaagtccttggatactagcatgtatgtgaaggagttccttatttcctcatcacaagatggccaccagtggaccctcttctttcagaatggtaaggtcaaagtgtttcagggcaatcaagacagcttcacacccgtggtgaacagtcttgatcctccactcttgacacgataccttcgaatccatccacagtcttgggagcaccagattgcattgcgcatggaagtacttggatgcgaggctcaggacctctac

SEQ ID NO: 1798 - protein, 1457 aa, synthetic construct
  REGION 1..1457: note = Variant of human B-domain deleted Factor VIII
MQIELSTCFFLCLLRFCFSATRRYYLGAVELSWDYMQSDLGELPVDARFPPRVPKSFPFNTSQVYKKTLFVEFTDHLFNIAKPRPPWMGLLGPTIQAEVYDTVVITLKNMASHPVSLHAVGVSYWKASEGAEYDDQTSQREKEDDKVFPGGSHTYVWQVLKENGPMASDPPCLTASYLSHVDLVKDLNSGLIGALLVCREGSLAKEKTQTLAKFILLFAVFDEGKSWHSETKNSLMQDRDAASARAWPKMHTVNGYVNRTLPGLIGCHRKSVYWHVIGMGTTPEVHSIFLEGHTFLVRNHRQASLGISPITFLTAQTLLRDLGQFLLFCHIPSHQHDGMEAYVKVDSCPEEPQLRMKNNEEAEDYDDDLTDSEMDVVRFDDDNSPSIIQARSGAKKHPKTWVHYIAAEEEDWDYAPLVLAPDDRSYKSQYLNNGPQRIGRKYKKVRFMAYTDETFKTREAIQHESGILGPLLYGEVGDTLLIIFKNQASRPYNIYPHGITDVRPLYSRRLPKGVKHLKDFPILPGEIFKYKWTITVEDGPTKSDPRCLTRYYSSFVNWERDLASGLIGPLLICYKESVDQRGNQIMSDKRNVILFSVFDENRSWYLTENIQRFLPNPAGVQLEDPEFQASNIMHSINGYVFDSLQLSVCLHEVAYWYILSIGAQTDFLSVFFSGYTFKHKGVYEDTLTLFPFSGETVFMSMENPGLWILGCHNSDFRNRGMTALLKVSSCDWNTGDYYEDSYEDISAYFDSKNNAIEPRSFSQNPPVLKRHQREGTRTTLQSDQEEIDYDDTISVEMKKEDFDIYDEDENQSPRSFQKKTRHYFIAAVERLWDYGMSSSPHVLRNRAQSGSVPQFKKVVFQEFTDGSFTQPLYRGELNEHLGLLGPYIRAEVEDNIMVTFRNQASRPYSFYSSLISYEEDQRQGAEPRKNFVKPNETKTYFWKVQHHMAPTKDEFDCKAWAYFSDVDLEKDVHSGLIGPLLVCHTNTLNPAHGRQVTVQEFALFFTIFDETKSWYFTENMERNCRAPCNIQMEDPTFKENYRFHAINGYIMDTLPGLVMAQDQRIRWYLLSMGSNENIHSIHFSGHVFTVRKKEEYKMALYNLYPGVFETVEMLPSKAGIWRVECLIGEHLHAGMSTLFLVYSNKCQNPLGMASGHIRDFQITASGQYGQWAPKLARLHYSGSINAWSTKEPFSWIKVDLLAPMIIHGIKTQGARQKFSSLYISQFIIMYSLDGKKWQTYRGNSTGTDMVFFGNVDSSGIKHNIFNPPIIARYIRLHPTHYSIRSTLRMELMGCDLNSCSMPLGMESKAISDAQITASSYFTNMFATWSPSKARLHLQGRSNAWRPQVNNPKEWLQVDFQKTMKVTGVTTQGVKSLDTSMYVKEFLISSSQDGHQWTLFFQNGKVKVFQGNQDSFTPVVNSLDPPLLTRYLRIHPQSWEHQIALRMEVLGCEAQDLY

SEQ ID NO: 1799 - DNA, 4371 bp, synthetic construct
  misc_feature 1..4371: note = Variant of human B-domain deleted Factor VIII
  source 1..4371: mol_type = other DNA
atgcagattgaactgtctacctgcttcttcctctgtttgctgaggttctgctttagcgccactagacggtactaccttggcgctgtggagctgtcctgggactatatgcagagtgatttgggagagcttcccgtcgacgcacgatttcctcctcgcgttccaaagtcatttccctttaacacaagccaggtgtacaagaagacgctcttcgtcgaattcaccgatcacctgttcaatatcgccaaacccagaccaccatggatgggtcttttggggcctaccatacaagcggaggtgtatgacacagttgttatcactctcaagaacatggcttctcatccggtaagtcttcacgcagtgggcgtgtcctactggaaagcttcagaaggagccgagtatgatgatcagacatcccagagggagaaagaagacgacaaggtatttccaggtgggtctcatacctatgtgtggcaagtgctcaaagagaatggccctatggcaagcgatccgccgtgtttgacttacagctacctttcacacgttgacctcgtcaaggacctcaactccgggttgattggagccttgttggtatgcagggaaggatctcttgccaaagagaagacacagaccctggccaagtttatccttctctttgctgtgttcgatgagggcaaaagttggcatagcgaaacgaagaattccctcatgcaggatcgcgacgcagccagcgccagagcttggcccaagatgcacactgtgaacggatatgtcaataggacgcttcctggcttgattgggtgtcatcggaaaagtgtctactggcacgtgatcggaatggggacaacaccagaggtccactccatatttctcgaaggccataccttccttgttcgaaaccacagacaggcatccttggggatctctcccattacctttctcactgcccaaacgctccttcgtgacttgggtcagttccttctcttttgccatatcccgtcacaccagcatgatggtatggaagcttatgtgaaagtcgacagttgtcctgaggagccacagttgcgcatgaagaataatgaagaagccgaggattacgacgacgatctcaccgattctgagatggacgtggtgaggtttgatgacgacaactctccctccatcattcaagctcggagcggggcgaagaaacaccccaagacttgggtccactatatagcggcggaagaggaggattgggattacgctcctcttgtattggcaccagatgaccgctcatacaaaagccagtacctcaacaacggaccgcagagaattggccggaagtataagaaagtgcgatttatggcctatacagacgaaacctttaagacaagggaggccatccagcatgagagtgggattttgggacctcttctttacggcgaagttggtgataccctcctcatcatcttcaagaatcaagcttctcgcccctataacatttacccacacgggatcactgacgttaggcctttgtatagcagaagacttcccaaaggcgtgaagcatctcaaagacttccccattttgccaggcgagatctttaagtacaaatggaccattacagtggaagatggaccgactaaatcagaccctcgatgccttacgcggtactattcctccttcgtgaattgggagagagatttggcaagcggactcataggaccactcctcatctgttacaaggaatctgtagaccagaggggtaaccagattatgagtgataaacgcaatgtgatcctttttagcgtcttcgacgagaaccggtcctggtacttgaccgagaatatacaaaggttccttcccaaccccgcaggcgttcagttggaagaccctgagtttcaggccagcaatattatgcactcaatcaacggctatgtgtttgatagtctccagctttctgtttgcctccatgaagtagcctattggtacatcttgtcaattggtgctcaaacagacttcctctccgtcttcttctccggctacacctttaagcacaagggcgtgtatgaggacactctcacactctttccattttctggagaaaccgtgttcatgagcatggagaatccaggcctttggatcttgggttgccacaacagtgattttcgcaatcggggaatgactgctctcctcaaagtcagcagctgtgattggaacacaggcgactattacgaagattcttacgaggacataagtgcctactttgactccaagaataacgccattgagcccagatcattctcccagaatcctcccgtgcttaaaaggcatcagcgcgaaggtaccagaactactcttcagtctgatcaagaggagattgactatatggacaccattagcgtggaaatgaagaaggaggatttcgatatctatgacgaagatgagaaccagtctccgcggagctttcagaagaagacgcgacactacttcattgcagcagtcgaaaggctttgggactacggtatgtcatcatcccctcatgtgttgcgcaatagagctcagagtggaagtgttccacagttcaagaaagtcgtctttcaagagtttacagatggcagcttcacacagcctctctatcggggcgagcttaacgaacatttgggactccttggtccctatatccgagccgaagtggaggacaacattatggttacctttaggaatcaagcctctcgcccctacagcttctactcctccctcatcagttatgaggaggatcagagacaaggcgctgaaccacggaagaactttgtgaaaccgaatgagacgaagacctacttctggaaagtacagcaccacatggcccccacaaaagacgaattcgattgcaaagcatgggcgtatttttcagacgttgacttggagaaagatgtacattcaggacttattggtcctttgttggtgtgtcacactaacactctcaatccagcccatggcaggcaggtgacagtccaggaattcgctcttttctttaccatctttgatgagaccaagtcctggtacttcacggaaaacatggagcgcaattgcagagccccctgtaacatacagatggaggaccctacctttaaggaaaattatcggttccacgcaatcaacggatacattatggatacactccctggccttgtgatggctcaggaccaacgaatcaggtggtacctcctcagcatgggttctaatgagaacatacactccattcacttttcaggacatgtgttcactgtccggaagaaagaagagtataagatggccctctacaatttgtatccaggcgtgtttgagaccgttgaaatgcttccctctaaagctggcatctggagagtagagtgcttgatcggagaacatcttcacgcaggtatgagcaccttgttcctcgtgtacagcaacaaatgtcagaatccacttggcatggccagtggacacattcgcgactttcagatcacagcatctggccagtatggacaatgggccccaaagttggctcgcctccattactccggtagcataaatgcgtggtccactaaagaacctttcagctggattaaggtcgatcttcttgcccccatgatcatccacggcattaagacacagggagcgaggcagaaattctcctccctctacatctcacagttcattattatgtatagtttggacggcaagaagtggcaaacttatagaggtaacagtactggaacagacatggtgttcttcggcaacgttgatagctctggcatcaaacacaacatctttaatcctcccataatagctcggtacatcagattgcatccgacccactacagcattaggagtacactccgaatggagcttatgggttgcgacttgaattcctgttcaatgccactcggaatggagtctaaagccatctctgatgcacagataaccgccagtagctactttacgaacatgtttgctacgtggtcaccctctaaggcaaggcttcatttgcaaggccggtctaatgcctggagacctcaggtgaacaacccgaaagaatggctccaggtggactttcagaagaccatgaaagtaacaggtgtcactactcagggagttaagtccttggatactagcatgtatgtgaaggagttccttatttcctcatcacaagatggccaccagtggaccctcttctttcagaatggtaaggtcaaagtgtttcagggcaatcaagacagcttcacacccgtggtgaacagtcttgatcctccactcttgacacgataccttcgaatccatccacagtcttgggagcaccagattgcattgcgcatggaagtacttggatgcgaggctcaggacctctac

SEQ ID NO: 1800 - protein, 1457 aa, synthetic construct
  REGION 1..1457: note = Variant of human B-domain deleted Factor VIII
MQIELSTCFFLCLLRFCFSATRRYYLGAVELSWDYMQSDLGELPVDARFPPRVPKSFPFNTSQVYKKTLFVEFTDHLFNIAKPRPPWMGLLGPTIQAEVYDTVVITLKNMASHPVSLHAVGVSYWKASEGAEYDDQTSQREKEDDKVFPGGSHTYVWQVLKENGPMASDPPCLTYSYLSHVDLVKDLNSGLIGALLVCREGSLAKEKTQTLAKFILLFAVFDEGKSWHSETKNSLMQDRDAASARAWPKMHTVNGYVNRTLPGLIGCHRKSVYWHVIGMGTTPEVHSIFLEGHTFLVRNHRQASLGISPITFLTAQTLLRDLGQFLLFCHIPSHQHDGMEAYVKVDSCPEEPQLRMKNNEEAEDYDDDLTDSEMDVVRFDDDNSPSIIQARSGAKKHPKTWVHYIAAEEEDWDYAPLVLAPDDRSYKSQYLNNGPQRIGRKYKKVRFMAYTDETFKTREAIQHESGILGPLLYGEVGDTLLIIFKNQASRPYNIYPHGITDVRPLYSRRLPKGVKHLKDFPILPGEIFKYKWTITVEDGPTKSDPRCLTRYYSSFVNWERDLASGLIGPLLICYKESVDQRGNQIMSDKRNVILFSVFDENRSWYLTENIQRFLPNPAGVQLEDPEFQASNIMHSINGYVFDSLQLSVCLHEVAYWYILSIGAQTDFLSVFFSGYTFKHKGVYEDTLTLFPFSGETVFMSMENPGLWILGCHNSDFRNRGMTALLKVSSCDWNTGDYYEDSYEDISAYFDSKNNAIEPRSFSQNPPVLKRHQREGTRTTLQSDQEEIDYMDTISVEMKKEDFDIYDEDENQSPRSFQKKTRHYFIAAVERLWDYGMSSSPHVLRNRAQSGSVPQFKKVVFQEFTDGSFTQPLYRGELNEHLGLLGPYIRAEVEDNIMVTFRNQASRPYSFYSSLISYEEDQRQGAEPRKNFVKPNETKTYFWKVQHHMAPTKDEFDCKAWAYFSDVDLEKDVHSGLIGPLLVCHTNTLNPAHGRQVTVQEFALFFTIFDETKSWYFTENMERNCRAPCNIQMEDPTFKENYRFHAINGYIMDTLPGLVMAQDQRIRWYLLSMGSNENIHSIHFSGHVFTVRKKEEYKMALYNLYPGVFETVEMLPSKAGIWRVECLIGEHLHAGMSTLFLVYSNKCQNPLGMASGHIRDFQITASGQYGQWAPKLARLHYSGSINAWSTKEPFSWIKVDLLAPMIIHGIKTQGARQKFSSLYISQFIIMYSLDGKKWQTYRGNSTGTDMVFFGNVDSSGIKHNIFNPPIIARYIRLHPTHYSIRSTLRMELMGCDLNSCSMPLGMESKAISDAQITASSYFTNMFATWSPSKARLHLQGRSNAWRPQVNNPKEWLQVDFQKTMKVTGVTTQGVKSLDTSMYVKEFLISSSQDGHQWTLFFQNGKVKVFQGNQDSFTPVVNSLDPPLLTRYLRIHPQSWEHQIALRMEVLGCEAQDLY

SEQ ID NO: 1801 - DNA, 4371 bp, synthetic construct
  misc_feature 1..4371: note = Variant of human B-domain deleted Factor VIII
  source 1..4371: mol_type = other DNA
atgcagattgaactgtctacctgcttcttcctctgtttgctgaggttctgctttagcgccactagacggtactaccttggcgctgtggagctgtcctgggactatatgcagagtgatttgggagagcttcccgtcgacgcacgatttcctcctcgcgttccaaagtcatttccctttaacacaagccaggtgtacaagaagacgctcttcgtcgaattcaccgatcacctgttcaatatcgccaaacccagaccaccatggatgggtcttttggggcctaccatacaagcggaggtgtatgacacagttgttatcactctcaagaacatggcttctcatccggtaagtcttcacgcagtgggcgtgtcctactggaaagcttcagaaggagccgagtatgatgatcagacatcccagagggagaaagaagacgacaaggtatttccaggtgggtctcatacctatgtgtggcaagtgctcaaagagaatggccctatggcaagcgatccgccgtgtttgacttacagctacctttcacacgttgacctcgtcaaggacctcaactccgggttgattggagccttgttggtatgcagggaaggatctcttgccaaagagaagacacagaccctggccaagtttatccttctctttgctgtgttcgatgagggcaaaagttggcatagcgaaacgaagaattccctcatgcaggatcgcgacgcagccagcgccagagcttggcccaagatgcacactgtgaacggatatgtcaataggacgcttcctggcttgattgggtgtcatcggaaaagtgtctactggcacgtgatcggaatggggacaacaccagaggtccactccatatttctcgaaggccataccttccttgttcgaaaccacagacaggcatccttggggatctctcccattacctttctcactgcccaaacgctccttcgtgacttgggtcagttccttctcttttgccatatcccgtcacaccagcatgatggtatggaagcttatgtgaaagtcgacagttgtcctgaggagccacagttgcgcatgaagaataatgaagaagccgaggattacgacgacgatctcaccgattctgagatggacgtggtgaggtttgatgacgacaactctccctccatcattcaagctcggagcggggcgaagaaacaccccaagacttgggtccactatatagcggcggaagaggaggattgggattacgctcctcttgtattggcaccagatgaccgctcatacaaaagccagtacctcaacaacggaccgcagagaattggccggaagtataagaaagtgcgatttatggcctatacagacgaaacctttaagacaagggaggccatccagcatgagagtgggattttgggacctcttctttacggcgaagttggtgataccctcctcatcatcttcaagaatcaagcttctcgcccctataacatttacccacacgggatcactgacgttaggcctttgtatagcagaagacttcccaaaggcgtgaagcatctcaaagacttccccattttgccaggcgagatctttaagtacaaatggaccattacagtggaagatggaccgactaaatcagaccctcgatgccttacgcggtactattcctccttcgtgaattgggagagagatttggcaagcggactcataggaccactcctcatctgttacaaggaatctgtagaccagaggggtaaccagattatgagtgataaacgcaatgtgatcctttttagcgtcttcgacgagaaccggtcctggtacttgaccgagaatatacaaaggttccttcccaaccccgcaggcgttcagttggaagaccctgagtttcaggccagcaatattatgcactcaatcaacggctatgtgtttgatagtctccagctttctgtttgcctccatgaagtagcctattggtacatcttgtcaattggtgctcaaacagacattctctccgtcttcttctccggctacacctttaagcacaagggcgtgtatgaggacactctcacactctttccattttctggagaaaccgtgttcatgagcatggagaatccaggcctttggatcttgggttgccacaacagtgattttcgcaatcggggaatgactgctctcctcaaagtcagcagctgtgattggaacacaggcgactattacgaagattcttacgaggacataagtgcctactttgactccaagaataacgccattgagcccagatcattctcccagaatcctcccgtgcttaaaaggcatcagcgcgaaggtaccagaactactcttcagtctgatcaagaggagattgactatgacgacaccattagcgtggaaatgaagaaggaggatttcgatatctatgacgaagatgagaaccagtctccgcggagctttcagaagaagacgcgacactacttcattgcagcagtcgaaaggctttgggactacggtatgtcatcatcccctcatgtgttgcgcaatagagctcagagtggaagtgttccacagttcaagaaagtcgtctttcaagagtttacagatggcagcttcacacagcctctctatcggggcgagcttaacgaacatttgggactccttggtccctatatccgagccgaagtggaggacaacattatggttacctttaggaatcaagcctctcgcccctacagcttctactcctccctcatcagttatgaggaggatcagagacaaggcgctgaaccacggaagaactttgtgaaaccgaatgagacgaagacctacttctggaaagtacagcaccacatggcccccacaaaagacgaattcgattgcaaagcatgggcgtatttttcagacgttgacttggagaaagatgtacattcaggacttattggtcctttgttggtgtgtcacactaacactctcaatccagcccatggcaggcaggtgacagtccaggaattcgctcttttctttaccatctttgatgagaccaagtcctggtacttcacggaaaacatggagcgcaattgcagagccccctgtaacatacagatggaggaccctacctttaaggaaaattatcggttccacgcaatcaacggatacattatggatacactccctggccttgtgatggctcaggaccaacgaatcaggtggtacctcctcagcatgggttctaatgagaacatacactccattcacttttcaggacatgtgttcactgtccggaagaaagaagagtataagatggccctctacaatttgtatccaggcgtgtttgagaccgttgaaatgcttccctctaaagctggcatctggagagtagagtgcttgatcggagaacatcttcacgcaggtatgagcaccttgttcctcgtgtacagcaacaaatgtcagaatccacttggcatggccagtggacacattcgcgactttcagatcacagcatctggccagtatggacaatgggccccaaagttggctcgcctccattactccggtagcataaatgcgtggtccactaaagaacctttcagctggattaaggtcgatcttcttgcccccatgatcatccacggcattaagacacagggagcgaggcagaaattctcctccctctacatctcacagttcattattatgtatagtttggacggcaagaagtggcaaacttatagaggtaacagtactggaacagacatggtgttcttcggcaacgttgatagctctggcatcaaacacaacatctttaatcctcccataatagctcggtacatcagattgcatccgacccactacagcattaggagtacactccgaatggagcttatgggttgcgacttgaattcctgttcaatgccactcggaatggagtctaaagccatctctgatgcacagataaccgccagtagctactttacgaacatgtttgctacgtggtcaccctctaaggcaaggcttcatttgcaaggccggtctaatgcctggagacctcaggtgaacaacccgaaagaatggctccaggtggactttcagaagaccatgaaagtaacaggtgtcactactcagggagttaagtccttggatactagcatgtatgtgaaggagttccttatttcctcatcacaagatggccaccagtggaccctcttctttcagaatggtaaggtcaaagtgtttcagggcaatcaagacagcttcacacccgtggtgaacagtcttgatcctccactcttgacacgataccttcgaatccatccacagtcttgggagcaccagattgcattgcgcatggaagtacttggatgcgaggctcaggacctctac

SEQ ID NO: 1802 - protein, 1457 aa, synthetic construct
  REGION 1..1457: note = Variant of human B-domain deleted Factor VIII
MQIELSTCFFLCLLRFCFSATRRYYLGAVELSWDYMQSDLGELPVDARFPPRVPKSFPFNTSQVYKKTLFVEFTDHLFNIAKPRPPWMGLLGPTIQAEVYDTVVITLKNMASHPVSLHAVGVSYWKASEGAEYDDQTSQREKEDDKVFPGGSHTYVWQVLKENGPMASDPPCLTYSYLSHVDLVKDLNSGLIGALLVCREGSLAKEKTQTLAKFILLFAVFDEGKSWHSETKNSLMQDRDAASARAWPKMHTVNGYVNRTLPGLIGCHRKSVYWHVIGMGTTPEVHSIFLEGHTFLVRNHRQASLGISPITFLTAQTLLRDLGQFLLFCHIPSHQHDGMEAYVKVDSCPEEPQLRMKNNEEAEDYDDDLTDSEMDVVRFDDDNSPSIIQARSGAKKHPKTWVHYIAAEEEDWDYAPLVLAPDDRSYKSQYLNNGPQRIGRKYKKVRFMAYTDETFKTREAIQHESGILGPLLYGEVGDTLLIIFKNQASRPYNIYPHGITDVRPLYSRRLPKGVKHLKDFPILPGEIFKYKWTITVEDGPTKSDPRCLTRYYSSFVNWERDLASGLIGPLLICYKESVDQRGNQIMSDKRNVILFSVFDENRSWYLTENIQRFLPNPAGVQLEDPEFQASNIMHSINGYVFDSLQLSVCLHEVAYWYILSIGAQTDILSVFFSGYTFKHKGVYEDTLTLFPFSGETVFMSMENPGLWILGCHNSDFRNRGMTALLKVSSCDWNTGDYYEDSYEDISAYFDSKNNAIEPRSFSQNPPVLKRHQREGTRTTLQSDQEEIDYDDTISVEMKKEDFDIYDEDENQSPRSFQKKTRHYFIAAVERLWDYGMSSSPHVLRNRAQSGSVPQFKKVVFQEFTDGSFTQPLYRGELNEHLGLLGPYIRAEVEDNIMVTFRNQASRPYSFYSSLISYEEDQRQGAEPRKNFVKPNETKTYFWKVQHHMAPTKDEFDCKAWAYFSDVDLEKDVHSGLIGPLLVCHTNTLNPAHGRQVTVQEFALFFTIFDETKSWYFTENMERNCRAPCNIQMEDPTFKENYRFHAINGYIMDTLPGLVMAQDQRIRWYLLSMGSNENIHSIHFSGHVFTVRKKEEYKMALYNLYPGVFETVEMLPSKAGIWRVECLIGEHLHAGMSTLFLVYSNKCQNPLGMASGHIRDFQITASGQYGQWAPKLARLHYSGSINAWSTKEPFSWIKVDLLAPMIIHGIKTQGARQKFSSLYISQFIIMYSLDGKKWQTYRGNSTGTDMVFFGNVDSSGIKHNIFNPPIIARYIRLHPTHYSIRSTLRMELMGCDLNSCSMPLGMESKAISDAQITASSYFTNMFATWSPSKARLHLQGRSNAWRPQVNNPKEWLQVDFQKTMKVTGVTTQGVKSLDTSMYVKEFLISSSQDGHQWTLFFQNGKVKVFQGNQDSFTPVVNSLDPPLLTRYLRIHPQSWEHQIALRMEVLGCEAQDLY

SEQ ID NO: 1803 - DNA, 4371 bp, synthetic construct
  misc_feature 1..4371: note = Variant of human B-domain deleted Factor VIII
  source 1..4371: mol_type = other DNA
atgcagattgaactgtctacctgcttcttcctctgtttgctgaggttctgctttagcgccactagacggtactaccttggcgctgtggagctgtcctgggactatatgcagagtgatttgggagagcttcccgtcgacgcacgatttcctcctcgcgttccaaagtcatttccctttaacacaagccaggtgtacaagaagacgctcttcgtcgaattcaccgatcacctgttcaatatcgccaaacccagaccaccatggatgggtcttttggggcctaccatacaagcggaggtgtatgacacagttgttatcactctcaagaacatggcttctcatccggtaagtcttcacgcagtgggcgtgtcctactggaaagcttcagaaggagccgagtatgatgatcagacatcccagagggagaaagaagacgacaaggtatttccaggtgggtctcatacctatgtgtggggggtgctcaaagagaatggccctatggcaagcgatccgccgtgtttgacttacagctacctttcacacgttgacctcgtcaaggacctcaactccgggttgattggagccttgttggtatgcagggaaggatctcttgccaaagagaagacacagaccctggccaagtttatccttctctttgctgtgttcgatgagggcaaaagttggcatagcgaaacgaagaattccctcatgcaggatcgcgacgcagccagcgccagagcttggcccaagatgcacactgtgaacggatatgtcaataggacgcttcctggcttgattgggtgtcatcggaaaagtgtctactggcacgtgatcggaatggggacaacaccagaggtccactccatatttctcgaaggccataccttccttgttcgaaaccacagacaggcatccttggggatctctcccattacctttctcactgcccaaacgctccttcgtgacttgggtcagttccttctcttttgccatatcccgtcacaccagcatgatggtatggaagcttatgtgaaagtcgacagttgtcctgaggagccacagttgcgcatgaagaataatgaagaagccgaggattacgacgacgatctcaccgattctgagatggacgtggtgaggtttgatgacgacaactctccctccatcattcaagctcggagcggggcgaagaaacaccccaagacttgggtccactatatagcggcggaagaggaggattgggattacgctcctcttgtattggcaccagatgaccgctcatacaaaagccagtacctcaacaacggaccgcagagaattggccggaagtataagaaagtgcgatttatggcctatacagacgaaacctttaagacaagggaggccatccagcatgagagtgggattttgggacctcttctttacggcgaagttggtgataccctcctcatcatcttcaagaatcaagcttctcgcccctataacatttacccacacgggatcactgacgttaggcctttgtatagcagaagacttcccaaaggcgtgaagcatctcaaagacttccccattttgccaggcgagatctttaagtacaaatggaccattacagtggaagatggaccgactaaatcagaccctcgatgccttacgcggtactattcctccttcgtgaattgggagagagatttggcaagcggactcataggaccactcctcatctgttacaaggaatctgtagaccagaggggtaaccagattatgagtgataaacgcaatgtgatcctttttagcgtcttcgacgagaaccggtcctggtacttgaccgagaatatacaaaggttccttcccaaccccgcaggcgttcagttggaagaccctgagtttcaggccagcaatattatgcactcaatcaacggctatgtgtttgatagtctccagctttctgtttgcctccatgaagtagcctattggtacatcttgtcaattggtgctcaaacagacttcctctccgtcttcttctccggctacacctttaagcacaagggcgtgtatgaggacactctcacactctttccattttctggagaaaccgtgttcatgagcatggagaatccaggcctttggatcttgggttgccacaacagtgattttcgcaatcggggaatgactgctctcctcaaagtcagcagctgtgattggaacacaggcgactattacgaagattcttacgaggacataagtgcctactttgactccaagaataacgccattgagcccagatcattctcccagaatcctcccgtgcttaaaaggcatcagcgcgaaggtaccagaactactcttcagtctgatcaagaggagattgactatgacgacaccattagcgtggaaatgaagaaggaggatttcgatatctatgacgaagatgagaaccagtctccgcggagctttcagaagaagacgcgacactacttcattgcagcagtcgaaaggctttgggactacggtatgtcatcatcccctcatgtgttgcgcaatagagctcagagtggaagtgttccacagttcaagaaagtcgtctttcaagagtttacagatggcagcttcacacagcctctctatcggggcgagcttaacgaacatttgggactccttggtccctatatccgagccgaagtggaggacaacattatggttacctttaggaatcaagcctctcgcccctacagcttctactcctccctcatcagttatgaggaggatcagagacaaggcgctgaaccacggaagaactttgtgaaaccgaatgagacgaagacctacttctggaaagtacagcaccacatggcccccacaaaagacgaattcgattgcaaagcatgggcgtatttttcagacgttgacttggagaaagatgtacattcaggacttattggtcctttgttggtgtgtcacactaacactctcaatccagcccatggcaggcaggtgacagtccaggaattcgctcttttctttaccatctttgatgagaccaagtcctggtacttcacggaaaacatggagcgcaattgcagagccccctgtaacatacagatggaggaccctacctttaaggaaaattatcggttccacgcaatcaacggatacattatggatacactccctggccttgtgatggctcaggaccaacgaatcaggtggtacctcctcagcatgggttctaatgagaacatacactccattcacttttcaggacatgtgttcactgtccggaagaaagaagagtataagatggccctctacaatttgtatccaggcgtgtttgagaccgttgaaatgcttccctctaaagctggcatctggagagtagagtgcttgatcggagaacatcttcacgcaggtatgagcaccttgttcctcgtgtacagcaacaaatgtcagaatccacttggcatggccagtggacacattcgcgactttcagatcacagcatctggccagtatggacaatgggccccaaagttggctcgcctccattactccggtagcataaatgcgtggtccactaaagaacctttcagctggattaaggtcgatcttcttgcccccatgatcatccacggcattaagacacagggagcgaggcagaaattctcctccctctacatctcacagttcattattatgtatagtttggacggcaagaagtggcaaacttatagaggtaacagtactggaacagacatggtgttcttcggcaacgttgatagctctggcatcaaacacaacatctttaatcctcccataatagctcggtacatcagattgcatccgacccactacagcattaggagtacactccgaatggagcttatgggttgcgacttgaattcctgttcaatgccactcggaatggagtctaaagccatctctgatgcacagataaccgccagtagctactttacgaacatgtttgctacgtggtcaccctctaaggcaaggcttcatttgcaaggccggtctaatgcctggagacctcaggtgaacaacccgaaagaatggctccaggtggactttcagaagaccatgaaagtaacaggtgtcactactcagggagttaagtccttggatactagcatgtatgtgaaggagttccttatttcctcatcacaagatggccaccagtggaccctcttctttcagaatggtaaggtcaaagtgtttcagggcaatcaagacagcttcacacccgtggtgaacagtcttgatcctccactcttgacacgataccttcgaatccatccacagtcttgggagcaccagattgcattgcgcatggaagtacttggatgcgaggctcaggacctctac

SEQ ID NO: 1804 - protein, 1457 aa, synthetic construct
  REGION 1..1457: note = Variant of human B-domain deleted Factor VIII
MQIELSTCFFLCLLRFCFSATRRYYLGAVELSWDYMQSDLGELPVDARFPPRVPKSFPFNTSQVYKKTLFVEFTDHLFNIAKPRPPWMGLLGPTIQAEVYDTVVITLKNMASHPVSLHAVGVSYWKASEGAEYDDQTSQREKEDDKVFPGGSHTYVWGVLKENGPMASDPPCLTYSYLSHVDLVKDLNSGLIGALLVCREGSLAKEKTQTLAKFILLFAVFDEGKSWHSETKNSLMQDRDAASARAWPKMHTVNGYVNRTLPGLIGCHRKSVYWHVIGMGTTPEVHSIFLEGHTFLVRNHRQASLGISPITFLTAQTLLRDLGQFLLFCHIPSHQHDGMEAYVKVDSCPEEPQLRMKNNEEAEDYDDDLTDSEMDVVRFDDDNSPSIIQARSGAKKHPKTWVHYIAAEEEDWDYAPLVLAPDDRSYKSQYLNNGPQRIGRKYKKVRFMAYTDETFKTREAIQHESGILGPLLYGEVGDTLLIIFKNQASRPYNIYPHGITDVRPLYSRRLPKGVKHLKDFPILPGEIFKYKWTITVEDGPTKSDPRCLTRYYSSFVNWERDLASGLIGPLLICYKESVDQRGNQIMSDKRNVILFSVFDENRSWYLTENIQRFLPNPAGVQLEDPEFQASNIMHSINGYVFDSLQLSVCLHEVAYWYILSIGAQTDFLSVFFSGYTFKHKGVYEDTLTLFPFSGETVFMSMENPGLWILGCHNSDFRNRGMTALLKVSSCDWNTGDYYEDSYEDISAYFDSKNNAIEPRSFSQNPPVLKRHQREGTRTTLQSDQEEIDYDDTISVEMKKEDFDIYDEDENQSPRSFQKKTRHYFIAAVERLWDYGMSSSPHVLRNRAQSGSVPQFKKVVFQEFTDGSFTQPLYRGELNEHLGLLGPYIRAEVEDNIMVTFRNQASRPYSFYSSLISYEEDQRQGAEPRKNFVKPNETKTYFWKVQHHMAPTKDEFDCKAWAYFSDVDLEKDVHSGLIGPLLVCHTNTLNPAHGRQVTVQEFALFFTIFDETKSWYFTENMERNCRAPCNIQMEDPTFKENYRFHAINGYIMDTLPGLVMAQDQRIRWYLLSMGSNENIHSIHFSGHVFTVRKKEEYKMALYNLYPGVFETVEMLPSKAGIWRVECLIGEHLHAGMSTLFLVYSNKCQNPLGMASGHIRDFQITASGQYGQWAPKLARLHYSGSINAWSTKEPFSWIKVDLLAPMIIHGIKTQGARQKFSSLYISQFIIMYSLDGKKWQTYRGNSTGTDMVFFGNVDSSGIKHNIFNPPIIARYIRLHPTHYSIRSTLRMELMGCDLNSCSMPLGMESKAISDAQITASSYFTNMFATWSPSKARLHLQGRSNAWRPQVNNPKEWLQVDFQKTMKVTGVTTQGVKSLDTSMYVKEFLISSSQDGHQWTLFFQNGKVKVFQGNQDSFTPVVNSLDPPLLTRYLRIHPQSWEHQIALRMEVLGCEAQDLY

SEQ ID NO: 1805 - DNA, 4371 bp, synthetic construct
  misc_feature 1..4371: note = Variant of human B-domain deleted Factor VIII
  source 1..4371: mol_type = other DNA
atgcagattgaactgtctacctgcttcttcctctgtttgctgaggttctgctttagcgccactagacggtactaccttggcgctgtggagctgtcctgggactatatgcagagtgatttgggagagcttcccgtcgacgcacgatttcctcctcgcgttccaaagtcatttccctttaacacaagccaggtgtacaagaagacgctcttcgtcgaattcaccgatcacctgttcaatatcgccaaacccagaccaccatggatgggtcttttggggcctaccatacaagcggaggtgtatgacacagttgttatcactctcaagaacatggcttctcatccggtaagtcttcacgcagtgggcgtgtcctactggaaagcttcagaaggagccgagtatgatgatcagacatcccagagggagaaagaagacgacaaggtatttccaggtgggtctcatacctatgtgtggcaagtgctcaaagagaatggccctatggcaagcgatccgccgtgtttgacttacagctacctttcacacgttgacctcgtcaaggacctcaactccgggttgattggagccttgttggtatgcagggaaggatctcttgccaaagagaagacacagaccctggccaagtttatccttctctttgctgtgttcgatgagggcaaaagttggcatagcgaaacgaagaattccctcatgcaggatcgcgacgcagccagcgccagagcttggcccaagatgcacactgtgaacggatatgtcaataggacgcttcctggcttgattgggtgtcatcggaaaagtgtctactggcacgtgatcggaatggggacaacaccagaggtccactccatatttctcgaaggccataccttccttgttcgaaaccacagacaggcatccttggggatctctcccattacctttctcactgcccaaacgctccttcgtgacttgggtcagttccttctcttttgccatatcccgtcacaccagcatgatggtatggaagcttatgtgaaagtcgacagttgtcctgaggagccacagttgcgcatgaagaataatgaagaagccgaggattacgacgacgatctcaccgattctgagatggacgtggtgaggtttgatgacgacaactctccctccatcattcaagctcggagcggggcgaagaaacaccccaagacttgggtccactatatagcggcggaagaggaggattgggattacgctcctcttgtattggcaccagatgaccgctcatacaaaagccagtacctcaacaacggaccgcagagaattggccggaagtataagaaagtgcgatttatggcctatacagacgaaacctttaagacaagggaggccatccagcatgagagtgggattttgggacctcttctttacggcgaagttggtgataccctcctcatcatcttcaagaatcaagcttctcgcccctataacatttacccacacgggatcactgacgttaggcctttgtatagcagaagacttcccaaaggcgtgaagcatctcaaagacttccccattttgccaggcgagatctttaagtacaaatggaccattacagtggaagatggaccgactaaatcagaccctcgatgccttacgcggtactattcctccttcgtgaattgggagagagatttggcaagcggactcataggaccactcctcatctgttacaaggaatctgtagactctaggggtaaccagattatgagtgataaacgcaatgtgatcctttttagcgtcttcgacgagaaccggtcctggtacttgaccgagaatatacaaaggttccttcccaaccccgcaggcgttcagttggaagaccctgagtttcaggccagcaatattatgcactcaatcaacggctatgtgtttgatagtctccagctttctgtttgcctccatgaagtagcctattggtacatcttgtcaattggtgctcaaacagacttcctctccgtcttcttctccggctacacctttaagcacaagggcgtgtatgaggacactctcacactctttccattttctggagaaaccgtgttcatgagcatggagaatccaggcctttggatcttgggttgccacaacagtgattttcgcaatcggggaatgactgctctcctcaaagtcagcagctgtgattggaacacaggcgactattacgaagattcttacgaggacataagtgcctactttgactccaagaataacgccattgagcccagatcattctcccagaatcctcccgtgcttaaaaggcatcagcgcgaaggtaccagaactactcttcagtctgatcaagaggagattgactatgacgacaccattagcgtggaaatgaagaaggaggatttcgatatctatgacgaagatgagaaccagtctccgcggagctttcagaagaagacgcgacactacttcattgcagcagtcgaaaggctttgggactacggtatgtcatcatcccctcatgtgttgcgcaatagagctcagagtggaagtgttccacagttcaagaaagtcgtctttcaagagtttacagatggcagcttcacacagcctctctatcggggcgagcttaacgaacatttgggactccttggtccctatatccgagccgaagtggaggacaacattatggttacctttaggaatcaagcctctcgcccctacagcttctactcctccctcatcagttatgaggaggatcagagacaaggcgctgaaccacggaagaactttgtgaaaccgaatgagacgaagacctacttctggaaagtacagcaccacatggcccccacaaaagacgaattcgattgcaaagcatgggcgtatttttcagacgttgacttggagaaagatgtacattcaggacttattggtcctttgttggtgtgtcacactaacactctcaatccagcccatggcaggcaggtgacagtccaggaattcgctcttttctttaccatctttgatgagaccaagtcctggtacttcacggaaaacatggagcgcaattgcagagccccctgtaacatacagatggaggaccctacctttaaggaaaattatcggttccacgcaatcaacggatacattatggatacactccctggccttgtgatggctcaggaccaacgaatcaggtggtacctcctcagcatgggttctaatgagaacatacactccattcacttttcaggacatgtgttcactgtccggaagaaagaagagtataagatggccctctacaatttgtatccaggcgtgtttgagaccgttgaaatgcttccctctaaagctggcatctggagagtagagtgcttgatcggagaacatcttcacgcaggtatgagcaccttgttcctcgtgtacagcaacaaatgtcagaatccacttggcatggccagtggacacattcgcgactttcagatcacagcatctggccagtatggacaatgggccccaaagttggctcgcctccattactccggtagcataaatgcgtggtccactaaagaacctttcagctggattaaggtcgatcttcttgcccccatgatcatccacggcattaagacacagggagcgaggcagaaattctcctccctctacatctcacagttcattattatgtatagtttggacggcaagaagtggcaaacttatagaggtaacagtactggaacagacatggtgttcttcggcaacgttgatagctctggcatcaaacacaacatctttaatcctcccataatagctcggtacatcagattgcatccgacccactacagcattaggagtacactccgaatggagcttatgggttgcgacttgaattcctgttcaatgccactcggaatggagtctaaagccatctctgatgcacagataaccgccagtagctactttacgaacatgtttgctacgtggtcaccctctaaggcaaggcttcatttgcaaggccggtctaatgcctggagacctcaggtgaacaacccgaaagaatggctccaggtggactttcagaagaccatgaaagtaacaggtgtcactactcagggagttaagtccttggatactagcatgtatgtgaaggagttccttatttcctcatcacaagatggccaccagtggaccctcttctttcagaatggtaaggtcaaagtgtttcagggcaatcaagacagcttcacacccgtggtgaacagtcttgatcctccactcttgacacgataccttcgaatccatccacagtcttgggagcaccagattgcattgcgcatggaagtacttggatgcgaggctcaggacctctac

SEQ ID NO: 1806 - protein, 1457 aa, synthetic construct
  REGION 1..1457: note = Variant of human B-domain deleted Factor VIII
MQIELSTCFFLCLLRFCFSATRRYYLGAVELSWDYMQSDLGELPVDARFPPRVPKSFPFNTSQVYKKTLFVEFTDHLFNIAKPRPPWMGLLGPTIQAEVYDTVVITLKNMASHPVSLHAVGVSYWKASEGAEYDDQTSQREKEDDKVFPGGSHTYVWQVLKENGPMASDPPCLTYSYLSHVDLVKDLNSGLIGALLVCREGSLAKEKTQTLAKFILLFAVFDEGKSWHSETKNSLMQDRDAASARAWPKMHTVNGYVNRTLPGLIGCHRKSVYWHVIGMGTTPEVHSIFLEGHTFLVRNHRQASLGISPITFLTAQTLLRDLGQFLLFCHIPSHQHDGMEAYVKVDSCPEEPQLRMKNNEEAEDYDDDLTDSEMDVVRFDDDNSPSIIQARSGAKKHPKTWVHYIAAEEEDWDYAPLVLAPDDRSYKSQYLNNGPQRIGRKYKKVRFMAYTDETFKTREAIQHESGILGPLLYGEVGDTLLIIFKNQASRPYNIYPHGITDVRPLYSRRLPKGVKHLKDFPILPGEIFKYKWTITVEDGPTKSDPRCLTRYYSSFVNWERDLASGLIGPLLICYKESVDSRGNQIMSDKRNVILFSVFDENRSWYLTENIQRFLPNPAGVQLEDPEFQASNIMHSINGYVFDSLQLSVCLHEVAYWYILSIGAQTDFLSVFFSGYTFKHKGVYEDTLTLFPFSGETVFMSMENPGLWILGCHNSDFRNRGMTALLKVSSCDWNTGDYYEDSYEDISAYFDSKNNAIEPRSFSQNPPVLKRHQREGTRTTLQSDQEEIDYDDTISVEMKKEDFDIYDEDENQSPRSFQKKTRHYFIAAVERLWDYGMSSSPHVLRNRAQSGSVPQFKKVVFQEFTDGSFTQPLYRGELNEHLGLLGPYIRAEVEDNIMVTFRNQASRPYSFYSSLISYEEDQRQGAEPRKNFVKPNETKTYFWKVQHHMAPTKDEFDCKAWAYFSDVDLEKDVHSGLIGPLLVCHTNTLNPAHGRQVTVQEFALFFTIFDETKSWYFTENMERNCRAPCNIQMEDPTFKENYRFHAINGYIMDTLPGLVMAQDQRIRWYLLSMGSNENIHSIHFSGHVFTVRKKEEYKMALYNLYPGVFETVEMLPSKAGIWRVECLIGEHLHAGMSTLFLVYSNKCQNPLGMASGHIRDFQITASGQYGQWAPKLARLHYSGSINAWSTKEPFSWIKVDLLAPMIIHGIKTQGARQKFSSLYISQFIIMYSLDGKKWQTYRGNSTGTDMVFFGNVDSSGIKHNIFNPPIIARYIRLHPTHYSIRSTLRMELMGCDLNSCSMPLGMESKAISDAQITASSYFTNMFATWSPSKARLHLQGRSNAWRPQVNNPKEWLQVDFQKTMKVTGVTTQGVKSLDTSMYVKEFLISSSQDGHQWTLFFQNGKVKVFQGNQDSFTPVVNSLDPPLLTRYLRIHPQSWEHQIALRMEVLGCEAQDLY

SEQ ID NO: 1807 - DNA, 4371 bp, synthetic construct
  misc_feature 1..4371: note = Variant of human B-domain deleted Factor VIII
  source 1..4371: mol_type = other DNA
atgcagattgaactgtctacctgcttcttcctctgtttgctgaggttctgctttagcgccactagacggtactaccttggcgctgtggagctgtcctgggactatatgcagagtgatttgggagagcttcccgtcgacgcacgatttcctcctcgcgttccaaagtcatttccctttaacacaagccaggtgtacaagaagacgctcttcgtcgaattcaccgatcacctgttcaatatcgccaaacccagaccaccatggatgggtcttttggggcctaccatacaagcggaggtgtatgacacagttgttatcactctcaagaacatggcttctcatccggtaagtcttcacgcagtgggcgtgtcctactggaaagcttcagaaggagccgagtatgatgatcagacatcccagagggagaaagaagacgacaaggtatttccaggtgggtctcatacctatgtgtggcaagtgctcaaagagaatggccctatggcaagcgatccgccgtgtttgacttacagctacctttcacacgttgacctcgtcaaggacctcaactccgggttgattggagccttgttggtatgcagggaaggatctcttgccaaagagaagacacagaccctggccaagtttatccttctctttgctgtgttcgatgagggcaaaagttggcatagcgaaacgaagaattccctcatgcaggatcgcgacgcagccagcgccagagcttggcccaagatgcacactgtgaacggatatgtcaataggacgcttcctggcttgattgggtgtcatcggaaaagtgtctactggcacgtgatcggaatggggacaacaccagaggtccactccatatttctcgaaggccataccttccttgttcgaaaccacagacaggcatccttggggatctctcccattacctttctcactgcccaaacgctccttcgtgacttgggtcagttccttctcttttgccatatcccgtcacaccagcatgatggtatggaagcttatgtgaaagtcgacagttgtcctgaggagccacagttgcgcatgaagaataatgaagaagccgaggattacgacgacgatctcaccgattctgagatggacgtggtgaggtttgatgacgacaactctccctccatcattcaagctcggagcggggcgaagaaacaccccaagacttgggtccactatatagcggcggaagaggaggattgggattacgctcctcttgtattggcaccagatgaccgctcatacaaaagccagtacctcaacaacggaccgcagagaattggccggaagtataagaaagtgcgatttatggcctatacagacgaaacctttaagacaagggaggccatccagcatgagagtgggattttgggacctcttctttacggcgaagttggtgataccctcctcatcatcttcaagaatcaagcttctcgcccctataacatttacccacacgggatcactgacgttaggcctttgtatagcagaagacttcccaaaggcgtgaagcatctcaaagacttccccattttgccaggcgagatctttaagtacaaatggaccattacagtggaagatggaccgactaaatcagaccctcgatgccttacgcggtactattcctccttcgtgaattgggagagagatttggcaagcggactcataggaccactcctcatctgttacaaggaatctgtagaccagaggggtaaccagattatgagtgataaacgcaatgtgatcctttttagcgtcttcgacgagaaccggtcctggtacttgaccgagaatatacaaaggttccttcccaaccccgcaggcgttcagttggaagaccctgagtttcaggccagcaatattatgcactcaatcaacggctatgtgtttgatagtctccagctttctgtttgcctccatgaagtagcctattggtacatcttgtcaattggtgctcaaacagacttcctctccgtcttcttctccggctacacctttaagcacaagggcgtgtatgaggacactctcacactctttccattttctggagaaaccgtgttcatgagcatggagaatccaggccttcatatcttgggttgccacaacagtgattttcgcaatcggggaatgactgctctcctcaaagtcagcagctgtgattggaacacaggcgactattacgaagattcttacgaggacataagtgcctactttgactccaagaataacgccattgagcccagatcattctcccagaatcctcccgtgcttaaaaggcatcagcgcgaaggtaccagaactactcttcagtctgatcaagaggagattgactatgacgacaccattagcgtggaaatgaagaaggaggatttcgatatctatgacgaagatgagaaccagtctccgcggagctttcagaagaagacgcgacactacttcattgcagcagtcgaaaggctttgggactacggtatgtcatcatcccctcatgtgttgcgcaatagagctcagagtggaagtgttccacagttcaagaaagtcgtctttcaagagtttacagatggcagcttcacacagcctctctatcggggcgagcttaacgaacatttgggactccttggtccctatatccgagccgaagtggaggacaacattatggttacctttaggaatcaagcctctcgcccctacagcttctactcctccctcatcagttatgaggaggatcagagacaaggcgctgaaccacggaagaactttgtgaaaccgaatgagacgaagacctacttctggaaagtacagcaccacatggcccccacaaaagacgaattcgattgcaaagcatgggcgtatttttcagacgttgacttggagaaagatgtacattcaggacttattggtcctttgttggtgtgtcacactaacactctcaatccagcccatggcaggcaggtgacagtccaggaattcgctcttttctttaccatctttgatgagaccaagtcctggtacttcacggaaaacatggagcgcaattgcagagccccctgtaacatacagatggaggaccctacctttaaggaaaattatcggttccacgcaatcaacggatacattatggatacactccctggccttgtgatggctcaggaccaacgaatcaggtggtacctcctcagcatgggttctaatgagaacatacactccattcacttttcaggacatgtgttcactgtccggaagaaagaagagtataagatggccctctacaatttgtatccaggcgtgtttgagaccgttgaaatgcttccctctaaagctggcatctggagagtagagtgcttgatcggagaacatcttcacgcaggtatgagcaccttgttcctcgtgtacagcaacaaatgtcagaatccacttggcatggccagtggacacattcgcgactttcagatcacagcatctggccagtatggacaatgggccccaaagttggctcgcctccattactccggtagcataaatgcgtggtccactaaagaacctttcagctggattaaggtcgatcttcttgcccccatgatcatccacggcattaagacacagggagcgaggcagaaattctcctccctctacatctcacagttcattattatgtatagtttggacggcaagaagtggcaaacttatagaggtaacagtactggaacagacatggtgttcttcggcaacgttgatagctctggcatcaaacacaacatctttaatcctcccataatagctcggtacatcagattgcatccgacccactacagcattaggagtacactccgaatggagcttatgggttgcgacttgaattcctgttcaatgccactcggaatggagtctaaagccatctctgatgcacagataaccgccagtagctactttacgaacatgtttgctacgtggtcaccctctaaggcaaggcttcatttgcaaggccggtctaatgcctggagacctcaggtgaacaacccgaaagaatggctccaggtggactttcagaagaccatgaaagtaacaggtgtcactactcagggagttaagtccttggatactagcatgtatgtgaaggagttccttatttcctcatcacaagatggccaccagtggaccctcttctttcagaatggtaaggtcaaagtgtttcagggcaatcaagacagcttcacacccgtggtgaacagtcttgatcctccactcttgacacgataccttcgaatccatccacagtcttgggagcaccagattgcattgcgcatggaagtacttggatgcgaggctcaggacctctac

SEQ ID NO: 1808 - protein, 1457 aa, synthetic construct
  REGION 1..1457: note = Variant of human B-domain deleted Factor VIII
MQIELSTCFFLCLLRFCFSATRRYYLGAVELSWDYMQSDLGELPVDARFPPRVPKSFPFNTSQVYKKTLFVEFTDHLFNIAKPRPPWMGLLGPTIQAEVYDTVVITLKNMASHPVSLHAVGVSYWKASEGAEYDDQTSQREKEDDKVFPGGSHTYVWQVLKENGPMASDPPCLTYSYLSHVDLVKDLNSGLIGALLVCREGSLAKEKTQTLAKFILLFAVFDEGKSWHSETKNSLMQDRDAASARAWPKMHTVNGYVNRTLPGLIGCHRKSVYWHVIGMGTTPEVHSIFLEGHTFLVRNHRQASLGISPITFLTAQTLLRDLGQFLLFCHIPSHQHDGMEAYVKVDSCPEEPQLRMKNNEEAEDYDDDLTDSEMDVVRFDDDNSPSIIQARSGAKKHPKTWVHYIAAEEEDWDYAPLVLAPDDRSYKSQYLNNGPQRIGRKYKKVRFMAYTDETFKTREAIQHESGILGPLLYGEVGDTLLIIFKNQASRPYNIYPHGITDVRPLYSRRLPKGVKHLKDFPILPGEIFKYKWTITVEDGPTKSDPRCLTRYYSSFVNWERDLASGLIGPLLICYKESVDQRGNQIMSDKRNVILFSVFDENRSWYLTENIQRFLPNPAGVQLEDPEFQASNIMHSINGYVFDSLQLSVCLHEVAYWYILSIGAQTDFLSVFFSGYTFKHKGVYEDTLTLFPFSGETVFMSMENPGLHILGCHNSDFRNRGMTALLKVSSCDWNTGDYYEDSYEDISAYFDSKNNAIEPRSFSQNPPVLKRHQREGTRTTLQSDQEEIDYDDTISVEMKKEDFDIYDEDENQSPRSFQKKTRHYFIAAVERLWDYGMSSSPHVLRNRAQSGSVPQFKKVVFQEFTDGSFTQPLYRGELNEHLGLLGPYIRAEVEDNIMVTFRNQASRPYSFYSSLISYEEDQRQGAEPRKNFVKPNETKTYFWKVQHHMAPTKDEFDCKAWAYFSDVDLEKDVHSGLIGPLLVCHTNTLNPAHGRQVTVQEFALFFTIFDETKSWYFTENMERNCRAPCNIQMEDPTFKENYRFHAINGYIMDTLPGLVMAQDQRIRWYLLSMGSNENIHSIHFSGHVFTVRKKEEYKMALYNLYPGVFETVEMLPSKAGIWRVECLIGEHLHAGMSTLFLVYSNKCQNPLGMASGHIRDFQITASGQYGQWAPKLARLHYSGSINAWSTKEPFSWIKVDLLAPMIIHGIKTQGARQKFSSLYISQFIIMYSLDGKKWQTYRGNSTGTDMVFFGNVDSSGIKHNIFNPPIIARYIRLHPTHYSIRSTLRMELMGCDLNSCSMPLGMESKAISDAQITASSYFTNMFATWSPSKARLHLQGRSNAWRPQVNNPKEWLQVDFQKTMKVTGVTTQGVKSLDTSMYVKEFLISSSQDGHQWTLFFQNGKVKVFQGNQDSFTPVVNSLDPPLLTRYLRIHPQSWEHQIALRMEVLGCEAQDLY

SEQ ID NO: 1809 - DNA, 4371 bp, synthetic construct
  misc_feature 1..4371: note = Variant of human B-domain deleted Factor VIII
  source 1..4371: mol_type = other DNA
atgcagattgaactgtctacctgcttcttcctctgtttgctgaggttctgctttagcgccactagacggtactaccttggcgctgtggagctgtcctgggactatatgcagagtgatttgggagagcttcccgtcgacgcacgatttcctcctcgcgttccaaagtcatttccctttaacacaagccaggtgtacaagaagacgctcttcgtcgaattcaccgatcacctgttcaatatcgccaaacccagaccaccatggatgggtcttttggggcctaccatacaagcggaggtgtatgacacagttgttatcactctcaagaacatggcttctcatccggtaagtcttcacgcagtgggcgtgtcctactggaaagcttcagaaggagccgagtatgatgatcagacatcccagagggagaaagaagacgacaaggtatttccaggtgggtctcatacctatgtgtggcaagtgctcaaagagaatggccctatggcaagcgatccgccgtgtttgacttacagctacctttcacacgttgacctcgtcaaggacctcaactccgggttgattggagccttgttggtatgcagggaaggatctcttgccaaagagaagacacagaccctggccaagtttatccttctctttgctgtgttcgatgagggcaaaagttggcatagcgaaacgaagaattccctcatgcaggatcgcgacgcagccagcgccagagcttggcccaagatgcacactgtgaacggatatgtcaataggacgcttcctggcttgattgggtgtcatcggaaaagtgtctactggcacgtgatcggaatggggacaacaccagaggtccactccatatttctcgaaggccataccttccttgttcgaaaccacagacaggcatccttggggatctctcccattacctttctcactgcccaaacgctccttcgtgacttgggtcagttccttctcttttgccatatcccgtcacaccagcatgatggtatggaagcttatgtgaaagtcgacagttgtcctgaggagccacagttgcgcatgaagaataatgaagaagccgaggattacgacgacgatctcaccgattctgagatggacgtggtgaggtttgatgacgacaactctccctccatcattcaagctcggagcggggcgaagaaacaccccaagacttgggtccactatatagcggcggaagaggaggattgggattacgctcctcttgtattggcaccagatgaccgctcatacaaaagccagtacctcaacaacggaccgcagagaattggccggaagtataagaaagtgcgatttatggcctatacagacgaaacctttaagacaagggaggccatccagcatgagagtgggattttgggacctcttctttacggcgaagttggtgataccctcctcatcatcttcaagaatcaagcttctcgcccctataacatttacccacacgggatcactgacgttaggcctttgtatagcagaagacttcccaaaggcgtgaagcatctcaaagacttccccattttgccaggcgagatctttaagtacaaatggaccattacagtggaagatggaccgactaaatcagaccctcgatgccttacgcggtactattcctccttcgtgaattgggagagagatttggcaagcggactcataggaccactcctcatctgttacaaggaatctgtagaccagaggggtaaccagattatgagtgataaacgcaatgtgatcctttttagcgtcttcgacgagaaccggtcctggtacttgaccgagaatatacaaaggttccttcccaaccccgcaggcgttcagttggaagaccctgagtttcaggccagcaatattatgcactcaatcaacggctatgtgtttgatagtctccagctttctgtttgcctccatgaagtagcctattggtacatcttgtcaattggtgctcaaacagacttcctctccgtcttcttctccggctacacctttaagcacaagggcgtgtatgaggacactctcacactctttccattttctggagaaaccgtgttcatgagcatggagaatccaggcctttggatcttgggttgccacaacagtgattttcgcaatcggggaatgactgctctcctcaaagtcagcagctgtatttggaacacaggcgactattacgaagattcttacgaggacataagtgcctactttgactccaagaataacgccattgagcccagatcattctcccagaatcctcccgtgcttaaaaggcatcagcgcgaaggtaccagaactactcttcagtctgatcaagaggagattgactatgacgacaccattagcgtggaaatgaagaaggaggatttcgatatctatgacgaagatgagaaccagtctccgcggagctttcagaagaagacgcgacactacttcattgcagcagtcgaaaggctttgggactacggtatgtcatcatcccctcatgtgttgcgcaatagagctcagagtggaagtgttccacagttcaagaaagtcgtctttcaagagtttacagatggcagcttcacacagcctctctatcggggcgagcttaacgaacatttgggactccttggtccctatatccgagccgaagtggaggacaacattatggttacctttaggaatcaagcctctcgcccctacagcttctactcctccctcatcagttatgaggaggatcagagacaaggcgctgaaccacggaagaactttgtgaaaccgaatgagacgaagacctacttctggaaagtacagcaccacatggcccccacaaaagacgaattcgattgcaaagcatgggcgtatttttcagacgttgacttggagaaagatgtacattcaggacttattggtcctttgttggtgtgtcacactaacactctcaatccagcccatggcaggcaggtgacagtccaggaattcgctcttttctttaccatctttgatgagaccaagtcctggtacttcacggaaaacatggagcgcaattgcagagccccctgtaacatacagatggaggaccctacctttaaggaaaattatcggttccacgcaatcaacggatacattatggatacactccctggccttgtgatggctcaggaccaacgaatcaggtggtacctcctcagcatgggttctaatgagaacatacactccattcacttttcaggacatgtgttcactgtccggaagaaagaagagtataagatggccctctacaatttgtatccaggcgtgtttgagaccgttgaaatgcttccctctaaagctggcatctggagagtagagtgcttgatcggagaacatcttcacgcaggtatgagcaccttgttcctcgtgtacagcaacaaatgtcagaatccacttggcatggccagtggacacattcgcgactttcagatcacagcatctggccagtatggacaatgggccccaaagttggctcgcctccattactccggtagcataaatgcgtggtccactaaagaacctttcagctggattaaggtcgatcttcttgcccccatgatcatccacggcattaagacacagggagcgaggcagaaattctcctccctctacatctcacagttcattattatgtatagtttggacggcaagaagtggcaaacttatagaggtaacagtactggaacagacatggtgttcttcggcaacgttgatagctctggcatcaaacacaacatctttaatcctcccataatagctcggtacatcagattgcatccgacccactacagcattaggagtacactccgaatggagcttatgggttgcgacttgaattcctgttcaatgccactcggaatggagtctaaagccatctctgatgcacagataaccgccagtagctactttacgaacatgtttgctacgtggtcaccctctaaggcaaggcttcatttgcaaggccggtctaatgcctggagacctcaggtgaacaacccgaaagaatggctccaggtggactttcagaagaccatgaaagtaacaggtgtcactactcagggagttaagtccttggatactagcatgtatgtgaaggagttccttatttcctcatcacaagatggccaccagtggaccctcttctttcagaatggtaaggtcaaagtgtttcagggcaatcaagacagcttcacacccgtggtgaacagtcttgatcctccactcttgacacgataccttcgaatccatccacagtcttgggagcaccagattgcattgcgcatggaagtacttggatgcgaggctcaggacctctac

SEQ ID NO: 1810 - protein, 1457 aa, synthetic construct
  REGION 1..1457: note = Variant of human B-domain deleted Factor VIII
MQIELSTCFFLCLLRFCFSATRRYYLGAVELSWDYMQSDLGELPVDARFPPRVPKSFPFNTSQVYKKTLFVEFTDHLFNIAKPRPPWMGLLGPTIQAEVYDTVVITLKNMASHPVSLHAVGVSYWKASEGAEYDDQTSQREKEDDKVFPGGSHTYVWQVLKENGPMASDPPCLTYSYLSHVDLVKDLNSGLIGALLVCREGSLAKEKTQTLAKFILLFAVFDEGKSWHSETKNSLMQDRDAASARAWPKMHTVNGYVNRTLPGLIGCHRKSVYWHVIGMGTTPEVHSIFLEGHTFLVRNHRQASLGISPITFLTAQTLLRDLGQFLLFCHIPSHQHDGMEAYVKVDSCPEEPQLRMKNNEEAEDYDDDLTDSEMDVVRFDDDNSPSIIQARSGAKKHPKTWVHYIAAEEEDWDYAPLVLAPDDRSYKSQYLNNGPQRIGRKYKKVRFMAYTDETFKTREAIQHESGILGPLLYGEVGDTLLIIFKNQASRPYNIYPHGITDVRPLYSRRLPKGVKHLKDFPILPGEIFKYKWTITVEDGPTKSDPRCLTRYYSSFVNWERDLASGLIGPLLICYKESVDQRGNQIMSDKRNVILFSVFDENRSWYLTENIQRFLPNPAGVQLEDPEFQASNIMHSINGYVFDSLQLSVCLHEVAYWYILSIGAQTDFLSVFFSGYTFKHKGVYEDTLTLFPFSGETVFMSMENPGLWILGCHNSDFRNRGMTALLKVSSCIWNTGDYYEDSYEDISAYFDSKNNAIEPRSFSQNPPVLKRHQREGTRTTLQSDQEEIDYDDTISVEMKKEDFDIYDEDENQSPRSFQKKTRHYFIAAVERLWDYGMSSSPHVLRNRAQSGSVPQFKKVVFQEFTDGSFTQPLYRGELNEHLGLLGPYIRAEVEDNIMVTFRNQASRPYSFYSSLISYEEDQRQGAEPRKNFVKPNETKTYFWKVQHHMAPTKDEFDCKAWAYFSDVDLEKDVHSGLIGPLLVCHTNTLNPAHGRQVTVQEFALFFTIFDETKSWYFTENMERNCRAPCNIQMEDPTFKENYRFHAINGYIMDTLPGLVMAQDQRIRWYLLSMGSNENIHSIHFSGHVFTVRKKEEYKMALYNLYPGVFETVEMLPSKAGIWRVECLIGEHLHAGMSTLFLVYSNKCQNPLGMASGHIRDFQITASGQYGQWAPKLARLHYSGSINAWSTKEPFSWIKVDLLAPMIIHGIKTQGARQKFSSLYISQFIIMYSLDGKKWQTYRGNSTGTDMVFFGNVDSSGIKHNIFNPPIIARYIRLHPTHYSIRSTLRMELMGCDLNSCSMPLGMESKAISDAQITASSYFTNMFATWSPSKARLHLQGRSNAWRPQVNNPKEWLQVDFQKTMKVTGVTTQGVKSLDTSMYVKEFLISSSQDGHQWTLFFQNGKVKVFQGNQDSFTPVVNSLDPPLLTRYLRIHPQSWEHQIALRMEVLGCEAQDLY

SEQ ID NO: 1811 - DNA, 4371 bp, synthetic construct
  misc_feature 1..4371: note = Variant of human B-domain deleted Factor VIII
  source 1..4371: mol_type = other DNA
atgcagattgaactgtctacctgcttcttcctctgtttgctgaggttctgctttagcgccactagacggtactaccttggcgctgtggagctgtcctgggactatatgcagagtgatttgggagagcttcccgtcgacgcacgatttcctcctcgcgttccaaagtcatttccctttaacacaagccaggtgtacaagaagacgctcttcgtcgaattcaccgatcacctgttcaatatcgccaaacccagaccaccatggatgggtcttttggggcctaccatacaagcggaggtgtatgacacagttgttatcactctcaagaacatggcttctcatccggtaagtcttcacgcagtgggcgtgtcctactggaaagcttcagaaggagccgagtatgatgatcagacatcccagagggagaaagaagacgacaaggtatttccaggtgggtctcatacctatgtgtggcaagtgctcaaagagaatggccctatggcaagcgatccgccgtgtttgacttacagctacctttcacacgttgacctcgtcaaggacctcaactccgggttgattggagccttgttggtatgcagggaaggatctcttgccaaagagaagacacagaccctggccaagtttatccttctctttgctgtgttcgatgagggcaaaagttggcatagcgaaacgaagaattccctcatgcaggatcgcgacgcagccagcgccagagcttggcccaagatgcacactgtgaacggatatgtcaataggacgcttcctggcttgattgggtgtcatcggaaaagtgtctactggcacgtgatcggaatggggacaacaccagaggtccactccatatttctcgaaggccataccttccttgttcgaaaccacagacaggcatccttggggatctctcccattacctttctcactgcccaaacgctccttcgtgacttgggtcagttccttctcttttgccatatcccgtcacaccagcatgatggtatggaagcttatgtgaaagtcgacagttgtcctgaggagccacagttgcgcatgaagaataatgaagaagccgaggattacgacgacgatctcaccgattctgagatggacgtggtgaggtttgatgacgacaactctccctccatcattcaagctcggagcggggcgaagaaacaccccaagacttgggtccactatatagcggcggaagaggaggattgggattacgctcctcttgtattggcaccagatgaccgctcatacaaaagccagtacctcaacaacggaccgcagagaattggccggaagtataagaaagtgcgatttatggcctatacagacgaaacctttaagacaagggaggccatccagcatgagagtgggattttgggacctcttctttacggcgaagttggtgataccctcctcatcatcttcaagaatcaagcttctcgcccctataacatttacccacacgggatcactgacgttaggcctttgtatagcagaagacttcccaaaggcgtgaagcatctcaaagacttccccattttgccaggcgagatctttaagtacaaatggaccattacagtggaagatggaccgactaaatcagaccctcgatgccttacgcggtactattcctccttcgtgaattgggagagagatttggcaagcggactcataggaccactcctcatctgttacaaggaatctgtagaccagaggggtaaccagattatgagtgataaacgcaatgtgatcctttttagcgtcttcgacgagaaccggtcctggtacttgaccgagaatatacaaaggttccttcccaaccccgcaggcgttcagttggaagaccctgagtttcaggccagcaatattatgcactcaatcaacggctatgtgtttgatagtctccagctttctgtttgcctccatgaagtagcctattggtacatcttgtcaattggtgctcaaacagacttcctctccgtcttcttctccggctacacctttaagcacaagggcgtgtatgaggacactctcacactctttccattttctggagaaaccgtgttcatgagcatggagaatccaggcctttggatcttgggttgccacaacagtgattttcgcaatcggggaatgactgctctcctcaaagtcagcagctgtgattggaacacaggcgactattacgaagattcttacgaggacataagtgcctactttgactccaagaataacgccattgagcccagatcattctcccagaatcctcccgtgcttaaaaggcatcagcgcgaaggtaccagaactactcttcagtctgatcaagaggagattgactatgacgacaccattagcgtggaaatgaagaaggaggatttcgatatctatgacgaagatgagaaccagtctccgcggagctttcagaagaagacgcgacactacttcattgcagcagtcgaaaggctttgggactacggtatgtcatcatcccctcatgtgttgcgcaatagagctcagagtggaagtgttccacagttcaagaaagtcgtctttcaagagtttacagatggcagcttcacacagcctctctatcggggcgagcttaacgaacatttgggactccttggtccctatatccgagccgaagtggaggacaacattatggttacctttaggaatcaagcctctcgcccctacagcttctactcctccctcatcagttatatggaggatcagagacaaggcgctgaaccacggaagaactttgtgaaaccgaatgagacgaagacctacttctggaaagtacagcaccacatggcccccacaaaagacgaattcgattgcaaagcatgggcgtatttttcagacgttgacttggagaaagatgtacattcaggacttattggtcctttgttggtgtgtcacactaacactctcaatccagcccatggcaggcaggtgacagtccaggaattcgctcttttctttaccatctttgatgagaccaagtcctggtacttcacggaaaacatggagcgcaattgcagagccccctgtaacatacagatggaggaccctacctttaaggaaaattatcggttccacgcaatcaacggatacattatggatacactccctggccttgtgatggctcaggaccaacgaatcaggtggtacctcctcagcatgggttctaatgagaacatacactccattcacttttcaggacatgtgttcactgtccggaagaaagaagagtataagatggccctctacaatttgtatccaggcgtgtttgagaccgttgaaatgcttccctctaaagctggcatctggagagtagagtgcttgatcggagaacatcttcacgcaggtatgagcaccttgttcctcgtgtacagcaacaaatgtcagaatccacttggcatggccagtggacacattcgcgactttcagatcacagcatctggccagtatggacaatgggccccaaagttggctcgcctccattactccggtagcataaatgcgtggtccactaaagaacctttcagctggattaaggtcgatcttcttgcccccatgatcatccacggcattaagacacagggagcgaggcagaaattctcctccctctacatctcacagttcattattatgtatagtttggacggcaagaagtggcaaacttatagaggtaacagtactggaacagacatggtgttcttcggcaacgttgatagctctggcatcaaacacaacatctttaatcctcccataatagctcggtacatcagattgcatccgacccactacagcattaggagtacactccgaatggagcttatgggttgcgacttgaattcctgttcaatgccactcggaatggagtctaaagccatctctgatgcacagataaccgccagtagctactttacgaacatgtttgctacgtggtcaccctctaaggcaaggcttcatttgcaaggccggtctaatgcctggagacctcaggtgaacaacccgaaagaatggctccaggtggactttcagaagaccatgaaagtaacaggtgtcactactcagggagttaagtccttggatactagcatgtatgtgaaggagttccttatttcctcatcacaagatggccaccagtggaccctcttctttcagaatggtaaggtcaaagtgtttcagggcaatcaagacagcttcacacccgtggtgaacagtcttgatcctccactcttgacacgataccttcgaatccatccacagtcttgggagcaccagattgcattgcgcatggaagtacttggatgcgaggctcaggacctctac

SEQ ID NO: 1812 - protein, 1457 aa, synthetic construct
  REGION 1..1457: note = Variant of human B-domain deleted Factor VIII
MQIELSTCFFLCLLRFCFSATRRYYLGAVELSWDYMQSDLGELPVDARFPPRVPKSFPFNTSQVYKKTLFVEFTDHLFNIAKPRPPWMGLLGPTIQAEVYDTVVITLKNMASHPVSLHAVGVSYWKASEGAEYDDQTSQREKEDDKVFPGGSHTYVWQVLKENGPMASDPPCLTYSYLSHVDLVKDLNSGLIGALLVCREGSLAKEKTQTLAKFILLFAVFDEGKSWHSETKNSLMQDRDAASARAWPKMHTVNGYVNRTLPGLIGCHRKSVYWHVIGMGTTPEVHSIFLEGHTFLVRNHRQASLGISPITFLTAQTLLRDLGQFLLFCHIPSHQHDGMEAYVKVDSCPEEPQLRMKNNEEAEDYDDDLTDSEMDVVRFDDDNSPSIIQARSGAKKHPKTWVHYIAAEEEDWDYAPLVLAPDDRSYKSQYLNNGPQRIGRKYKKVRFMAYTDETFKTREAIQHESGILGPLLYGEVGDTLLIIFKNQASRPYNIYPHGITDVRPLYSRRLPKGVKHLKDFPILPGEIFKYKWTITVEDGPTKSDPRCLTRYYSSFVNWERDLASGLIGPLLICYKESVDQRGNQIMSDKRNVILFSVFDENRSWYLTENIQRFLPNPAGVQLEDPEFQASNIMHSINGYVFDSLQLSVCLHEVAYWYILSIGAQTDFLSVFFSGYTFKHKGVYEDTLTLFPFSGETVFMSMENPGLWILGCHNSDFRNRGMTALLKVSSCDWNTGDYYEDSYEDISAYFDSKNNAIEPRSFSQNPPVLKRHQREGTRTTLQSDQEEIDYDDTISVEMKKEDFDIYDEDENQSPRSFQKKTRHYFIAAVERLWDYGMSSSPHVLRNRAQSGSVPQFKKVVFQEFTDGSFTQPLYRGELNEHLGLLGPYIRAEVEDNIMVTFRNQASRPYSFYSSLISYMEDQRQGAEPRKNFVKPNETKTYFWKVQHHMAPTKDEFDCKAWAYFSDVDLEKDVHSGLIGPLLVCHTNTLNPAHGRQVTVQEFALFFTIFDETKSWYFTENMERNCRAPCNIQMEDPTFKENYRFHAINGYIMDTLPGLVMAQDQRIRWYLLSMGSNENIHSIHFSGHVFTVRKKEEYKMALYNLYPGVFETVEMLPSKAGIWRVECLIGEHLHAGMSTLFLVYSNKCQNPLGMASGHIRDFQITASGQYGQWAPKLARLHYSGSINAWSTKEPFSWIKVDLLAPMIIHGIKTQGARQKFSSLYISQFIIMYSLDGKKWQTYRGNSTGTDMVFFGNVDSSGIKHNIFNPPIIARYIRLHPTHYSIRSTLRMELMGCDLNSCSMPLGMESKAISDAQITASSYFTNMFATWSPSKARLHLQGRSNAWRPQVNNPKEWLQVDFQKTMKVTGVTTQGVKSLDTSMYVKEFLISSSQDGHQWTLFFQNGKVKVFQGNQDSFTPVVNSLDPPLLTRYLRIHPQSWEHQIALRMEVLGCEAQDLY

SEQ ID NO: 1813 - DNA, 4371 bp, synthetic construct
  misc_feature 1..4371: note = Variant of human B-domain deleted Factor VIII
  source 1..4371: mol_type = other DNA
atgcagattgaactgtctacctgcttcttcctctgtttgctgaggttctgctttagcgccactagacggtactaccttggcgctgtggagctgtcctgggactatatgcagagtgatttgggagagcttcccgtcgacgcacgatttcctcctcgcgttccaaagtcatttccctttaacacaagccaggtgtacaagaagacgctcttcgtcgaattcaccgatcacctgttcaatatcgccaaacccagaccaccatggatgggtcttttggggcctaccatacaagcggaggtgtatgacacagttgttatcactctcaagaacatggcttctcatccggtaagtcttcacgcagtgggcgtgtcctactggaaagcttcagaaggagccgagtatgatgatcagacatcccagagggagaaagaagacgacaaggtatttccaggtgggtctcatacctatgtgtggcaagtgctcaaagagaatggccctatggcaagcgatccgccgtgtttgacttacagctacctttcacacgttgacctcgtcaaggacctcaactccgggttgattggagccttgttggtatgcagggaaggatctcttgccaaagagaagacacagaccctggccaagtttatccttctctttgctgtgttcgatgagggcaaaagttggcatagcgaaacgaagaattccctcatgcaggatcgcgacgcagccagcgccagagcttggcccaagatgcacactgtgaacggatatgtcaataggacgcttcctggcttgattgggtgtcatcggaaaagtgtctactggcacgtgatcggaatggggacaacaccagaggtccactccatatttctcgaaggccataccttccttgttcgaaaccacagacaggcatccttggggatctctcccattacctttctcactgcccaaacgctccttcgtgacttgggtcagttccttctcttttgccatatcccgtcacaccagcatgatggtatggaagcttatgtgaaagtcgacagttgtcctgaggagccacagttgcgcatgaagaataatgaagaagccgaggattacgacgacgatctcaccgattctgagatggacgtggtgaggtttgatgacgacaactctccctccatcattcaagctcggagcggggcgaagaaacaccccaagacttgggtccactatatagcggcggaagaggaggattgggattacgctcctcttgtattggcaccagatgaccgctcatacaaaagccagtacctcaacaacggaccgcagagaattggccggaagtataagaaagtgcgatttatggcctatacagacgaaacctttaagacaagggaggccatccagcatgagagtgggattttgggacctcttctttacggcgaagttggtgataccctcctcatcatcttcaagaatcaagcttctcgcccctataacatttacccacacgggatcactgacgttaggcctttgtatagcagaagacttcccaaaggcgtgaagcatctcaaagacttccccattttgccaggcgagatctttaagtacaaatggaccattacagtggaagatggaccgactaaatcagaccctcgatgccttacgcggtactattcctccttcgtgaattgggagagagatttggcaagcggactcataggaccactcctcatctgttacaaggaatctgtagaccagaggggtaaccagattatgagtgataaacgcaatgtgatcctttttagcgtcttcgacgagaaccggtcctggtacttgaccgagaatatacaaaggttccttcccaaccccgcaggcgttcagttggaagaccctgagtttcaggccagcaatattatgcactcaatcaacggctatgtgtttgatagtctccagctttctgtttgcctccatgaagtagcctattggtacatcttgtcaattggtgctcaaacagacttcctctccgtcttcttctccggctacacctttaagcacaagggcgtgtatgaggacactctcacactctttccattttctggagaaaccgtgttcatgagcatggagaatccaggcctttggatcttgggttgccacaacagtgattttcgcaatcggggaatgactgctctcctcaaagtcagcagctgtgattggaacacaggcgactattacgaagattcttacgaggacataagtgcctactttgactccaagaataacgccattgagcccagatcattctcccagaatcctcccgtgcttaaaaggcatcagcgcgaaggtaccagaactactcttcagtctgatcaagaggagattgactatgacgacaccattagcgtggaaatgaagaaggaggatttcgatatctatgacgaagatgagaaccagtctccgcggagctttcagaagaagacgcgacactacttcattgcagcagtcgaaaggctttgggactacggtatgtcatcatcccctcatgtgttgcgcaatagagctcagagtggaagtgttccacagttcaagaaagtcgtctttcaagagtttacagatggcagcttcacacagcctctctatcggggcgagcttaacgaacatttgggactccttggtccctatatccgagccgaagtggaggacaacattatggttacctttaggaatcaagcctctcgcccctacagcttctactcctccctcatcagttatgaggaggatcagagacaaggcgctgaaccacggaagaactttgtgaaaccgaatgagacgaagacctacttctggaaagtacagcaccacatggcccccacaaaagacgaattcgattgcaaagcatgggcgtatttttcagacgttgacttggagaaagatgtacattcaggacttattggtcctttgttggtgtgtcacactaacactctcaatccagcccatggcaggcaggtgacagtccaggaattcgctcttttctttaccatctttgatgagaccaagtcctggtacttcacggaaaacatggagcgcaattgcagagccccctgtaacatacagatggaggaccctacctttaaggaaaattatcggttccacgcaatcaacggatacattatggatacactccctggccttgtgatggctcaggaccaacgaatcaggtggtacctcctcagcatgggttctaatgagaacatacactccattcacttttcaggacatgtgttcactgtccggaagaaagaagagtataagatggccagttacaatttgtatccaggcgtgtttgagaccgttgaaatgcttccctctaaagctggcatctggagagtagagtgcttgatcggagaacatcttcacgcaggtatgagcaccttgttcctcgtgtacagcaacaaatgtcagaatccacttggcatggccagtggacacattcgcgactttcagatcacagcatctggccagtatggacaatgggccccaaagttggctcgcctccattactccggtagcataaatgcgtggtccactaaagaacctttcagctggattaaggtcgatcttcttgcccccatgatcatccacggcattaagacacagggagcgaggcagaaattctcctccctctacatctcacagttcattattatgtatagtttggacggcaagaagtggcaaacttatagaggtaacagtactggaacagacatggtgttcttcggcaacgttgatagctctggcatcaaacacaacatctttaatcctcccataatagctcggtacatcagattgcatccgacccactacagcattaggagtacactccgaatggagcttatgggttgcgacttgaattcctgttcaatgccactcggaatggagtctaaagccatctctgatgcacagataaccgccagtagctactttacgaacatgtttgctacgtggtcaccctctaaggcaaggcttcatttgcaaggccggtctaatgcctggagacctcaggtgaacaacccgaaagaatggctccaggtggactttcagaagaccatgaaagtaacaggtgtcactactcagggagttaagtccttggatactagcatgtatgtgaaggagttccttatttcctcatcacaagatggccaccagtggaccctcttctttcagaatggtaaggtcaaagtgtttcagggcaatcaagacagcttcacacccgtggtgaacagtcttgatcctccactcttgacacgataccttcgaatccatccacagtcttgggagcaccagattgcattgcgcatggaagtacttggatgcgaggctcaggacctctac

SEQ ID NO: 1814 - protein, 1457 aa, synthetic construct
  REGION 1..1457: note = Variant of human B-domain deleted Factor VIII
MQIELSTCFFLCLLRFCFSATRRYYLGAVELSWDYMQSDLGELPVDARFPPRVPKSFPFNTSQVYKKTLFVEFTDHLFNIAKPRPPWMGLLGPTIQAEVYDTVVITLKNMASHPVSLHAVGVSYWKASEGAEYDDQTSQREKEDDKVFPGGSHTYVWQVLKENGPMASDPPCLTYSYLSHVDLVKDLNSGLIGALLVCREGSLAKEKTQTLAKFILLFAVFDEGKSWHSETKNSLMQDRDAASARAWPKMHTVNGYVNRTLPGLIGCHRKSVYWHVIGMGTTPEVHSIFLEGHTFLVRNHRQASLGISPITFLTAQTLLRDLGQFLLFCHIPSHQHDGMEAYVKVDSCPEEPQLRMKNNEEAEDYDDDLTDSEMDVVRFDDDNSPSIIQARSGAKKHPKTWVHYIAAEEEDWDYAPLVLAPDDRSYKSQYLNNGPQRIGRKYKKVRFMAYTDETFKTREAIQHESGILGPLLYGEVGDTLLIIFKNQASRPYNIYPHGITDVRPLYSRRLPKGVKHLKDFPILPGEIFKYKWTITVEDGPTKSDPRCLTRYYSSFVNWERDLASGLIGPLLICYKESVDQRGNQIMSDKRNVILFSVFDENRSWYLTENIQRFLPNPAGVQLEDPEFQASNIMHSINGYVFDSLQLSVCLHEVAYWYILSIGAQTDFLSVFFSGYTFKHKGVYEDTLTLFPFSGETVFMSMENPGLWILGCHNSDFRNRGMTALLKVSSCDWNTGDYYEDSYEDISAYFDSKNNAIEPRSFSQNPPVLKRHQREGTRTTLQSDQEEIDYDDTISVEMKKEDFDIYDEDENQSPRSFQKKTRHYFIAAVERLWDYGMSSSPHVLRNRAQSGSVPQFKKVVFQEFTDGSFTQPLYRGELNEHLGLLGPYIRAEVEDNIMVTFRNQASRPYSFYSSLISYEEDQRQGAEPRKNFVKPNETKTYFWKVQHHMAPTKDEFDCKAWAYFSDVDLEKDVHSGLIGPLLVCHTNTLNPAHGRQVTVQEFALFFTIFDETKSWYFTENMERNCRAPCNIQMEDPTFKENYRFHAINGYIMDTLPGLVMAQDQRIRWYLLSMGSNENIHSIHFSGHVFTVRKKEEYKMASYNLYPGVFETVEMLPSKAGIWRVECLIGEHLHAGMSTLFLVYSNKCQNPLGMASGHIRDFQITASGQYGQWAPKLARLHYSGSINAWSTKEPFSWIKVDLLAPMIIHGIKTQGARQKFSSLYISQFIIMYSLDGKKWQTYRGNSTGTDMVFFGNVDSSGIKHNIFNPPIIARYIRLHPTHYSIRSTLRMELMGCDLNSCSMPLGMESKAISDAQITASSYFTNMFATWSPSKARLHLQGRSNAWRPQVNNPKEWLQVDFQKTMKVTGVTTQGVKSLDTSMYVKEFLISSSQDGHQWTLFFQNGKVKVFQGNQDSFTPVVNSLDPPLLTRYLRIHPQSWEHQIALRMEVLGCEAQDLY

SEQ ID NO: 1815 - DNA, 4371 bp, synthetic construct
  misc_feature 1..4371: note = Variant of human B-domain deleted Factor VIII
  source 1..4371: mol_type = other DNA
atgcagattgaactgtctacctgcttcttcctctgtttgctgaggttctgctttagcgccactagacggtactaccttggcgctgtggagctgtcctgggactatatgcagagtgatttgggagagcttcccgtcgacgcacgatttcctcctcgcgttccaaagtcatttccctttaacacaagccaggtgtacaagaagacgctcttcgtcgaattcaccgatcacctgttcaatatcgccaaacccagaccaccatggatgggtcttttggggcctaccatacaagcggaggtgtatgacacagttgttatcactctcaagaacatggcttctcatccggtaagtcttcacgcagtgggcgtgtcctactggaaagcttcagaaggagccgagtatgatgatcagacatcccagagggagaaagaagacgacaaggtatttccaggtgggtctcatacctatgtgtggcaagtgctcaaagagaatggccctatggcaagcgatccgccgtgtttgacttacagctacctttcacacgttgacctcgtcaaggacctcaactccgggttgattggagccttgttggtatgcagggaaggatctcttgccaaagagaagacacagaccctggccaagtttatccttctctttgctgtgttcgatgagggcaaaagttggcatagcgaaacgaagaattccctcatgcaggatcgcgacgcagccagcgccagagcttggcccaagatgcacactgtgaacggatatgtcaataggacgcttcctggcttgattgggtgtcatcggaaaagtgtctactggcacgtgatcggaatggggacaacaccagaggtccactccatatttctcgaaggccataccttccttgttcgaaaccacagacaggcatccttggggatctctcccattacctttctcactgcccaaacgctccttcgtgacttgggtcagttccttctcttttgccatatcccgtcacaccagcatgatggtatggaagcttatgtgaaagtcgacagttgtcctgaggagccacagttgcgcatgaagaataatgaagaagccgaggattacgacgacgatctcaccgattctgagatggacgtggtgaggtttgatgacgacaactctccctccatcattcaagctcggagcggggcgaagaaacaccccaagacttgggtccactatatagcggcggaagaggaggattgggattacgctcctcttgtattggcaccagatgaccgctcatacaaaagccagtacctcaacaacggaccgcagagaattggccggaagtataagaaagtgcgatttatggcctatacagacgaaacctttaagacaagggaggccatccagcatgagagtgggattttgggacctcttctttacggcgaagttggtgataccctcctcatcatcttcaagaatcaagcttctcgcccctataacatttacccacacgggatcactgacgttaggcctttgtatagcagaagacttcccaaaggcgtgaagcatctcaaagacttccccattttgccaggcgagatctttaagtacaaatggaccattacagtggaagatggaccgactaaatcagaccctcgatgccttacgcggtactattcctccttcgtgaattgggagagagatttggcaagcggactcataggaccactcctcatctgttacaaggaatctgtagaccagaggggtaaccagattatgagtgataaacgcaatgtgatcctttttagcgtcttcgacgagaaccggtcctggtacttgaccgagaatatacaaaggttccttcccaaccccgcaggcgttcagttggaagaccctgagtttcaggccagcaatattatgcactcaatcaacggctatgtgtttgatagtctccagctttctgtttgcctccatgaagtagcctattggtacatcttgtcaattggtgctcaaacagacttcctctccgtcttcttctccggctacacctttaagcacaagggcgtgtatgaggacactctcacactctttccattttctggagaaaccgtgttcatgagcatggagaatccaggcctttggatcttgggttgccacaacagtgattttcgcaatcggggaatgactgctctcctcaaagtcagcagctgtgattggaacacaggcgactattacgaagattcttacgaggacataagtgcctactttgactccaagaataacgccattgagcccagatcattctcccagaatcctcccgtgcttaaaaggcatcagcgcgaaggtaccagaactactcttcagtctgatcaagaggagattgactatgacgacaccattagcgtggaaatgaagaaggaggatttcgatatctatgacgaagatgagaaccagtctccgcggagctttcagaagaagacgcgacactacttcattgcagcagtcgaaaggctttgggactacggtatgtcatcatcgcctcatgtgttgcgcaatagagctcagagtggaagtgttccacagttcaagaaagtcgtctttcaagagtttacagatggcagcttcacacagcctctctatcggggcgagcttaacgaacatttgggactccttggtccctatatccgagccgaagtggaggacaacattatggttacctttaggaatcaagcctctcgcccctacagcttctactcctccctcatcagttatgaggaggatcagagacaaggcgctgaaccacggaagaactttgtgaaaccgaatgagacgaagacctacttctggaaagtacagcaccacatggcccccacaaaagacgaattcgattgcaaagcatgggcgtatttttcagacgttgacttggagaaagatgtacattcaggacttattggtcctttgttggtgtgtcacactaacactctcaatccagcccatggcaggcaggtgacagtccaggaattcgctcttttctttaccatctttgatgagaccaagtcctggtacttcacggaaaacatggagcgcaattgcagagccccctgtaacatacagatggaggaccctacctttaaggaaaattatcggttccacgcaatcaacggatacattatggatacactccctggccttgtgatggctcaggaccaacgaatcaggtggtacctcctcagcatgggttctaatgagaacatacactccattcacttttcaggacatgtgttctctgtccggaagaaagaagagtataagatggccctctacaatttgtatccaggcgtgtttgagaccgttgaaatgcttccctctaaagctggcatctggagagtagagtgcttgatcggagaacatcttcacgcaggtatgagcaccttgttcctcgtgtacagcaacaaatgtcagaatccacttggcatggccagtggacacattcgcgactttcagatcacagcatctggccagtatggacaatgggccccaaagttggctcgcctccattactccggtagcataaatgcgtggtccactaaagaacctttcagctggattaaggtcgatcttcttgcccccatgatcatccacggcattaagacacagggagcgaggcagaaattctcctccctctacatctcacagttcattattatgtatagtttggacggcaagaagtggcaaacttatagaggtaacagtactggaacagacatggtgttcttcggcaacgttgatagctctggcatcaaacacaacatctttaatcctcccataatagctcggtacatcagattgcatccgacccactacagcattaggagtacactccgaatggagcttatgggttgcgacttgaattcctgttcaatgccactcggaatggagtctaaagccatctctgatgcacagataaccgccagtagctactttacgaacatgtttgctacgtggtcaccctctaaggcaaggcttcatttgcaaggccggtctaatgcctggagacctcaggtgaacaacccgaaagaatggctccaggtggactttcagaagaccatgaaagtaacaggtgtcactactcagggagttaagtccttggatactagcatgtatgtgaaggagttccttatttcctcatcacaagatggccaccagtggaccctcttctttcagaatggtaaggtcaaagtgtttcagggcaatcaagacagcttcacacccgtggtgaacagtcttgatcctccactcttgacacgataccttcgaatccatccacagtcttgggagcaccagattgcattgcgcatggaagtacttggatgcgaggctcaggacctctac

SEQ ID NO: 1816 - protein, 1457 aa, synthetic construct
  REGION 1..1457: note = Variant of human B-domain deleted Factor VIII
MQIELSTCFFLCLLRFCFSATRRYYLGAVELSWDYMQSDLGELPVDARFPPRVPKSFPFNTSQVYKKTLFVEFTDHLFNIAKPRPPWMGLLGPTIQAEVYDTVVITLKNMASHPVSLHAVGVSYWKASEGAEYDDQTSQREKEDDKVFPGGSHTYVWQVLKENGPMASDPPCLTYSYLSHVDLVKDLNSGLIGALLVCREGSLAKEKTQTLAKFILLFAVFDEGKSWHSETKNSLMQDRDAASARAWPKMHTVNGYVNRTLPGLIGCHRKSVYWHVIGMGTTPEVHSIFLEGHTFLVRNHRQASLGISPITFLTAQTLLRDLGQFLLFCHIPSHQHDGMEAYVKVDSCPEEPQLRMKNNEEAEDYDDDLTDSEMDVVRFDDDNSPSIIQARSGAKKHPKTWVHYIAAEEEDWDYAPLVLAPDDRSYKSQYLNNGPQRIGRKYKKVRFMAYTDETFKTREAIQHESGILGPLLYGEVGDTLLIIFKNQASRPYNIYPHGITDVRPLYSRRLPKGVKHLKDFPILPGEIFKYKWTITVEDGPTKSDPRCLTRYYSSFVNWERDLASGLIGPLLICYKESVDQRGNQIMSDKRNVILFSVFDENRSWYLTENIQRFLPNPAGVQLEDPEFQASNIMHSINGYVFDSLQLSVCLHEVAYWYILSIGAQTDFLSVFFSGYTFKHKGVYEDTLTLFPFSGETVFMSMENPGLWILGCHNSDFRNRGMTALLKVSSCDWNTGDYYEDSYEDISAYFDSKNNAIEPRSFSQNPPVLKRHQREGTRTTLQSDQEEIDYDDTISVEMKKEDFDIYDEDENQSPRSFQKKTRHYFIAAVERLWDYGMSSSPHVLRNRAQSGSVPQFKKVVFQEFTDGSFTQPLYRGELNEHLGLLGPYIRAEVEDNIMVTFRNQASRPYSFYSSLISYEEDQRQGAEPRKNFVKPNETKTYFWKVQHHMAPTKDEFDCKAWAYFSDVDLEKDVHSGLIGPLLVCHTNTLNPAHGRQVTVQEFALFFTIFDETKSWYFTENMERNCRAPCNIQMEDPTFKENYRFHAINGYIMDTLPGLVMAQDQRIRWYLLSMGSNENIHSIHFSGHVFSVRKKEEYKMALYNLYPGVFETVEMLPSKAGIWRVECLIGEHLHAGMSTLFLVYSNKCQNPLGMASGHIRDFQITASGQYGQWAPKLARLHYSGSINAWSTKEPFSWIKVDLLAPMIIHGIKTQGARQKFSSLYISQFIIMYSLDGKKWQTYRGNSTGTDMVFFGNVDSSGIKHNIFNPPIIARYIRLHPTHYSIRSTLRMELMGCDLNSCSMPLGMESKAISDAQITASSYFTNMFATWSPSKARLHLQGRSNAWRPQVNNPKEWLQVDFQKTMKVTGVTTQGVKSLDTSMYVKEFLISSSQDGHQWTLFFQNGKVKVFQGNQDSFTPVVNSLDPPLLTRYLRIHPQSWEHQIALRMEVLGCEAQDLY

SEQ ID NO: 1817 - DNA, 4371 bp, synthetic construct
  misc_feature 1..4371: note = Variant of human B-domain deleted Factor VIII
  source 1..4371: mol_type = other DNA
atgcagattgaactgtctacctgcttcttcctctgtttgctgaggttctgctttagcgccactagacggtactaccttggcgctgtggagctgtcctgggactatatgcagagtgatttgggagagcttcccgtcgacgcacgatttcctcctcgcgttccaaagtcatttccctttaacacaagccaggtgtacaagaagacgctcttcgtcgaattcaccgatcacctgttcaatatcgccaaacccagaccaccatggatgggtcttttggggcctaccatacaagcggaggtgtatgacacagttgttatcactctcaagaacatggcttctcatccggtaagtcttcacgcagtgggcgtgtcctactggaaagcttcagaaggagccgagtatgatgatcagacatcccagagggagaaagaagacgacaaggtatttccaggtgggtctcatacctatgtgtggcaagtgctcaaagagaatggccctatggcaagcgatccgccgtgtttgacttacagctacctttcacacgttgacctcgtcaaggacctcaactccgggttgattggagccttgttggtatgcagggaaggatctcttgccaaagagaagacacagaccctggccaagtttatccttctctttgctgtgttcgatgagggcaaaagttggcatagcgaaacgaagaattccctcatgcaggatcgcgacgcagccagcgccagagcttggcccaagatgcacactgtgaacggatatgtcaataggacgcttcctggcttgattgggtgtcatcggaaaagtgtctactggcacgtgatcggaatggggacaacaccagaggtccactccatatttctcgaaggccataccttccttgttcgaaaccacagacaggcatccttggggatctctcccattacctttctcactgcccaaacgctccttcgtgacttgggtcagttccttctcttttgccatatcccgtcacaccagcatgatggtatggaagcttatgtgaaagtcgacagttgtcctgaggagccacagttgcgcatgaagaataatgaagaagccgaggattacgacgacgatctcaccgattctgagatggacgtggtgaggtttgatgacgacaactctccctccatcattcaagctcggagcggggcgaagaaacaccccaagacttgggtccactatatagcggcggaagaggaggattgggattacgctcctcttgtattggcaccagatgaccgctcatacaaaagccagtacctcaacaacggaccgcagagaattggccggaagtataagaaagtgcgatttatggcctatacagacgaaacctttaagacaagggaggccatccagcatgagagtgggattttgggacctcttctttacggcgaagttggtgataccctcctcatcatcttcaagaatcaagcttctcgcccctataacatttacccacacgggatcactgacgttaggcctttgtatagcagaagacttcccaaaggcgtgaagcatctcaaagacttccccattttgccaggcgagatctttaagtacaaatggaccattacagtggaagatggaccgactaaatcagaccctcgatgccttacgcggtactattcctccttcgtgaattgggagagagatttggcaagcggactcataggaccactcctcatctgttacaaggaatctgtagaccagaggggtaaccagattatgagtgataaacgcaatgtgatcctttttagcgtcttcgacgagaaccggtcctggtacttgaccgagaatatacaaaggttccttcccaaccccgcaggcgttcagttggaagaccctgagtttcaggccagcaatattatgcactcaatcaacggctatgtgtttgatagtctccagctttctgtttgcctccatgaagtagcctattggtacatcttgtcaattggtgctcaaacagacttcctctccgtcttcttctccggctacacctttaagcacaagggcgtgtatgaggacactctcacactctttccattttctggagaaaccgtgttcatgagcatggagaatccaggcctttggatcttgggttgctataacagtgattttcgcaatcggggaatgactgctctcctcaaagtcagcagctgtgattggaacacaggcgactattacgaagattcttacgaggacataagtgcctactttgactccaagaataacgccattgagcccagatcattctcccagaatcctcccgtgcttaaaaggcatcagcgcgaaggtaccagaactactcttcagtctgatcaagaggagattgactatgacgacaccattagcgtggaaatgaagaaggaggatttcgatatctatgacgaagatgagaaccagtctccgcggagctttcagaagaagacgcgacactacttcattgcagcagtcgaaaggctttgggactacggtatgtcatcatcccctcatgtgttgcgcaatagagctcagagtggaagtgttccacagttcaagaaagtcgtctttcaagagtttacagatggcagcttcacacagcctctctatcggggcgagcttaacgaacatttgggactccttggtccctatatccgagccgaagtggaggacaacattatggttacctttaggaatcaagcctctcgcccctacagcttctactcctccctcatcagttatgaggaggatcagagacaaggcgctgaaccacggaagaactttgtgaaaccgaatgagacgaagacctacttctggaaagtacagcaccacatggcccccacaaaagacgaattcgattgcaaagcatgggcgtatttttcagacgttgacttggagaaagatgtacattcaggacttattggtcctttgttggtgtgtcacactaacactctcaatccagcccatggcaggcaggtgacagtccaggaattcgctcttttctttaccatctttgatgagaccaagtcctggtacttcacggaaaacatggagcgcaattgcagagccccctgtaacatacagatggaggaccctacctttaaggaaaattatcggttccacgcaatcaacggatacattatggatacactccctggccttgtgatggctcaggaccaacgaatcaggtggtacctcctcagcatgggttctaatgagaacatacactccattcacttttcaggacatgtgttcactgtccggaagaaagaagagtataagatggccctctacaatttgtatccaggcgtgtttgagaccgttgaaatgcttccctctaaagctggcatctggagagtagagtgcttgatcggagaacatcttcacgcaggtatgagcaccttgttcctcgtgtacagcaacaaatgtcagaatccacttggcatggccagtggacacattcgcgactttcagatcacagcatctggccagtatggacaatgggccccaaagttggctcgcctccattactccggtagcataaatgcgtggtccactaaagaacctttcagctggattaaggtcgatcttcttgcccccatgatcatccacggcattaagacacagggagcgaggcagaaattctcctccctctacatctcacagttcattattatgtatagtttggacggcaagaagtggcaaacttatagaggtaacagtactggaacagacatggtgttcttcggcaacgttgatagctctggcatcaaacacaacatctttaatcctcccataatagctcggtacatcagattgcatccgacccactacagcattaggagtacactccgaatggagcttatgggttgcgacttgaattcctgttcaatgccactcggaatggagtctaaagccatctctgatgcacagataaccgccagtagctactttacgaacatgtttgctacgtggtcaccctctaaggcaaggcttcatttgcaaggccggtctaatgcctggagacctcaggtgaacaacccgaaagaatggctccaggtggactttcagaagaccatgaaagtaacaggtgtcactactcagggagttaagtccttggatactagcatgtatgtgaaggagttccttatttcctcatcacaagatggccaccagtggaccctcttctttcagaatggtaaggtcaaagtgtttcagggcaatcaagacagcttcacacccgtggtgaacagtcttgatcctccactcttgacacgataccttcgaatccatccacagtcttgggagcaccagattgcattgcgcatggaagtacttggatgcgaggctcaggacctctac

SEQ ID NO: 1818 - protein, 1457 aa, synthetic construct
  REGION 1..1457: note = Variant of human B-domain deleted Factor VIII
MQIELSTCFFLCLLRFCFSATRRYYLGAVELSWDYMQSDLGELPVDARFPPRVPKSFPFNTSQVYKKTLFVEFTDHLFNIAKPRPPWMGLLGPTIQAEVYDTVVITLKNMASHPVSLHAVGVSYWKASEGAEYDDQTSQREKEDDKVFPGGSHTYVWQVLKENGPMASDPPCLTYSYLSHVDLVKDLNSGLIGALLVCREGSLAKEKTQTLAKFILLFAVFDEGKSWHSETKNSLMQDRDAASARAWPKMHTVNGYVNRTLPGLIGCHRKSVYWHVIGMGTTPEVHSIFLEGHTFLVRNHRQASLGISPITFLTAQTLLRDLGQFLLFCHIPSHQHDGMEAYVKVDSCPEEPQLRMKNNEEAEDYDDDLTDSEMDVVRFDDDNSPSIIQARSGAKKHPKTWVHYIAAEEEDWDYAPLVLAPDDRSYKSQYLNNGPQRIGRKYKKVRFMAYTDETFKTREAIQHESGILGPLLYGEVGDTLLIIFKNQASRPYNIYPHGITDVRPLYSRRLPKGVKHLKDFPILPGEIFKYKWTITVEDGPTKSDPRCLTRYYSSFVNWERDLASGLIGPLLICYKESVDQRGNQIMSDKRNVILFSVFDENRSWYLTENIQRFLPNPAGVQLEDPEFQASNIMHSINGYVFDSLQLSVCLHEVAYWYILSIGAQTDFLSVFFSGYTFKHKGVYEDTLTLFPFSGETVFMSMENPGLWILGCYNSDFRNRGMTALLKVSSCDWNTGDYYEDSYEDISAYFDSKNNAIEPRSFSQNPPVLKRHQREGTRTTLQSDQEEIDYDDTISVEMKKEDFDIYDEDENQSPRSFQKKTRHYFIAAVERLWDYGMSSSPHVLRNRAQSGSVPQFKKVVFQEFTDGSFTQPLYRGELNEHLGLLGPYIRAEVEDNIMVTFRNQASRPYSFYSSLISYEEDQRQGAEPRKNFVKPNETKTYFWKVQHHMAPTKDEFDCKAWAYFSDVDLEKDVHSGLIGPLLVCHTNTLNPAHGRQVTVQEFALFFTIFDETKSWYFTENMERNCRAPCNIQMEDPTFKENYRFHAINGYIMDTLPGLVMAQDQRIRWYLLSMGSNENIHSIHFSGHVFTVRKKEEYKMALYNLYPGVFETVEMLPSKAGIWRVECLIGEHLHAGMSTLFLVYSNKCQNPLGMASGHIRDFQITASGQYGQWAPKLARLHYSGSINAWSTKEPFSWIKVDLLAPMIIHGIKTQGARQKFSSLYISQFIIMYSLDGKKWQTYRGNSTGTDMVFFGNVDSSGIKHNIFNPPIIARYIRLHPTHYSIRSTLRMELMGCDLNSCSMPLGMESKAISDAQITASSYFTNMFATWSPSKARLHLQGRSNAWRPQVNNPKEWLQVDFQKTMKVTGVTTQGVKSLDTSMYVKEFLISSSQDGHQWTLFFQNGKVKVFQGNQDSFTPVVNSLDPPLLTRYLRIHPQSWEHQIALRMEVLGCEAQDLY

SEQ ID NO: 1819 - DNA, 4371 bp, synthetic construct
  misc_feature 1..4371: note = Variant of human B-domain deleted Factor VIII
  source 1..4371: mol_type = other DNA
atgcagattgaactgtctacctgcttcttcctctgtttgctgaggttctgctttagcgccactagacggtactaccttggcgctgtggagctgtcctgggactatatgcagagtgatttgggagagcttcccgtcgacgcacgatttcctcctcgcgttccaaagtcatttccctttaacacaagccaggtgtacaagaagacgctcttcgtcgaattcaccgatcacctgttcaatatcgccaaacccagaccaccatggatgggtcttttggggcctaccatacaagcggaggtgtatgacacagttgttatcactctcaagaacatggcttctcatccggtaagtcttcacgcagtgggcgtgtcctactggaaagcttcagaaggagccgagtatgatgatcagacatcccagagggagaaagaagacgacaaggtatttccaggtgggtctcatacctatgtgtggcaagtgctcaaagagaatggccctatggcaagcgatccgccgtgtttgactcatagctacctttcacacgttgacctcgtcaaggacctcaactccgggttgattggagccttgttggtatgcagggaaggatctcttgccaaagagaagacacagaccctggccaagtttatccttctctttgctgtgttcgatgagggcaaaagttggcatagcgaaacgaagaattccctcatgcaggatcgcgacgcagccagcgccagagcttggcccaagatgcacactgtgaacggatatgtcaataggacgcttcctggcttgattgggtgtcatcggaaaagtgtctactggcacgtgatcggaatggggacaacaccagaggtccactccatatttctcgaaggccataccttccttgttcgaaaccacagacaggcatccttggggatctctcccattacctttctcactgcccaaacgctccttcgtgacttgggtcagttccttctcttttgccatatcccgtcacaccagcatgatggtatggaagcttatgtgaaagtcgacagttgtcctgaggagccacagttgcgcatgaagaataatgaagaagccgaggattacgacgacgatctcaccgattctgagatggacgtggtgaggtttgatgacgacaactctccctccatcattcaagctcggagcggggcgaagaaacaccccaagacttgggtccactatatagcggcggaagaggaggattgggattacgctcctcttgtattggcaccagatgaccgctcatacaaaagccagtacctcaacaacggaccgcagagaattggccggaagtataagaaagtgcgatttatggcctatacagacgaaacctttaagacaagggaggccatccagcatgagagtgggattttgggacctcttctttacggcgaagttggtgataccctcctcatcatcttcaagaatcaagcttctcgcccctataacatttacccacacgggatcactgacgttaggcctttgtatagcagaagacttcccaaaggcgtgaagcatctcaaagacttccccattttgccaggcgagatctttaagtacaaatggaccattacagtggaagatggaccgactaaatcagaccctcgatgccttacgcggtactattcctccttcgtgaattgggagagagatttggcaagcggactcataggaccactcctcatctgttacaaggaatctgtagaccagaggggtaaccagattatgagtgataaacgcaatgtgatcctttttagcgtcttcgacgagaaccggtcctggtacttgaccgagaatatacaaaggttccttcccaaccccgcaggcgttcagttggaagaccctgagtttcaggccagcaatattatgcactcaatcaacggctatgtgtttgatagtctccagctttctgtttgcctccatgaagtagcctattggtacatcttgtcaattggtgctcaaacagacttcctctccgtcttcttctccggctacacctttaagcacaagggcgtgtatgaggacactctcacactctttccattttctggagaaaccgtgttcatgagcatggagaatccaggcctttggatcttgggttgccacaacagtgattttcgcaatcggggaatgactgctctcctcaaagtcagcagctgtgattggaacacaggcgactattacgaagattcttacgaggacataagtgcctactttgactccaagaataacgccattgagcccagatcattctcccagaatcctcccgtgcttaaaaggcatcagcgcgaaggtaccagaactactcttcagtctgatcaagaggagattgactatgacgacaccattagcgtggaaatgaagaaggaggatttcgatatctatgacgaagatgagaaccagtctccgcggagctttcagaagaagacgcgacactacttcattgcagcagtcgaaaggctttgggactacggtatgtcatcatcccctcatgtgttgcgcaatagagctcagagtggaagtgttccacagttcaagaaagtcgtctttcaagagtttacagatggcagcttcacacagcctctctatcggggcgagcttaacgaacatttgggactccttggtccctatatccgagccgaagtggaggacaacattatggttacctttaggaatcaagcctctcgcccctacagcttctactcctccctcatcagttatgaggaggatcagagacaaggcgctgaaccacggaagaactttgtgaaaccgaatgagacgaagacctacttctggaaagtacagcaccacatggcccccacaaaagacgaattcgattgcaaagcatgggcgtatttttcagacgttgacttggagaaagatgtacattcaggacttattggtcctttgttggtgtgtcacactaacactctcaatccagcccatggcaggcaggtgacagtccaggaattcgctcttttctttaccatctttgatgagaccaagtcctggtacttcacggaaaacatggagcgcaattgcagagccccctgtaacatacagatggaggaccctacctttaaggaaaattatcggttccacgcaatcaacggatacattatggatacactccctggccttgtgatggctcaggaccaacgaatcaggtggtacctcctcagcatgggttctaatgagaacatacactccattcacttttcaggacatgtgttcactgtccggaagaaagaagagtataagatggccctctacaatttgtatccaggcgtgtttgagaccgttgaaatgcttccctctaaagctggcatctggagagtagagtgcttgatcggagaacatcttcacgcaggtatgagcaccttgttcctcgtgtacagcaacaaatgtcagaatccacttggcatggccagtggacacattcgcgactttcagatcacagcatctggccagtatggacaatgggccccaaagttggctcgcctccattactccggtagcataaatgcgtggtccactaaagaacctttcagctggattaaggtcgatcttcttgcccccatgatcatccacggcattaagacacagggagcgaggcagaaattctcctccctctacatctcacagttcattattatgtatagtttggacggcaagaagtggcaaacttatagaggtaacagtactggaacagacatggtgttcttcggcaacgttgatagctctggcatcaaacacaacatctttaatcctcccataatagctcggtacatcagattgcatccgacccactacagcattaggagtacactccgaatggagcttatgggttgcgacttgaattcctgttcaatgccactcggaatggagtctaaagccatctctgatgcacagataaccgccagtagctactttacgaacatgtttgctacgtggtcaccctctaaggcaaggcttcatttgcaaggccggtctaatgcctggagacctcaggtgaacaacccgaaagaatggctccaggtggactttcagaagaccatgaaagtaacaggtgtcactactcagggagttaagtccttggatactagcatgtatgtgaaggagttccttatttcctcatcacaagatggccaccagtggaccctcttctttcagaatggtaaggtcaaagtgtttcagggcaatcaagacagcttcacacccgtggtgaacagtcttgatcctccactcttgacacgataccttcgaatccatccacagtcttgggagcaccagattgcattgcgcatggaagtacttggatgcgaggctcaggacctctac

SEQ ID NO: 1820 - protein, 1457 aa, synthetic construct
  REGION 1..1457: note = Variant of human B-domain deleted Factor VIII
MQIELSTCFFLCLLRFCFSATRRYYLGAVELSWDYMQSDLGELPVDARFPPRVPKSFPFNTSQVYKKTLFVEFTDHLFNIAKPRPPWMGLLGPTIQAEVYDTVVITLKNMASHPVSLHAVGVSYWKASEGAEYDDQTSQREKEDDKVFPGGSHTYVWQVLKENGPMASDPPCLTHSYLSHVDLVKDLNSGLIGALLVCREGSLAKEKTQTLAKFILLFAVFDEGKSWHSETKNSLMQDRDAASARAWPKMHTVNGYVNRTLPGLIGCHRKSVYWHVIGMGTTPEVHSIFLEGHTFLVRNHRQASLGISPITFLTAQTLLRDLGQFLLFCHIPSHQHDGMEAYVKVDSCPEEPQLRMKNNEEAEDYDDDLTDSEMDVVRFDDDNSPSIIQARSGAKKHPKTWVHYIAAEEEDWDYAPLVLAPDDRSYKSQYLNNGPQRIGRKYKKVRFMAYTDETFKTREAIQHESGILGPLLYGEVGDTLLIIFKNQASRPYNIYPHGITDVRPLYSRRLPKGVKHLKDFPILPGEIFKYKWTITVEDGPTKSDPRCLTRYYSSFVNWERDLASGLIGPLLICYKESVDQRGNQIMSDKRNVILFSVFDENRSWYLTENIQRFLPNPAGVQLEDPEFQASNIMHSINGYVFDSLQLSVCLHEVAYWYILSIGAQTDFLSVFFSGYTFKHKGVYEDTLTLFPFSGETVFMSMENPGLWILGCHNSDFRNRGMTALLKVSSCDWNTGDYYEDSYEDISAYFDSKNNAIEPRSFSQNPPVLKRHQREGTRTTLQSDQEEIDYDDTISVEMKKEDFDIYDEDENQSPRSFQKKTRHYFIAAVERLWDYGMSSSPHVLRNRAQSGSVPQFKKVVFQEFTDGSFTQPLYRGELNEHLGLLGPYIRAEVEDNIMVTFRNQASRPYSFYSSLISYEEDQRQGAEPRKNFVKPNETKTYFWKVQHHMAPTKDEFDCKAWAYFSDVDLEKDVHSGLIGPLLVCHTNTLNPAHGRQVTVQEFALFFTIFDETKSWYFTENMERNCRAPCNIQMEDPTFKENYRFHAINGYIMDTLPGLVMAQDQRIRWYLLSMGSNENIHSIHFSGHVFTVRKKEEYKMALYNLYPGVFETVEMLPSKAGIWRVECLIGEHLHAGMSTLFLVYSNKCQNPLGMASGHIRDFQITASGQYGQWAPKLARLHYSGSINAWSTKEPFSWIKVDLLAPMIIHGIKTQGARQKFSSLYISQFIIMYSLDGKKWQTYRGNSTGTDMVFFGNVDSSGIKHNIFNPPIIARYIRLHPTHYSIRSTLRMELMGCDLNSCSMPLGMESKAISDAQITASSYFTNMFATWSPSKARLHLQGRSNAWRPQVNNPKEWLQVDFQKTMKVTGVTTQGVKSLDTSMYVKEFLISSSQDGHQWTLFFQNGKVKVFQGNQDSFTPVVNSLDPPLLTRYLRIHPQSWEHQIALRMEVLGCEAQDLY

SEQ ID NO: 1821 - DNA, 4371 bp, synthetic construct
  misc_feature 1..4371: note = Variant of human B-domain deleted Factor VIII
  source 1..4371: mol_type = other DNA
atgcagattgaactgtctacctgcttcttcctctgtttgctgaggttctgctttagcgccactagacggtactaccttggcgctgtggagctgtcctgggactatatgcagagtgatttgggagagcttcccgtcgacgcacgatttcctcctcgcgttccaaagtcatttccctttaacacaagccaggtgtacaagaagacgctcttcgtcgaattcaccgatcacctgttcaatatcgccaaacccagaccaccatggatgggtcttttggggcctaccatacaagcggaggtgtatgacacagttgttatcactctcaagaacatggcttctcatccggtaagtcttcacgcagtgggcgtgtcctactggaaagcttcagaaggagccgagtatgatgatcagacatcccagagggagaaagaagacgacaaggtatttccaggtgggtctcatacctatgtgtggcaagtgctcaaagagaatggccctatggcaagcgatccgccgtgtttgacttacagctacctttcacacgttgacctcgtcaaggacctcaactccgggttgattggagccttgttggtatgcagggaaggatctcttgccaaagagaagacacagaccctggccaagtttatccttctctttgctgtgttcgatgagggcaaaagttggcatagcgaaacgaagaattccctcatgcaggatcgcgacgcagccagcgccagagcttggcccaagatgcacactgtgaacggatatgtcaataggacgcttcctggcttgattgggtgtcatcggaaaagtgtctactggcacgtgatcggaatggggacaacaccagaggtccactccatatttctcgaaggccataccttccttgttcgaaaccacagacaggcatccttggggatctctcccattacctttctcactgcccaaacgctccttcgtgacttgggtcagttccttctcttttgccatatcccgtcacaccagcatgatggtatggaagcttatgtgaaagtcgacagttgtcctgaggagccacagttgcgcatgaagaataatgaagaagccgaggattacgacgacgatctcaccgattctgagatggacgtggtgaggtttgatgacgacaactctccctccatcattcaagctcggagcggggcgaagaaacaccccaagacttgggtccactatatagcggcggaagaggaggattgggattacgctcctcttgtattggcaccagatgaccgctcatacaaaagccagtacctcaacaacggaccgcagagaattggccggaagtataagaaagtgcgatttatggcctatacagacgaaacctttaagacaagggaggccatccagcatgagagtgggattttgggacctcttctttacggcgaagttggtgataccctcctcatcatcttcaagaatcaagcttctcgcccctataacatttacccacacgggatcactgacgttaggcctttgtatagcagaagacttcccaaaggcgtgaagcatctcaaagacttccccattttgccaggcgagatctttaagtacaaatggaccattacagtggaagatggaccgactaaatcagaccctcgatgccttacgcggtactattcctccttcgtgaattgggagagagatttggcaagcggactcataggaccactcctcatctgttacaaggaatctgtagaccagaggggtaaccagattatgagtgataaacgcaatgtgatcctttttagcgtcttcgacgagaaccggtcctggtacttgaccgagaatatacaaaggttccttcccaaccccgcaggcgttcagttggaagaccctgagtttcaggccagcaatattatgcactcaatcaacggctatgtgtttgatagtctccagctttctgtttgcctccatgaagtagcctattggtacatcttgtcaattggtgctcaaacagacttcctctccgtcttcttctccggctacacctttaagcacaagggcgtgtatgaggacactctcacactctttccattttctggagaaaccgtgttcatgagcatggagaatccaggcctttggatcttgggttgccacaacagtgattttcgcaatcggggaatgactgctctcctcaaagtcagcagctgtgattggaacacaggcgactattacgaagattcttacgaggacataagtgcctactttgactccaagaataacgccattgagcccagatcattctcccagaatcctcccgtgcttaaaaggcatcagcgcgaaggtaccagaactactcttcagtctgatcaagaggagattgactatgacgacaccattagcgtggaaatgaagaaggaggatttcgatatctatgacgaagatgagaaccagtctccgcggagctttcagaagaagacgcgacactacttcattgcagcagtcgaaaggctttgggactacggtatgtcatcatcccctcatgtgttgcgcaatagagctcagagtggaagtgttccacagttcaagaaagtcgtctttcaagagtttacagatggcagcttcacacagcctctctatcggggcgagcttaacgaacatttgggactccttggtccctatatccgagccgaagtggaggacaacattatggttacctttaggaatcaagcctctcgcccctacagcttctactcctccctcatcagttatgaggaggatcagagacaaggcgctgaaccacggaagaactttgtgaaaccgaatgagacgaagacctacttctggaaagtacagcaccacatggcccccacaaaagacgaattcgattgcaaagcatgggcgtatttttcagacgttgacttggagaaagatgtacattcaggacttattggtcctttgttggtgtgtcacactaacactctcaatccagcccatggcaggcaggtgacagtccaggaattcgctcttttctttaccatctttgatgagaccaagtcctggtacttcacggaaaacatggagcgcaattgcagagccccctgtaacatacagatggaggaccctacctttaaggaaaattatcggttccacgcaatcaacggatacattatggatacactccctggccttgtgatggctcaggaccaacgaatcaggtggtacctcctcagcatgggttctaatgagaacatacactccattcacttttcaggacatgtgttcactgtccggggtaaagaagagtataagatggccctctacaatttgtatccaggcgtgtttgagaccgttgaaatgcttccctctaaagctggcatctggagagtagagtgcttgatcggagaacatcttcacgcaggtatgagcaccttgttcctcgtgtacagcaacaaatgtcagaatccacttggcatggccagtggacacattcgcgactttcagatcacagcatctggccagtatggacaatgggccccaaagttggctcgcctccattactccggtagcataaatgcgtggtccactaaagaacctttcagctggattaaggtcgatcttcttgcccccatgatcatccacggcattaagacacagggagcgaggcagaaattctcctccctctacatctcacagttcattattatgtatagtttggacggcaagaagtggcaaacttatagaggtaacagtactggaacagacatggtgttcttcggcaacgttgatagctctggcatcaaacacaacatctttaatcctcccataatagctcggtacatcagattgcatccgacccactacagcattaggagtacactccgaatggagcttatgggttgcgacttgaattcctgttcaatgccactcggaatggagtctaaagccatctctgatgcacagataaccgccagtagctactttacgaacatgtttgctacgtggtcaccctctaaggcaaggcttcatttgcaaggccggtctaatgcctggagacctcaggtgaacaacccgaaagaatggctccaggtggactttcagaagaccatgaaagtaacaggtgtcactactcagggagttaagtccttggatactagcatgtatgtgaaggagttccttatttcctcatcacaagatggccaccagtggaccctcttctttcagaatggtaaggtcaaagtgtttcagggcaatcaagacagcttcacacccgtggtgaacagtcttgatcctccactcttgacacgataccttcgaatccatccacagtcttgggagcaccagattgcattgcgcatggaagtacttggatgcgaggctcaggacctctac

SEQ ID NO: 1822 - protein, 1457 aa, synthetic construct
  REGION 1..1457: note = Variant of human B-domain deleted Factor VIII
MQIELSTCFFLCLLRFCFSATRRYYLGAVELSWDYMQSDLGELPVDARFPPRVPKSFPFNTSQVYKKTLFVEFTDHLFNIAKPRPPWMGLLGPTIQAEVYDTVVITLKNMASHPVSLHAVGVSYWKASEGAEYDDQTSQREKEDDKVFPGGSHTYVWQVLKENGPMASDPPCLTYSYLSHVDLVKDLNSGLIGALLVCREGSLAKEKTQTLAKFILLFAVFDEGKSWHSETKNSLMQDRDAASARAWPKMHTVNGYVNRTLPGLIGCHRKSVYWHVIGMGTTPEVHSIFLEGHTFLVRNHRQASLGISPITFLTAQTLLRDLGQFLLFCHIPSHQHDGMEAYVKVDSCPEEPQLRMKNNEEAEDYDDDLTDSEMDVVRFDDDNSPSIIQARSGAKKHPKTWVHYIAAEEEDWDYAPLVLAPDDRSYKSQYLNNGPQRIGRKYKKVRFMAYTDETFKTREAIQHESGILGPLLYGEVGDTLLIIFKNQASRPYNIYPHGITDVRPLYSRRLPKGVKHLKDFPILPGEIFKYKWTITVEDGPTKSDPRCLTRYYSSFVNWERDLASGLIGPLLICYKESVDQRGNQIMSDKRNVILFSVFDENRSWYLTENIQRFLPNPAGVQLEDPEFQASNIMHSINGYVFDSLQLSVCLHEVAYWYILSIGAQTDFLSVFFSGYTFKHKGVYEDTLTLFPFSGETVFMSMENPGLWILGCHNSDFRNRGMTALLKVSSCDWNTGDYYEDSYEDISAYFDSKNNAIEPRSFSQNPPVLKRHQREGTRTTLQSDQEEIDYDDTISVEMKKEDFDIYDEDENQSPRSFQKKTRHYFIAAVERLWDYGMSSSPHVLRNRAQSGSVPQFKKVVFQEFTDGSFTQPLYRGELNEHLGLLGPYIRAEVEDNIMVTFRNQASRPYSFYSSLISYEEDQRQGAEPRKNFVKPNETKTYFWKVQHHMAPTKDEFDCKAWAYFSDVDLEKDVHSGLIGPLLVCHTNTLNPAHGRQVTVQEFALFFTIFDETKSWYFTENMERNCRAPCNIQMEDPTFKENYRFHAINGYIMDTLPGLVMAQDQRIRWYLLSMGSNENIHSIHFSGHVFTVRGKEEYKMALYNLYPGVFETVEMLPSKAGIWRVECLIGEHLHAGMSTLFLVYSNKCQNPLGMASGHIRDFQITASGQYGQWAPKLARLHYSGSINAWSTKEPFSWIKVDLLAPMIIHGIKTQGARQKFSSLYISQFIIMYSLDGKKWQTYRGNSTGTDMVFFGNVDSSGIKHNIFNPPIIARYIRLHPTHYSIRSTLRMELMGCDLNSCSMPLGMESKAISDAQITASSYFTNMFATWSPSKARLHLQGRSNAWRPQVNNPKEWLQVDFQKTMKVTGVTTQGVKSLDTSMYVKEFLISSSQDGHQWTLFFQNGKVKVFQGNQDSFTPVVNSLDPPLLTRYLRIHPQSWEHQIALRMEVLGCEAQDLY

SEQ ID NO: 1823 - DNA, 4371 bp, synthetic construct
  misc_feature 1..4371: note = Variant of human B-domain deleted Factor VIII
  source 1..4371: mol_type = other DNA
atgcagattgaactgtctacctgcttcttcctctgtttgctgaggttctgctttagcgccactagacggtactaccttggcgctgtggagctgtcctgggactatatgcagagtgatttgggagagcttcccgtcgacgcacgatttcctcctcgcgttccaaagtcatttccctttaacacaagccaggtgtacaagaagacgctcttcgtcgaattcaccgatcacctgttcaatatcgccaaacccagaccaccatggatgggtcttttggggcctaccatacaagcggaggtgtatgacacagttgttatcactctcaagaacatggcttctcatccggtaagtcttcacgcagtgggcgtgtcctactggaaagcttcagaaggagccgagtatgatgatcagacatcccagagggagaaagaagacgacaaggtatttccaggtgggtctcatacctatgtgtggcaagtgctcaaagagaatggccctatggcaagcgatccgccgtgtttgacttacagctacctttcacacgttgacctcgtcaaggacctcaactccgggttgattggagccttgttggtatgcagggaaggatctcttgccaaagagaagacacagaccctggccaagtttatccttctctttgctgtgttcgatgagggcaaaagttggcatagcgaaacgaagaattccctcatgcaggatcgcgacgcagccagcgccagagcttggcccaagatgcacactgtgaacggatatgtcaataggacgcttcctggcttgattgggtgtcatcggaaaagtgtctactggcacgtgatcggaatggggacaacaccagaggtccactccatatttctcgaaggccataccttccttgttcgaaaccacagacaggcatccttggggatctctcccattacctttctcactgcccaaacgctccttcgtgacttgggtcagttccttctcttttgccatatcccgtcacaccagcatgatggtatggaagcttatgtgaaagtcgacagttgtcctgaggagccacagttgcgcatgaagaataatgaagaagccgaggattacgacgacgatctcaccgattctgagatggacgtggtgaggtttgatgacgacaactctccctccatcattcaagctcggagcggggcgaagaaacaccccaagacttgggtccactatatagcggcggaagaggaggattgggattacgctcctcttgtattggcaccagatgaccgctcatacaaaagccagtacctcaacaacggaccgcagagaattggccggaagtataagaaagtgcgatttatggcctatacagacgaaacctttaagacaagggaggccatccagcatgagagtgggattttgggacctcttctttacggcgaagttggtgataccctcctcatcatcttcaagaatcaagcttctcgcccctataacatttacccacacgggatcactgacgttaggcctttgtatagcagaagacttcccaaaggcgtgaagcatctcaaagacttccccattttgccaggcgagatctttaagtacaaatggaccattacagtggaagatggaccgactaaatcagaccctcgatgccttacgcggtactattcctccttcgtgaattgggagagagatttggcaagcggactcataggaccactcctcatctgttacaaggaatctgtagaccagaggggtaaccagattatgagtgataaacgcaatgtgatcctttttagcgtcttcgacgagaaccggtcctggtacttgaccgagaatatacaaaggttccttcccaaccccgcaggcgttcagttggaagaccctgagtttcaggccagcaatattatgcactcaatcaacggctatgtgtttgatagtctccagctttctgtttgcctccatgaagtagcctattggtacatcttgtcaattggtgctcaaacagacttcctctccgtcttcttctccggctacacctttaagcacaagggcgtgtatgaggacactctcacactctttccattttctggagaaaccgtgttcatgagcatggagaatccaggcctttggatcttgggttgccacaacagtgattttcgcaatcggggaatgactgctctcctcaaagtcagcagctgtgattggaacacaggcgactattacgaagattcttacgaggacataagtgcctactttgactccaagaataacgccattgagcccagatcattctcccagaatcctcccgtgcttaaaaggcatcagcgcgaaggtaccagaactactcttcagtctgatcaagaggagattgactatgacgacaccattagcgtggaaatgaagaaggaggatttcgatatctatgacgaagatgagaaccagtctccgcggagctttcagaagaagacgcgacactacttcattgcagcagtcgaaaggctttgggactacggtatgtcatcatcccctcatgtgttgcgcaatagagctcagagtggaagtgttccacagttcaagaaagtcgtctttcaagagtttacagatggcagcttcacacagcctctctatcggggcgagcttaacgaacatttgggactccttggtccctatatccgagccgaagtggaggacaacattatggttacctttaggaatcaagcctctcgcccctacagcttctactcctccctcatcagttatgaggaggatcagagacaaggcgctgaaccacggaagaactttgtgaaaccgaatgagacgaaggagtacttctggaaagtacagcaccacatggcccccacaaaagacgaattcgattgcaaagcatgggcgtatttttcagacgttgacttggagaaagatgtacattcaggacttattggtcctttgttggtgtgtcacactaacactctcaatccagcccatggcaggcaggtgacagtccaggaattcgctcttttctttaccatctttgatgagaccaagtcctggtacttcacggaaaacatggagcgcaattgcagagccccctgtaacatacagatggaggaccctacctttaaggaaaattatcggttccacgcaatcaacggatacattatggatacactccctggccttgtgatggctcaggaccaacgaatcaggtggtacctcctcagcatgggttctaatgagaacatacactccattcacttttcaggacatgtgttcactgtccggaagaaagaagagtataagatggccctctacaatttgtatccaggcgtgtttgagaccgttgaaatgcttccctctaaagctggcatctggagagtagagtgcttgatcggagaacatcttcacgcaggtatgagcaccttgttcctcgtgtacagcaacaaatgtcagaatccacttggcatggccagtggacacattcgcgactttcagatcacagcatctggccagtatggacaatgggccccaaagttggctcgcctccattactccggtagcataaatgcgtggtccactaaagaacctttcagctggattaaggtcgatcttcttgcccccatgatcatccacggcattaagacacagggagcgaggcagaaattctcctccctctacatctcacagttcattattatgtatagtttggacggcaagaagtggcaaacttatagaggtaacagtactggaacagacatggtgttcttcggcaacgttgatagctctggcatcaaacacaacatctttaatcctcccataatagctcggtacatcagattgcatccgacccactacagcattaggagtacactccgaatggagcttatgggttgcgacttgaattcctgttcaatgccactcggaatggagtctaaagccatctctgatgcacagataaccgccagtagctactttacgaacatgtttgctacgtggtcaccctctaaggcaaggcttcatttgcaaggccggtctaatgcctggagacctcaggtgaacaacccgaaagaatggctccaggtggactttcagaagaccatgaaagtaacaggtgtcactactcagggagttaagtccttggatactagcatgtatgtgaaggagttccttatttcctcatcacaagatggccaccagtggaccctcttctttcagaatggtaaggtcaaagtgtttcagggcaatcaagacagcttcacacccgtggtgaacagtcttgatcctccactcttgacacgataccttcgaatccatccacagtcttgggagcaccagattgcattgcgcatggaagtacttggatgcgaggctcaggacctctac

SEQ ID NO: 1824 - protein, 1457 aa, synthetic construct
  REGION 1..1457: note = Variant of human B-domain deleted Factor VIII
MQIELSTCFFLCLLRFCFSATRRYYLGAVELSWDYMQSDLGELPVDARFPPRVPKSFPFNTSQVYKKTLFVEFTDHLFNIAKPRPPWMGLLGPTIQAEVYDTVVITLKNMASHPVSLHAVGVSYWKASEGAEYDDQTSQREKEDDKVFPGGSHTYVWQVLKENGPMASDPPCLTYSYLSHVDLVKDLNSGLIGALLVCREGSLAKEKTQTLAKFILLFAVFDEGKSWHSETKNSLMQDRDAASARAWPKMHTVNGYVNRTLPGLIGCHRKSVYWHVIGMGTTPEVHSIFLEGHTFLVRNHRQASLGISPITFLTAQTLLRDLGQFLLFCHIPSHQHDGMEAYVKVDSCPEEPQLRMKNNEEAEDYDDDLTDSEMDVVRFDDDNSPSIIQARSGAKKHPKTWVHYIAAEEEDWDYAPLVLAPDDRSYKSQYLNNGPQRIGRKYKKVRFMAYTDETFKTREAIQHESGILGPLLYGEVGDTLLIIFKNQASRPYNIYPHGITDVRPLYSRRLPKGVKHLKDFPILPGEIFKYKWTITVEDGPTKSDPRCLTRYYSSFVNWERDLASGLIGPLLICYKESVDQRGNQIMSDKRNVILFSVFDENRSWYLTENIQRFLPNPAGVQLEDPEFQASNIMHSINGYVFDSLQLSVCLHEVAYWYILSIGAQTDFLSVFFSGYTFKHKGVYEDTLTLFPFSGETVFMSMENPGLWILGCHNSDFRNRGMTALLKVSSCDWNTGDYYEDSYEDISAYFDSKNNAIEPRSFSQNPPVLKRHQREGTRTTLQSDQEEIDYDDTISVEMKKEDFDIYDEDENQSPRSFQKKTRHYFIAAVERLWDYGMSSSPHVLRNRAQSGSVPQFKKVVFQEFTDGSFTQPLYRGELNEHLGLLGPYIRAEVEDNIMVTFRNQASRPYSFYSSLISYEEDQRQGAEPRKNFVKPNETKEYFWKVQHHMAPTKDEFDCKAWAYFSDVDLEKDVHSGLIGPLLVCHTNTLNPAHGRQVTVQEFALFFTIFDETKSWYFTENMERNCRAPCNIQMEDPTFKENYRFHAINGYIMDTLPGLVMAQDQRIRWYLLSMGSNENIHSIHFSGHVFTVRKKEEYKMALYNLYPGVFETVEMLPSKAGIWRVECLIGEHLHAGMSTLFLVYSNKCQNPLGMASGHIRDFQITASGQYGQWAPKLARLHYSGSINAWSTKEPFSWIKVDLLAPMIIHGIKTQGARQKFSSLYISQFIIMYSLDGKKWQTYRGNSTGTDMVFFGNVDSSGIKHNIFNPPIIARYIRLHPTHYSIRSTLRMELMGCDLNSCSMPLGMESKAISDAQITASSYFTNMFATWSPSKARLHLQGRSNAWRPQVNNPKEWLQVDFQKTMKVTGVTTQGVKSLDTSMYVKEFLISSSQDGHQWTLFFQNGKVKVFQGNQDSFTPVVNSLDPPLLTRYLRIHPQSWEHQIALRMEVLGCEAQDLY

SEQ ID NO: 1825 - DNA, 4371 bp, synthetic construct
  misc_feature 1..4371: note = Variant of human B-domain deleted Factor VIII
  source 1..4371: mol_type = other DNA
atgcagattgaactgtctacctgcttcttcctctgtttgctgaggttctgctttagcgccactagacggtactaccttggcgctgtggagctgtcctgggactatatgcagagtgatttgggagagcttcccgtcgacgcacgatttcctcctcgcgttccaaagtcatttccctttaacacaagccaggtgtacaagaagacgctcttcgtcgaattcaccgatcacctgttcaatatcgccaaacccagaccaccatggatgggtcttttggggcctaccatacaagcggaggtgtatgacacagttgttatcactctcaagaacatggcttctcatccggtaagtcttcacgcagtgggcgtgtcctactggaaagcttcagaaggagccgagtatgatgatcagacatcccagagggagaaagaagacgacaaggtatttccaggtgggtctcatacctatgtgtggcaagtgctcaaagagaatggccctatggcaagcgatccgccgtgtttgacttacagctacctttcacacgttgacctcgtcaaggacctcaactccgggttgattggagccttgttggtatgcagggaaggatctcttgccaaagagaagacacagaccctggccaagtttatccttctctttgctgtgttcgatgagggcaaaagttggcatagcgaaacgaagaattccctcatgcaggatcgcgacgcagccagcgccagagcttggcccaagatgcacactgtgaacggatatgtcaataggacgcttcctggcttgattgggtgtcatcggaaaagtgtctactggcacgtgatcggaatggggacaacaccagaggtccactccatatttctcgaaggccataccttccttgttcgaaaccacagacaggcatccttggggatctctcccattacctttctcactgcccaaacgctccttcgtgacttgggtcagttccttctcttttgccatatcccgtcacaccagcatgatggtatggaagcttatgtgaaagtcgacagttgtcctgaggagccacagttgcgcatgaagaataatgaagaagccgaggattacgacgacgatctcaccgattctgagatggacgtggtgaggtttgatgacgacaactctccctccatcattcaagctcggagcggggcgaagaaacaccccaagacttgggtccactatatagcggcggaagaggaggattgggattacgctcctcttgtattggcaccagatgaccgctcatacaaaagccagtacctcaacaacggaccgcagagaattggccggaagtataagaaagtgcgatttatggcctatacagacgaaacctttaagacaagggaggccatccagcatgagagtgggattttgggacctcttctttacggcgaagttggtgataccctcctcatcatcttcaagaatcaagcttctcgcccctataacatttacccacacgggatcactgacgttaggcctttgtatagcagaagacttcccaaaggcgtgaagcatctcaaagacttccccattttgccaggcgagatctttaagtacaaatggaccattacagtggaagatggaccgactaaatcagaccctcgatgccttacgcggtactattcctccttcgtgaattgggagagagatttggcaagcggactcataggaccactcctcatctgttacaaggaatctgtagaccagaggggtaaccagattatgagtgataaacgcaatgtgatcctttttagcgtcttcgacgagaaccggtcctggtacttgaccgagaatatacaaaggttccttcccaaccccgcaggcgttcagttggaagaccctgagtttcaggccagcaatattatgcactcaatcaacggctatgtgtttgatagtctccagctttctgtttgcctccatgaagtagcctattggtacatcttgtcaattggtgctcaaacagacttcctctccgtcttcttctccggctacacctttaagcacaagggcgtgtatgaggacactctcacactctttccattttctggagaaaccgtgttcatgagcatggagaatccaggcctttggatcttgggttgccacaacagtgattttcgcaatcggggaatgactgctctcctcaaagtcagcagctgtgattggaacacaggcgactattacgaagattcttacgaggacataagtgcctactttgactccaagaataacgccattgagcccagatcattctcccagaatcctcccgtgcttaaaaggcatcagcgcgaaggtaccagaactactcttcagtctgatcaagaggagattgactatgacgacaccattagcgtggaaatgaagaaggaggatttcgatatctatgacgaagatgagaaccagtctccgcggagctttcagaagaagacgcgacactacttcattgcagcagtcgaaaggctttgggactacggtatgtcatcatcccctcatgtgttgcgcaatagagctcagagtggaagtgttccacagttcaagaaagtcgtctttcaagagtttacagatggcagcttcacacagcctctctatcggggcgagcttaacgaacatttgggactccttggtccctatatccgagccgaagtggaggacaacattatggttacctttaggaatcaagcctctcgcccctacagcttctactcctccctcatcagttatgaggaggatcagagacaaggcgctgaaccacggaagaactttgtgaaaccgaatgagacgaagacctacttctggaaagtacagcaccacatggcccccacaaaagacgaattcgattgcaaagcatgggcgtatttttcagacgttgacttggagaaagatgtacattcaggacttattggtcctttgttggtgtgtcacactaacactctcaatccagcccatggcaggcaggtgacagtccaggaattcgctcttttctttaccatctttgatgagaccaagtcctggtacttcacggaaaacatggagcgcaattgcagagccccctgtaacatacagatggaggaccctacctttaaggaaaattatcggttccacgcaatcaacggatacattatggatacactccctggccttgtgatggctcaggaccaacgaatcaggtggtacctcctcagcatgggttctaatgagaacatacactccattcacttttcaggacatgtgttcactgtccggaagaaagaagagtataagatggccctctacaatttggagccaggcgtgtttgagaccgttgaaatgcttccctctaaagctggcatctggagagtagagtgcttgatcggagaacatcttcacgcaggtatgagcaccttgttcctcgtgtacagcaacaaatgtcagaatccacttggcatggccagtggacacattcgcgactttcagatcacagcatctggccagtatggacaatgggccccaaagttggctcgcctccattactccggtagcataaatgcgtggtccactaaagaacctttcagctggattaaggtcgatcttcttgcccccatgatcatccacggcattaagacacagggagcgaggcagaaattctcctccctctacatctcacagttcattattatgtatagtttggacggcaagaagtggcaaacttatagaggtaacagtactggaacagacatggtgttcttcggcaacgttgatagctctggcatcaaacacaacatctttaatcctcccataatagctcggtacatcagattgcatccgacccactacagcattaggagtacactccgaatggagcttatgggttgcgacttgaattcctgttcaatgccactcggaatggagtctaaagccatctctgatgcacagataaccgccagtagctactttacgaacatgtttgctacgtggtcaccctctaaggcaaggcttcatttgcaaggccggtctaatgcctggagacctcaggtgaacaacccgaaagaatggctccaggtggactttcagaagaccatgaaagtaacaggtgtcactactcagggagttaagtccttggatactagcatgtatgtgaaggagttccttatttcctcatcacaagatggccaccagtggaccctcttctttcagaatggtaaggtcaaagtgtttcagggcaatcaagacagcttcacacccgtggtgaacagtcttgatcctccactcttgacacgataccttcgaatccatccacagtcttgggagcaccagattgcattgcgcatggaagtacttggatgcgaggctcaggacctctac

SEQ ID NO: 1826 - protein, 1457 aa, synthetic construct
  REGION 1..1457: note = Variant of human B-domain deleted Factor VIII
MQIELSTCFFLCLLRFCFSATRRYYLGAVELSWDYMQSDLGELPVDARFPPRVPKSFPFNTSQVYKKTLFVEFTDHLFNIAKPRPPWMGLLGPTIQAEVYDTVVITLKNMASHPVSLHAVGVSYWKASEGAEYDDQTSQREKEDDKVFPGGSHTYVWQVLKENGPMASDPPCLTYSYLSHVDLVKDLNSGLIGALLVCREGSLAKEKTQTLAKFILLFAVFDEGKSWHSETKNSLMQDRDAASARAWPKMHTVNGYVNRTLPGLIGCHRKSVYWHVIGMGTTPEVHSIFLEGHTFLVRNHRQASLGISPITFLTAQTLLRDLGQFLLFCHIPSHQHDGMEAYVKVDSCPEEPQLRMKNNEEAEDYDDDLTDSEMDVVRFDDDNSPSIIQARSGAKKHPKTWVHYIAAEEEDWDYAPLVLAPDDRSYKSQYLNNGPQRIGRKYKKVRFMAYTDETFKTREAIQHESGILGPLLYGEVGDTLLIIFKNQASRPYNIYPHGITDVRPLYSRRLPKGVKHLKDFPILPGEIFKYKWTITVEDGPTKSDPRCLTRYYSSFVNWERDLASGLIGPLLICYKESVDQRGNQIMSDKRNVILFSVFDENRSWYLTENIQRFLPNPAGVQLEDPEFQASNIMHSINGYVFDSLQLSVCLHEVAYWYILSIGAQTDFLSVFFSGYTFKHKGVYEDTLTLFPFSGETVFMSMENPGLWILGCHNSDFRNRGMTALLKVSSCDWNTGDYYEDSYEDISAYFDSKNNAIEPRSFSQNPPVLKRHQREGTRTTLQSDQEEIDYDDTISVEMKKEDFDIYDEDENQSPRSFQKKTRHYFIAAVERLWDYGMSSSPHVLRNRAQSGSVPQFKKVVFQEFTDGSFTQPLYRGELNEHLGLLGPYIRAEVEDNIMVTFRNQASRPYSFYSSLISYEEDQRQGAEPRKNFVKPNETKTYFWKVQHHMAPTKDEFDCKAWAYFSDVDLEKDVHSGLIGPLLVCHTNTLNPAHGRQVTVQEFALFFTIFDETKSWYFTENMERNCRAPCNIQMEDPTFKENYRFHAINGYIMDTLPGLVMAQDQRIRWYLLSMGSNENIHSIHFSGHVFTVRKKEEYKMALYNLEPGVFETVEMLPSKAGIWRVECLIGEHLHAGMSTLFLVYSNKCQNPLGMASGHIRDFQITASGQYGQWAPKLARLHYSGSINAWSTKEPFSWIKVDLLAPMIIHGIKTQGARQKFSSLYISQFIIMYSLDGKKWQTYRGNSTGTDMVFFGNVDSSGIKHNIFNPPIIARYIRLHPTHYSIRSTLRMELMGCDLNSCSMPLGMESKAISDAQITASSYFTNMFATWSPSKARLHLQGRSNAWRPQVNNPKEWLQVDFQKTMKVTGVTTQGVKSLDTSMYVKEFLISSSQDGHQWTLFFQNGKVKVFQGNQDSFTPVVNSLDPPLLTRYLRIHPQSWEHQIALRMEVLGCEAQDLY

SEQ ID NO: 1827 - DNA, 4371 bp, synthetic construct
  misc_feature 1..4371: note = Variant of human B-domain deleted Factor VIII
  source 1..4371: mol_type = other DNA
atgcagattgaactgtctacctgcttcttcctctgtttgctgaggttctgctttagcgccactagacggtactaccttggcgctgtggagctgtcctgggactatatgcagagtgatttgggagagcttcccgtcgacgcacgatttcctcctcgcgttccaaagtcatttccctttaacacaagccaggtgtacaagaagacgctcttcgtcgaattcaccgatcacctgttcaatatcgccaaacccagaccaccatggatgggtcttttggggcctaccatacaagcggaggtgtatgacacagttgttatcactctcaagaacatggcttctcatccggtaagtcttcacgcagtgggcgtgtcctactggaaagcttcagaaggagccgagtatgatgatcagacatcccagagggagaaagaagacgacaaggtatttccaggtgggtctcatacctatgtgtggcaagtgctcaaagagaatggccctatggcaagcgatccgccgtgtttgacttacagctacctttcacacgttgacctcgtcaaggacctcaactccgggttgattggagccttgttggtatgcagggaaggatctcttgccaaagagaagacacagaccctggccaagtttatccttctctttgctgtgttcgatgagggcaaaagttggcatagcgaaacgaagaattccctcatgcaggatcgcgacgcagccagcgccagagcttggcccaagatgcacactgtgaacggatatgtcaataggacgcttcctggcttgattgggtgtcatcggaaaagtgtctactggcacgtgatcggaatggggacaacaccagaggtccactccatatttctcgaaggccataccttccttgttcgaaaccacagacaggcatccttggggatctctcccattacctttctcactgcccaaacgctccttcgtgacttgggtcagttccttctcttttgccatatcccgtcacaccagcatgatggtatggaagcttatgtgaaagtcgacagttgtcctgaggagccacagttgcgcatgaagaataatgaagaagccgaggattacgacgacgatctcaccgattctgagatggacgtggtgaggtttgatgacgacaactctccctccatcattcaagctcggagcggggcgaagaaacaccccaagacttgggtccactatatagcggcggaagaggaggattgggattacgctcctcttgtattggcaccagatgaccgctcatacaaaagccagtacctcaacaacggaccgcagagaattggccggaagtataagaaagtgcgatttatggcctatacagacgaaacctttaagacaagggaggccatccagcatgagagtgggattttgggacctcttctttacggcgaagttggtgataccctcctcatcatcttcaagaatcaagcttctcgcccctataacatttacccacacgggatcactgacgttaggcctttgtatagcagaagacttcccaaaggcgtgaagcatctcaaagacttccccattttgccaggcgagatctttaagtacaaatggaccattacagtggaagatggaccgactaaatcagaccctcgatgccttacgcggtactattcctccttcgtgaattgggagagagatttggcaagcggactcataggaccactcctcatctgttacaaggaatctgtagaccagaggggtaaccagattatgagtgataaacgcaatgtgatcctttttagcgtcttcgacgagaaccggtcctggtacttgaccgagaatatacaaaggttccttcccaaccccgcaggcgttcagttggaagaccctgagtttcaggccagcaatattatgcactcaatcaacggctatgtgtttgatagtctccagctttctgtttgcctccatgaagtagcctattggtacatcttgtcaattggtgctcaaacagacttcctctccgtcttcttctccggctacacctttaagcacaagggcgtgtatgaggacactctcacactctttccattttctggagaaaccgtgttcatgagcatggagaatccaggcctttggatcttgggttgccacaacagtgattttcgcaatcggggaatgactgctctcctcaaagtcagcagctgtgattggaacacaggcgactattacgaagattcttacgaggacataagtgcctactttgactccaagaataacgccattgagcccagatcattctcccagaatcctcccgtgcttaaaaggcatcagcgcgaaggtaccagaactactcttcagtctgatcaagaggagattgactatgacgacaccattagcgtggaaatgaagaagggggatttcgatatctatgacgaagatgagaaccagtctccgcggagctttcagaagaagacgcgacactacttcattgcagcagtcgaaaggctttgggactacggtatgtcatcatcccctcatgtgttgcgcaatagagctcagagtggaagtgttccacagttcaagaaagtcgtctttcaagagtttacagatggcagcttcacacagcctctctatcggggcgagcttaacgaacatttgggactccttggtccctatatccgagccgaagtggaggacaacattatggttacctttaggaatcaagcctctcgcccctacagcttctactcctccctcatcagttatgaggaggatcagagacaaggcgctgaaccacggaagaactttgtgaaaccgaatgagacgaagacctacttctggaaagtacagcaccacatggcccccacaaaagacgaattcgattgcaaagcatgggcgtatttttcagacgttgacttggagaaagatgtacattcaggacttattggtcctttgttggtgtgtcacactaacactctcaatccagcccatggcaggcaggtgacagtccaggaattcgctcttttctttaccatctttgatgagaccaagtcctggtacttcacggaaaacatggagcgcaattgcagagccccctgtaacatacagatggaggaccctacctttaaggaaaattatcggttccacgcaatcaacggatacattatggatacactccctggccttgtgatggctcaggaccaacgaatcaggtggtacctcctcagcatgggttctaatgagaacatacactccattcacttttcaggacatgtgttcactgtccggaagaaagaagagtataagatggccctctacaatttgtatccaggcgtgtttgagaccgttgaaatgcttccctctaaagctggcatctggagagtagagtgcttgatcggagaacatcttcacgcaggtatgagcaccttgttcctcgtgtacagcaacaaatgtcagaatccacttggcatggccagtggacacattcgcgactttcagatcacagcatctggccagtatggacaatgggccccaaagttggctcgcctccattactccggtagcataaatgcgtggtccactaaagaacctttcagctggattaaggtcgatcttcttgcccccatgatcatccacggcattaagacacagggagcgaggcagaaattctcctccctctacatctcacagttcattattatgtatagtttggacggcaagaagtggcaaacttatagaggtaacagtactggaacagacatggtgttcttcggcaacgttgatagctctggcatcaaacacaacatctttaatcctcccataatagctcggtacatcagattgcatccgacccactacagcattaggagtacactccgaatggagcttatgggttgcgacttgaattcctgttcaatgccactcggaatggagtctaaagccatctctgatgcacagataaccgccagtagctactttacgaacatgtttgctacgtggtcaccctctaaggcaaggcttcatttgcaaggccggtctaatgcctggagacctcaggtgaacaacccgaaagaatggctccaggtggactttcagaagaccatgaaagtaacaggtgtcactactcagggagttaagtccttggatactagcatgtatgtgaaggagttccttatttcctcatcacaagatggccaccagtggaccctcttctttcagaatggtaaggtcaaagtgtttcagggcaatcaagacagcttcacacccgtggtgaacagtcttgatcctccactcttgacacgataccttcgaatccatccacagtcttgggagcaccagattgcattgcgcatggaagtacttggatgcgaggctcaggacctctac

SEQ ID NO: 1828 - protein, 1457 aa, synthetic construct
  REGION 1..1457: note = Variant of human B-domain deleted Factor VIII
MQIELSTCFFLCLLRFCFSATRRYYLGAVELSWDYMQSDLGELPVDARFPPRVPKSFPFNTSQVYKKTLFVEFTDHLFNIAKPRPPWMGLLGPTIQAEVYDTVVITLKNMASHPVSLHAVGVSYWKASEGAEYDDQTSQREKEDDKVFPGGSHTYVWQVLKENGPMASDPPCLTYSYLSHVDLVKDLNSGLIGALLVCREGSLAKEKTQTLAKFILLFAVFDEGKSWHSETKNSLMQDRDAASARAWPKMHTVNGYVNRTLPGLIGCHRKSVYWHVIGMGTTPEVHSIFLEGHTFLVRNHRQASLGISPITFLTAQTLLRDLGQFLLFCHIPSHQHDGMEAYVKVDSCPEEPQLRMKNNEEAEDYDDDLTDSEMDVVRFDDDNSPSIIQARSGAKKHPKTWVHYIAAEEEDWDYAPLVLAPDDRSYKSQYLNNGPQRIGRKYKKVRFMAYTDETFKTREAIQHESGILGPLLYGEVGDTLLIIFKNQASRPYNIYPHGITDVRPLYSRRLPKGVKHLKDFPILPGEIFKYKWTITVEDGPTKSDPRCLTRYYSSFVNWERDLASGLIGPLLICYKESVDQRGNQIMSDKRNVILFSVFDENRSWYLTENIQRFLPNPAGVQLEDPEFQASNIMHSINGYVFDSLQLSVCLHEVAYWYILSIGAQTDFLSVFFSGYTFKHKGVYEDTLTLFPFSGETVFMSMENPGLWILGCHNSDFRNRGMTALLKVSSCDWNTGDYYEDSYEDISAYFDSKNNAIEPRSFSQNPPVLKRHQREGTRTTLQSDQEEIDYDDTISVEMKKGDFDIYDEDENQSPRSFQKKTRHYFIAAVERLWDYGMSSSPHVLRNRAQSGSVPQFKKVVFQEFTDGSFTQPLYRGELNEHLGLLGPYIRAEVEDNIMVTFRNQASRPYSFYSSLISYEEDQRQGAEPRKNFVKPNETKTYFWKVQHHMAPTKDEFDCKAWAYFSDVDLEKDVHSGLIGPLLVCHTNTLNPAHGRQVTVQEFALFFTIFDETKSWYFTENMERNCRAPCNIQMEDPTFKENYRFHAINGYIMDTLPGLVMAQDQRIRWYLLSMGSNENIHSIHFSGHVFTVRKKEEYKMALYNLYPGVFETVEMLPSKAGIWRVECLIGEHLHAGMSTLFLVYSNKCQNPLGMASGHIRDFQITASGQYGQWAPKLARLHYSGSINAWSTKEPFSWIKVDLLAPMIIHGIKTQGARQKFSSLYISQFIIMYSLDGKKWQTYRGNSTGTDMVFFGNVDSSGIKHNIFNPPIIARYIRLHPTHYSIRSTLRMELMGCDLNSCSMPLGMESKAISDAQITASSYFTNMFATWSPSKARLHLQGRSNAWRPQVNNPKEWLQVDFQKTMKVTGVTTQGVKSLDTSMYVKEFLISSSQDGHQWTLFFQNGKVKVFQGNQDSFTPVVNSLDPPLLTRYLRIHPQSWEHQIALRMEVLGCEAQDLY

SEQ ID NO: 1829 - DNA, 4371 bp, synthetic construct
  misc_feature 1..4371: note = Variant of human B-domain deleted Factor VIII
  source 1..4371: mol_type = other DNA
atgcagattgaactgtctacctgcttcttcctctgtttgctgaggttctgctttagcgccactagacggtactaccttggcgctgtggagctgtcctgggactatatgcagagtgatttgggagagcttcccgtcgacgcacgatttcctcctcgcgttccaaagtcatttccctttaacacaagccaggtgtacaagaagacgctcttcgtcgaattcaccgatcacctgttcaatatcgccaaacccagaccaccatggatgggtcttttggggcctaccatacaagcggaggtgtatgacacagttgttatcactctcaagaacatggcttctcatccggtaagtcttcacgcagtgggcgtgtcctactggaaagcttcagaaggagccgagtatgatgatcagacatcccagagggagaaagaagacgacaaggtatttccaggtgggtctcatacctatgtgtggcaagtgctcaaagagaatggccctatggcaagcgatccgccgtgtttgacttacagctacctttcacacgttgacctcgtcaaggacctcaactccgggttgattggagccttgttggtatgcagggaaggatctcttgccaaagagaagacacagaccctggccaagtttatccttctctttgctgtgttcgatgagggcaaaagttggcatagcgaaacgaagaattccctcatgcaggatcgcgacgcagccagcgccagagcttggcccaagatgcacactgtgaacggatatgtcaataggacgcttcctggcttgattgggtgtcatcggaaaagtgtctactggcacgtgatcggaatggggacaacaccagaggtccactccatatttctcgaaggccataccttccttgttcgaaaccacagacaggcatccttggggatctctcccattacctttctcactgcccaaacgctccttcgtgacttgggtcagttccttctcttttgccatatcccgtcacaccagcatgatggtatggaagcttatgtgaaagtcgacagttgtcctgaggagccacagttgcgcatgaagaataatgaagaagccgaggattacgacgacgatctcaccgattctgagatggacgtggtgaggtttgatgacgacaactctccctccatcattcaagctcggagcggggcgaagaaacaccccaagacttgggtccactatatagcggcggaagaggaggattgggattacgctcctcttgtattggcaccagatgaccgctcatacaaaagccagtacctcaacaacggaccgcagagaattggccggaagtataagaaagtgcgatttatggcctatacagacgaaacctttaagacaagggaggccatccagcatgagagtgggattttgggacctcttctttacggcgaagttggtgataccctcctcatcatcttcaagaatcaagcttctcgcccctataacatttacccacacgggatcactgacgttaggcctttgtatagcagaagacttcccaaaggcgtgaagcatctcaaagacttccccattttgccaggcgagatctttaagtacaaatggaccattacagtggaagatggaccgactaaatcagaccctcgatgccttacgcggtactattcctccttcgtgaattgggagagagatttggcaagcggactcataggaccactcctcatctgttacaaggaatctgtagaccagaggggtaaccagattatgagtgataaacgcaatgtgatcctttttagcgtcttcgacgagaaccggtcctggtacttgaccgagaatatacaaaggttccttcccaaccccgcaggcgttcagttggaagaccctgagtttcaggccagcaatattatgcactcaatcaacggctatgtgtttgatagtctccagctttctgtttgcctccatgaagtagcctattggtacatcttgtcaattggtgctcaaacagacttcctctccgtcttcttctccggctacacctttaagcacaagggcgtgtatgaggacactctcacactctttccattttctggagaaaccgtgttcatgagcatggagaatccaggcctttggatcttgggttgccacaacagtgattttcgcaatcggggaatgactgctctcctcaaagtcagcagctgtgattggaacacaggcttttattacgaagattcttacgaggacataagtgcctactttgactccaagaataacgccattgagcccagatcattctcccagaatcctcccgtgcttaaaaggcatcagcgcgaaggtaccagaactactcttcagtctgatcaagaggagattgactatgacgacaccattagcgtggaaatgaagaaggaggatttcgatatctatgacgaagatgagaaccagtctccgcggagctttcagaagaagacgcgacactacttcattgcagcagtcgaaaggctttgggactacggtatgtcatcatcccctcatgtgttgcgcaatagagctcagagtggaagtgttccacagttcaagaaagtcgtctttcaagagtttacagatggcagcttcacacagcctctctatcggggcgagcttaacgaacatttgggactccttggtccctatatccgagccgaagtggaggacaacattatggttacctttaggaatcaagcctctcgcccctacagcttctactcctccctcatcagttatgaggaggatcagagacaaggcgctgaaccacggaagaactttgtgaaaccgaatgagacgaagacctacttctggaaagtacagcaccacatggcccccacaaaagacgaattcgattgcaaagcatgggcgtatttttcagacgttgacttggagaaagatgtacattcaggacttattggtcctttgttggtgtgtcacactaacactctcaatccagcccatggcaggcaggtgacagtccaggaattcgctcttttctttaccatctttgatgagaccaagtcctggtacttcacggaaaacatggagcgcaattgcagagccccctgtaacatacagatggaggaccctacctttaaggaaaattatcggttccacgcaatcaacggatacattatggatacactccctggccttgtgatggctcaggaccaacgaatcaggtggtacctcctcagcatgggttctaatgagaacatacactccattcacttttcaggacatgtgttcactgtccggaagaaagaagagtataagatggccctctacaatttgtatccaggcgtgtttgagaccgttgaaatgcttccctctaaagctggcatctggagagtagagtgcttgatcggagaacatcttcacgcaggtatgagcaccttgttcctcgtgtacagcaacaaatgtcagaatccacttggcatggccagtggacacattcgcgactttcagatcacagcatctggccagtatggacaatgggccccaaagttggctcgcctccattactccggtagcataaatgcgtggtccactaaagaacctttcagctggattaaggtcgatcttcttgcccccatgatcatccacggcattaagacacagggagcgaggcagaaattctcctccctctacatctcacagttcattattatgtatagtttggacggcaagaagtggcaaacttatagaggtaacagtactggaacagacatggtgttcttcggcaacgttgatagctctggcatcaaacacaacatctttaatcctcccataatagctcggtacatcagattgcatccgacccactacagcattaggagtacactccgaatggagcttatgggttgcgacttgaattcctgttcaatgccactcggaatggagtctaaagccatctctgatgcacagataaccgccagtagctactttacgaacatgtttgctacgtggtcaccctctaaggcaaggcttcatttgcaaggccggtctaatgcctggagacctcaggtgaacaacccgaaagaatggctccaggtggactttcagaagaccatgaaagtaacaggtgtcactactcagggagttaagtccttggatactagcatgtatgtgaaggagttccttatttcctcatcacaagatggccaccagtggaccctcttctttcagaatggtaaggtcaaagtgtttcagggcaatcaagacagcttcacacccgtggtgaacagtcttgatcctccactcttgacacgataccttcgaatccatccacagtcttgggagcaccagattgcattgcgcatggaagtacttggatgcgaggctcaggacctctac

SEQ ID NO: 1830 - protein, 1457 aa, synthetic construct
  REGION 1..1457: note = Variant of human B-domain deleted Factor VIII
MQIELSTCFFLCLLRFCFSATRRYYLGAVELSWDYMQSDLGELPVDARFPPRVPKSFPFNTSQVYKKTLFVEFTDHLFNIAKPRPPWMGLLGPTIQAEVYDTVVITLKNMASHPVSLHAVGVSYWKASEGAEYDDQTSQREKEDDKVFPGGSHTYVWQVLKENGPMASDPPCLTYSYLSHVDLVKDLNSGLIGALLVCREGSLAKEKTQTLAKFILLFAVFDEGKSWHSETKNSLMQDRDAASARAWPKMHTVNGYVNRTLPGLIGCHRKSVYWHVIGMGTTPEVHSIFLEGHTFLVRNHRQASLGISPITFLTAQTLLRDLGQFLLFCHIPSHQHDGMEAYVKVDSCPEEPQLRMKNNEEAEDYDDDLTDSEMDVVRFDDDNSPSIIQARSGAKKHPKTWVHYIAAEEEDWDYAPLVLAPDDRSYKSQYLNNGPQRIGRKYKKVRFMAYTDETFKTREAIQHESGILGPLLYGEVGDTLLIIFKNQASRPYNIYPHGITDVRPLYSRRLPKGVKHLKDFPILPGEIFKYKWTITVEDGPTKSDPRCLTRYYSSFVNWERDLASGLIGPLLICYKESVDQRGNQIMSDKRNVILFSVFDENRSWYLTENIQRFLPNPAGVQLEDPEFQASNIMHSINGYVFDSLQLSVCLHEVAYWYILSIGAQTDFLSVFFSGYTFKHKGVYEDTLTLFPFSGETVFMSMENPGLWILGCHNSDFRNRGMTALLKVSSCDWNTGFYYEDSYEDISAYFDSKNNAIEPRSFSQNPPVLKRHQREGTRTTLQSDQEEIDYDDTISVEMKKEDFDIYDEDENQSPRSFQKKTRHYFIAAVERLWDYGMSSSPHVLRNRAQSGSVPQFKKVVFQEFTDGSFTQPLYRGELNEHLGLLGPYIRAEVEDNIMVTFRNQASRPYSFYSSLISYEEDQRQGAEPRKNFVKPNETKTYFWKVQHHMAPTKDEFDCKAWAYFSDVDLEKDVHSGLIGPLLVCHTNTLNPAHGRQVTVQEFALFFTIFDETKSWYFTENMERNCRAPCNIQMEDPTFKENYRFHAINGYIMDTLPGLVMAQDQRIRWYLLSMGSNENIHSIHFSGHVFTVRKKEEYKMALYNLYPGVFETVEMLPSKAGIWRVECLIGEHLHAGMSTLFLVYSNKCQNPLGMASGHIRDFQITASGQYGQWAPKLARLHYSGSINAWSTKEPFSWIKVDLLAPMIIHGIKTQGARQKFSSLYISQFIIMYSLDGKKWQTYRGNSTGTDMVFFGNVDSSGIKHNIFNPPIIARYIRLHPTHYSIRSTLRMELMGCDLNSCSMPLGMESKAISDAQITASSYFTNMFATWSPSKARLHLQGRSNAWRPQVNNPKEWLQVDFQKTMKVTGVTTQGVKSLDTSMYVKEFLISSSQDGHQWTLFFQNGKVKVFQGNQDSFTPVVNSLDPPLLTRYLRIHPQSWEHQIALRMEVLGCEAQDLY

SEQ ID NO: 1831 - DNA, 4371 bp, synthetic construct
  misc_feature 1..4371: note = Variant of human B-domain deleted Factor VIII
  source 1..4371: mol_type = other DNA
atgcagattgaactgtctacctgcttcttcctctgtttgctgaggttctgctttagcgccactagacggtactaccttggcgctgtggagctgtcctgggactatatgcagagtgatttgggagagcttcccgtcgacgcacgatttcctcctcgcgttccaaagtcatttccctttaacacaagccaggtgtacaagaagacgctcttcgtcgaattcaccgatcacctgttcaatatcgccaaacccagaccaccatggatgggtcttttggggcctaccatacaagcggaggtgtatgacacagttgttatcactctcaagaacatggcttctcatccggtaagtcttcacgcagtgggcgtgtcctactggaaagcttcagaaggagccgagtatgatgatcagacatcccagagggagaaagaagacgacaaggtatttccaggtgggtctcatacctatgtgtggcaagtgctcaaagagaatggccctatggcaagcgatccgccgtgtttgacttacagctacctttcacacgttgacctcgtcaaggacctcaactccgggttgattggagccttgttggtatgcagggaaggatctcttgccaaagagaagacacagaccctggccaagtttatccttctctttgctgtgttcgatgagggcaaaagttggcatagcgaaacgaagaattccctcatgcaggatcgcgacgcagccagcgccagagcttggcccaagatgcacactgtgaacggatatgtcaataggacgcttcctggcttgattgggtgtcatcggaaaagtgtctactggcacgtgatcggaatggggacaacaccagaggtccactccatatttctcgaaggccataccttccttgttcgaaaccacagacaggcatccttggggatctctcccattacctttctcactgcccaaacgctccttcgtgacttgggtcagttccttctcttttgccatatcccgtcacaccagcatgatggtatggaagcttatgtgaaagtcgacagttgtcctgaggagccacagttgcgcatgaagaataatgaagaagccgaggattacgacgacgatctcaccgattctgagatggacgtggtgaggtttgatgacgacaactctccctccatcattcaagctcggagcggggcgaagaaacaccccaagacttgggtccactatatagcggcggaagaggaggattgggattacgctcctcttgtattggcaccagatgaccgctcatacaaaagccagtacctcaacaacggaccgcagagaattggccggaagtataagaaagtgcgatttatggcctatacagacgaaacctttaagacaagggaggccatccagcatgagagtgggattttgggacctcttctttacggcgaagttggtgataccctcctcatcatcttcaagaatcaagcttctcgcccctataacatttacccacacgggatcactgacgttaggcctttgtatagcagaagacttcccaaaggcgtgaagcatctcaaagacttccccattttgccaggcgagatctttaagtacaaatggaccattacagtggaagatggaccgactaaatgggaccctcgatgccttacgcggtactattcctccttcgtgaattgggagagagatttggcaagcggactcataggaccactcctcatctgttacaaggaatctgtagaccagaggggtaaccagattatgagtgataaacgcaatgtgatcctttttagcgtcttcgacgagaaccggtcctggtacttgaccgagaatatacaaaggttccttcccaaccccgcaggcgttcagttggaagaccctgagtttcaggccagcaatattatgcactcaatcaacggctatgtgtttgatagtctccagctttctgtttgcctccatgaagtagcctattggtacatcttgtcaattggtgctcaaacagacttcctctccgtcttcttctccggctacacctttaagcacaagggcgtgtatgaggacactctcacactctttccattttctggagaaaccgtgttcatgagcatggagaatccaggcctttggatcttgggttgccacaacagtgattttcgcaatcggggaatgactgctctcctcaaagtcagcagctgtgattggaacacaggcgactattacgaagattcttacgaggacataagtgcctactttgactccaagaataacgccattgagcccagatcattctcccagaatcctcccgtgcttaaaaggcatcagcgcgaaggtaccagaactactcttcagtctgatcaagaggagattgactatgacgacaccattagcgtggaaatgaagaaggaggatttcgatatctatgacgaagatgagaaccagtctccgcggagctttcagaagaagacgcgacactacttcattgcagcagtcgaaaggctttgggactacggtatgtcatcatcccctcatgtgttgcgcaatagagctcagagtggaagtgttccacagttcaagaaagtcgtctttcaagagtttacagatggcagcttcacacagcctctctatcggggcgagcttaacgaacatttgggactccttggtccctatatccgagccgaagtggaggacaacattatggttacctttaggaatcaagcctctcgcccctacagcttctactcctccctcatcagttatgaggaggatcagagacaaggcgctgaaccacggaagaactttgtgaaaccgaatgagacgaagacctacttctggaaagtacagcaccacatggcccccacaaaagacgaattcgattgcaaagcatgggcgtatttttcagacgttgacttggagaaagatgtacattcaggacttattggtcctttgttggtgtgtcacactaacactctcaatccagcccatggcaggcaggtgacagtccaggaattcgctcttttctttaccatctttgatgagaccaagtcctggtacttcacggaaaacatggagcgcaattgcagagccccctgtaacatacagatggaggaccctacctttaaggaaaattatcggttccacgcaatcaacggatacattatggatacactccctggccttgtgatggctcaggaccaacgaatcaggtggtacctcctcagcatgggttctaatgagaacatacactccattcacttttcaggacatgtgttcactgtccggaagaaagaagagtataagatggccctctacaatttgtatccaggcgtgtttgagaccgttgaaatgcttccctctaaagctggcatctggagagtagagtgcttgatcggagaacatcttcacgcaggtatgagcaccttgttcctcgtgtacagcaacaaatgtcagaatccacttggcatggccagtggacacattcgcgactttcagatcacagcatctggccagtatggacaatgggccccaaagttggctcgcctccattactccggtagcataaatgcgtggtccactaaagaacctttcagctggattaaggtcgatcttcttgcccccatgatcatccacggcattaagacacagggagcgaggcagaaattctcctccctctacatctcacagttcattattatgtatagtttggacggcaagaagtggcaaacttatagaggtaacagtactggaacagacatggtgttcttcggcaacgttgatagctctggcatcaaacacaacatctttaatcctcccataatagctcggtacatcagattgcatccgacccactacagcattaggagtacactccgaatggagcttatgggttgcgacttgaattcctgttcaatgccactcggaatggagtctaaagccatctctgatgcacagataaccgccagtagctactttacgaacatgtttgctacgtggtcaccctctaaggcaaggcttcatttgcaaggccggtctaatgcctggagacctcaggtgaacaacccgaaagaatggctccaggtggactttcagaagaccatgaaagtaacaggtgtcactactcagggagttaagtccttggatactagcatgtatgtgaaggagttccttatttcctcatcacaagatggccaccagtggaccctcttctttcagaatggtaaggtcaaagtgtttcagggcaatcaagacagcttcacacccgtggtgaacagtcttgatcctccactcttgacacgataccttcgaatccatccacagtcttgggagcaccagattgcattgcgcatggaagtacttggatgcgaggctcaggacctctac

SEQ ID NO: 1832 - protein, 1457 aa, synthetic construct
  REGION 1..1457: note = Variant of human B-domain deleted Factor VIII
MQIELSTCFFLCLLRFCFSATRRYYLGAVELSWDYMQSDLGELPVDARFPPRVPKSFPFNTSQVYKKTLFVEFTDHLFNIAKPRPPWMGLLGPTIQAEVYDTVVITLKNMASHPVSLHAVGVSYWKASEGAEYDDQTSQREKEDDKVFPGGSHTYVWQVLKENGPMASDPPCLTYSYLSHVDLVKDLNSGLIGALLVCREGSLAKEKTQTLAKFILLFAVFDEGKSWHSETKNSLMQDRDAASARAWPKMHTVNGYVNRTLPGLIGCHRKSVYWHVIGMGTTPEVHSIFLEGHTFLVRNHRQASLGISPITFLTAQTLLRDLGQFLLFCHIPSHQHDGMEAYVKVDSCPEEPQLRMKNNEEAEDYDDDLTDSEMDVVRFDDDNSPSIIQARSGAKKHPKTWVHYIAAEEEDWDYAPLVLAPDDRSYKSQYLNNGPQRIGRKYKKVRFMAYTDETFKTREAIQHESGILGPLLYGEVGDTLLIIFKNQASRPYNIYPHGITDVRPLYSRRLPKGVKHLKDFPILPGEIFKYKWTITVEDGPTKWDPRCLTRYYSSFVNWERDLASGLIGPLLICYKESVDQRGNQIMSDKRNVILFSVFDENRSWYLTENIQRFLPNPAGVQLEDPEFQASNIMHSINGYVFDSLQLSVCLHEVAYWYILSIGAQTDFLSVFFSGYTFKHKGVYEDTLTLFPFSGETVFMSMENPGLWILGCHNSDFRNRGMTALLKVSSCDWNTGDYYEDSYEDISAYFDSKNNAIEPRSFSQNPPVLKRHQREGTRTTLQSDQEEIDYDDTISVEMKKEDFDIYDEDENQSPRSFQKKTRHYFIAAVERLWDYGMSSSPHVLRNRAQSGSVPQFKKVVFQEFTDGSFTQPLYRGELNEHLGLLGPYIRAEVEDNIMVTFRNQASRPYSFYSSLISYEEDQRQGAEPRKNFVKPNETKTYFWKVQHHMAPTKDEFDCKAWAYFSDVDLEKDVHSGLIGPLLVCHTNTLNPAHGRQVTVQEFALFFTIFDETKSWYFTENMERNCRAPCNIQMEDPTFKENYRFHAINGYIMDTLPGLVMAQDQRIRWYLLSMGSNENIHSIHFSGHVFTVRKKEEYKMALYNLYPGVFETVEMLPSKAGIWRVECLIGEHLHAGMSTLFLVYSNKCQNPLGMASGHIRDFQITASGQYGQWAPKLARLHYSGSINAWSTKEPFSWIKVDLLAPMIIHGIKTQGARQKFSSLYISQFIIMYSLDGKKWQTYRGNSTGTDMVFFGNVDSSGIKHNIFNPPIIARYIRLHPTHYSIRSTLRMELMGCDLNSCSMPLGMESKAISDAQITASSYFTNMFATWSPSKARLHLQGRSNAWRPQVNNPKEWLQVDFQKTMKVTGVTTQGVKSLDTSMYVKEFLISSSQDGHQWTLFFQNGKVKVFQGNQDSFTPVVNSLDPPLLTRYLRIHPQSWEHQIALRMEVLGCEAQDLY

SEQ ID NO: 1833 - DNA, 4371 bp, synthetic construct
  misc_feature 1..4371: note = Variant of human B-domain deleted Factor VIII
  source 1..4371: mol_type = other DNA
atgcagattgaactgtctacctgcttcttcctctgtttgctgaggttctgctttagcgccactagacggtactaccttggcgctgtggagctgtcctgggactatatgcagagtgatttgggagagcttcccgtcgacgcacgatttcctcctcgcgttccaaagtcatttccctttaacacaagccaggtgtacaagaagacgctcttcgtcgaattcaccgatcacctgttcaatatcgccaaacccagaccaccatggatgggtcttttggggcctaccatacaagcggaggtgtatgacacagttgttatcactctcaagaacatggcttctcatccggtaagtcttcacgcagtgggcgtgtcctactggaaagcttcagaaggagccgagtatgatgatcagacatcccagagggagaaagaagacgacaaggtatttccaggtgggtctcatacctatgtgtggcaagtgctcaaagagaatggccctatggcaagcgatccgccgtgtttgacttacagctacctttcacacgttgacctcgtcaaggacctcaactccgggttgattggagccttgttggtatgcagggaaggatctcttgccaaagagaagacacagaccctggccaagtttatccttctctttgctgtgttcgatgagggcaaaagttggcatagcgaaacgaagaattccctcatgcaggatcgcgacgcagccagcgccagagcttggcccaagatgcacactgtgaacggatatgtcaataggacgcttcctggcttgattgggtgtcatcggaaaagtgtctactggcacgtgatcggaatggggacaacaccagaggtccactccatatttctcgaaggccataccttccttgttcgaaaccacagacaggcatccttggggatctctcccattacctttctcactgcccaaacgctccttcgtgacttgggtcagttccttctcttttgccatatcccgtcacaccagcatgatggtatggaagcttatgtgaaagtcgacagttgtcctgaggagccacagttgcgcatgaagaataatgaagaagccgaggattacgacgacgatctcaccgattctgagatggacgtggtgaggtttgatgacgacaactctccctccatcattcaagctcggagcggggcgaagaaacaccccaagacttgggtccactatatagcggcggaagaggaggattgggattacgctcctcttgtattggcaccagatgaccgctcatacaaaagccagtacctcaacaacggaccgcagagaattggccggaagtataagaaagtgcgatttatggcctatacagacgaaacctttaagacaagggaggccatccagcatgagagtgggattttgggacctcttctttacggcgaagttggtgataccctcctcatcatcttcaagaatcaagcttctcgcccctataacatttacccacacgggatcactgacgttaggcctttgtatagcagaagacttcccaaaggcgtgaagcatctcaaagacttccccattttgccaggcgagatctttaagtacaaatggaccattacagtggaagatggaccgactaaatcagaccctcgatgccttacgcggtactattcctccttcgtgaattgggagagagatttggcaagcggactcataggaccactcctcatctgttacaaggaatctgtagaccagaggggtaaccagattatgagtgataaacgcaatgtgatcctttttagcgtcttcgacgagaaccggtcctggtacttgaccgagaatatacaaaggttccttcccaaccccgcaggcgttcagttggaagaccctgagtttcaggccagcaatattatgcactcaatcaacggctatgtgtttgatagtctccagctttctgtttgcctccatgaagtagcctattggtacatcttgtcaattggtgctcaaacagacttcctctccgtcttcttctccggctacacctttaagcacaagggcgtgtatgaggacactctcacactctttccattttctggagaaaccgtgttcatgagcatggagaatccaggcctttggatcttgggttgccacaacagtgattttcgcaatcggggaatgactgctctcctcaaagtcagcagctgtgattggaacacaggcgactattacgaagattcttacgaggacataagtgcctactttgactccaagaataacgccattgagcccagatcattctcccagaatcctcccgtgcttaaaaggcatcagcgcgaaggtaccagaactactcttcagtctgatcaagaggagattgactatgacgacaccattagcgtggaaatgaagaaggaggatttcgatatctatgacgaagatgagaaccagtctccgcggagctttcagaagaagacgcgacactacttcattgcagcagtcgaaaggctttgggactacggtatgtcatcatcccctcatgtgttgcgcaatagagctcagagtggaagtgttccacagttcaagaaagtcgtctttcaagagtttacagatggcagcttcacacagcctctctatcggggcgagcttaacgaacatttgggactccttggtccctatatccgagccgaagtggaggacaacattatggttacctttaggaatcaagcctctcgcccctacagcttctactcctccctcatcagttatgaggaggatcagagacaaggcgctgaaccacggaagaactttgtgaaaccgaatgagacgaagacctacttctggaaagtacagcaccacatggcccccacaaaagacgaattcgattgcaaagcatgggcgtatttttcagacgttgacttggagaaagatgtacattcaggacttattggtcctttgttggtgtgtcacactaacactctcaatccagcccatggcaggcaggtgacagtccaggaattcgctcttttctttaccatctttgatgagaccaagtcctggtacttcacggaaaacatggagcgcaattgcagagccccctgtaacatacagatggaggaccctacctttaaggaaaattatcggttccacgcaatcaacggatacattatggatacactccctggccttgtgatggctcaggaccaacgaatcaggtggtacctcctcagcatgggttctaatgagaacatacactccattcacttttcaggacatgtgttcactgtccggaagaaagaagagtataagatggccctctacaatttgtatccaggcgtgtttgagaccgttgaaatgcttccctctaaagctggcatctggagagtagagtgcttgatcggagaacatcttcacgcaggtatgagcaccttgttcctcgtgtacagcaacaaatgtcagaatccacttggcatggccagtggacacattcgcgactttcagatcacagcatctggccagtatggacaatgggccccaaagttggctcgcctccattactccggtagcataaatgcgtggtccactaaagaacctttcagctggattaaggtcgatcttcttgcccccatgatcatccacggcattaagacacagggagcgaggcagaaattctcctccctctacatctcacagttcattattatgtatagtttggacggcaagaagtggcaaacttatagaggtaacagtactggaacagacatggtgttcttcggcaacgttgatagctctggcatcaaacacaacatctttaatcctcccataatagctcggtacatcagattgcatccgacccactacagcattaggagtacactccgaatggagcttatgggttgcgacttggcttcctgttcaatgccactcggaatggagtctaaagccatctctgatgcacagataaccgccagtagctactttacgaacatgtttgctacgtggtcaccctctaaggcaaggcttcatttgcaaggccggtctaatgcctggagacctcaggtgaacaacccgaaagaatggctccaggtggactttcagaagaccatgaaagtaacaggtgtcactactcagggagttaagtccttggatactagcatgtatgtgaaggagttccttatttcctcatcacaagatggccaccagtggaccctcttctttcagaatggtaaggtcaaagtgtttcagggcaatcaagacagcttcacacccgtggtgaacagtcttgatcctccactcttgacacgataccttcgaatccatccacagtcttgggagcaccagattgcattgcgcatggaagtacttggatgcgaggctcaggacctctac

SEQ ID NO: 1834 - protein, 1457 aa, synthetic construct
  REGION 1..1457: note = Variant of human B-domain deleted Factor VIII
MQIELSTCFFLCLLRFCFSATRRYYLGAVELSWDYMQSDLGELPVDARFPPRVPKSFPFNTSQVYKKTLFVEFTDHLFNIAKPRPPWMGLLGPTIQAEVYDTVVITLKNMASHPVSLHAVGVSYWKASEGAEYDDQTSQREKEDDKVFPGGSHTYVWQVLKENGPMASDPPCLTYSYLSHVDLVKDLNSGLIGALLVCREGSLAKEKTQTLAKFILLFAVFDEGKSWHSETKNSLMQDRDAASARAWPKMHTVNGYVNRTLPGLIGCHRKSVYWHVIGMGTTPEVHSIFLEGHTFLVRNHRQASLGISPITFLTAQTLLRDLGQFLLFCHIPSHQHDGMEAYVKVDSCPEEPQLRMKNNEEAEDYDDDLTDSEMDVVRFDDDNSPSIIQARSGAKKHPKTWVHYIAAEEEDWDYAPLVLAPDDRSYKSQYLNNGPQRIGRKYKKVRFMAYTDETFKTREAIQHESGILGPLLYGEVGDTLLIIFKNQASRPYNIYPHGITDVRPLYSRRLPKGVKHLKDFPILPGEIFKYKWTITVEDGPTKSDPRCLTRYYSSFVNWERDLASGLIGPLLICYKESVDQRGNQIMSDKRNVILFSVFDENRSWYLTENIQRFLPNPAGVQLEDPEFQASNIMHSINGYVFDSLQLSVCLHEVAYWYILSIGAQTDFLSVFFSGYTFKHKGVYEDTLTLFPFSGETVFMSMENPGLWILGCHNSDFRNRGMTALLKVSSCDWNTGDYYEDSYEDISAYFDSKNNAIEPRSFSQNPPVLKRHQREGTRTTLQSDQEEIDYDDTISVEMKKEDFDIYDEDENQSPRSFQKKTRHYFIAAVERLWDYGMSSSPHVLRNRAQSGSVPQFKKVVFQEFTDGSFTQPLYRGELNEHLGLLGPYIRAEVEDNIMVTFRNQASRPYSFYSSLISYEEDQRQGAEPRKNFVKPNETKTYFWKVQHHMAPTKDEFDCKAWAYFSDVDLEKDVHSGLIGPLLVCHTNTLNPAHGRQVTVQEFALFFTIFDETKSWYFTENMERNCRAPCNIQMEDPTFKENYRFHAINGYIMDTLPGLVMAQDQRIRWYLLSMGSNENIHSIHFSGHVFTVRKKEEYKMALYNLYPGVFETVEMLPSKAGIWRVECLIGEHLHAGMSTLFLVYSNKCQNPLGMASGHIRDFQITASGQYGQWAPKLARLHYSGSINAWSTKEPFSWIKVDLLAPMIIHGIKTQGARQKFSSLYISQFIIMYSLDGKKWQTYRGNSTGTDMVFFGNVDSSGIKHNIFNPPIIARYIRLHPTHYSIRSTLRMELMGCDLASCSMPLGMESKAISDAQITASSYFTNMFATWSPSKARLHLQGRSNAWRPQVNNPKEWLQVDFQKTMKVTGVTTQGVKSLDTSMYVKEFLISSSQDGHQWTLFFQNGKVKVFQGNQDSFTPVVNSLDPPLLTRYLRIHPQSWEHQIALRMEVLGCEAQDLY

SEQ ID NO: 1835 - DNA, 4371 bp, synthetic construct
  misc_feature 1..4371: note = Variant of human B-domain deleted Factor VIII
  source 1..4371: mol_type = other DNA
atgcagattgaactgtctacctgcttcttcctctgtttgctgaggttctgctttagcgccactagacggtactaccttggcgctgtggagctgtcctgggactatatgcagagtgatttgggagagcttcccgtcgacgcacgatttcctcctcgcgttccaaagtcatttccctttaacacaagccaggtgtacaagaagacgctcttcgtcgaattcaccgatcacctgttcaatatcgccaaacccagaccaccatggatgggtcttttggggcctaccatacaagcggaggtgtatgacacagttgttatcactctcaagaacatggcttctcatccggtaagtcttcacgcagtgggcgtgtcctactggaaagcttcagaaggagccgagtatgatgatcagacatcccagagggagaaagaagacgacaaggtatttccaggtgggtctcatacctatgtgtggcaagtgctcaaagagaatggccctatggcaagcgatccgccgtgtttgacttacagctacctttcacacgttgacctcgtcaaggacctcaactccgggttgattggagccttgttggtatgcagggaaggatctcttgccaaagagaagacacagaccctggccaagtttatccttctctttgctgtgttcgatgagggcaaaagttggcatagcgaaacgaagaattccctcatgcaggatcgcgacgcagccagcgccagagcttggcccaagatgcacactgtgaacggatatgtcaataggacgcttcctggcttgattgggtgtcatcggaaaagtgtctactggcacgtgatcggaatggggacaacaccagaggtccactccatatttctcgaaggccataccttccttgttcgaaaccacagacaggcatccttggggatctctcccattacctttctcactgcccaaacgctccttcgtgacttgggtcagttccttctcttttgccatatcccgtcacaccagcatgatggtatggaagcttatgtgaaagtcgacagttgtcctgaggagccacagttgcgcatgaagaataatgaagaagccgaggattacgacgacgatctcaccgattctgagatggacgtggtgaggtttgatgacgacaactctccctccatcattcaagctcggagcggggcgaagaaacaccccaagacttgggtccactatatagcggcggaagaggaggattgggattacgctcctcttgtattggcaccagatgaccgctcatacaaaagccagtacctcaacaacggaccgcagagaattggccggaagtataagaaagtgcgatttatggcctatacagacgaaacctttaagacaagggaggccatccagcatgagagtgggattttgggacctcttctttacggcgaagttggtgataccctcctcatcatcttcaagaatcaagcttctcgcccctataacatttacccacacgggatcactgacgttaggcctttgtatagcagaagacttcccaaaggcgtgaagcatctcaaagacttccccattttgccaggcgagatctttaagtacaaatggaccattacagtggaagatggaccgactaaatcagaccctcgatgccttacgcggtactattcctccttcgtgaattgggagagagatttggcaagcggactcataggaccactcctcatctgttacaaggaatctgtagaccagaggggtaaccagattatgagtgataaacgcaatgtgatcctttttagcgtcttcgacgagaaccggtcctggtacttgaccgagaatatacaaaggttccttcccaaccccgcaggcgttcagttggaagaccctgagtttcaggccagcaatattatgcactcaatcaacggctatgtgtttgatagtctccagctttctgtttgcctccatgaagtagcctattggtacatcttgtcaattggtgctcaaacagacttcctctccgtcttcttctccggctacacctttaagcacaagggcgtgtatgaggacactctcacactctttccattttctggagaaaccgtgttcatgagcatggagaatccaggcctttggatcttgggttgcctgaacagtgattttcgcaatcggggaatgactgctctcctcaaagtcagcagctgtgattggaacacaggcgactattacgaagattcttacgaggacataagtgcctactttgactccaagaataacgccattgagcccagatcattctcccagaatcctcccgtgcttaaaaggcatcagcgcgaaggtaccagaactactcttcagtctgatcaagaggagattgactatgacgacaccattagcgtggaaatgaagaaggaggatttcgatatctatgacgaagatgagaaccagtctccgcggagctttcagaagaagacgcgacactacttcattgcagcagtcgaaaggctttgggactacggtatgtcatcatcccctcatgtgttgcgcaatagagctcagagtggaagtgttccacagttcaagaaagtcgtctttcaagagtttacagatggcagcttcacacagcctctctatcggggcgagcttaacgaacatttgggactccttggtccctatatccgagccgaagtggaggacaacattatggttacctttaggaatcaagcctctcgcccctacagcttctactcctccctcatcagttatgaggaggatcagagacaaggcgctgaaccacggaagaactttgtgaaaccgaatgagacgaagacctacttctggaaagtacagcaccacatggcccccacaaaagacgaattcgattgcaaagcatgggcgtatttttcagacgttgacttggagaaagatgtacattcaggacttattggtcctttgttggtgtgtcacactaacactctcaatccagcccatggcaggcaggtgacagtccaggaattcgctcttttctttaccatctttgatgagaccaagtcctggtacttcacggaaaacatggagcgcaattgcagagccccctgtaacatacagatggaggaccctacctttaaggaaaattatcggttccacgcaatcaacggatacattatggatacactccctggccttgtgatggctcaggaccaacgaatcaggtggtacctcctcagcatgggttctaatgagaacatacactccattcacttttcaggacatgtgttcactgtccggaagaaagaagagtataagatggccctctacaatttgtatccaggcgtgtttgagaccgttgaaatgcttccctctaaagctggcatctggagagtagagtgcttgatcggagaacatcttcacgcaggtatgagcaccttgttcctcgtgtacagcaacaaatgtcagaatccacttggcatggccagtggacacattcgcgactttcagatcacagcatctggccagtatggacaatgggccccaaagttggctcgcctccattactccggtagcataaatgcgtggtccactaaagaacctttcagctggattaaggtcgatcttcttgcccccatgatcatccacggcattaagacacagggagcgaggcagaaattctcctccctctacatctcacagttcattattatgtatagtttggacggcaagaagtggcaaacttatagaggtaacagtactggaacagacatggtgttcttcggcaacgttgatagctctggcatcaaacacaacatctttaatcctcccataatagctcggtacatcagattgcatccgacccactacagcattaggagtacactccgaatggagcttatgggttgcgacttgaattcctgttcaatgccactcggaatggagtctaaagccatctctgatgcacagataaccgccagtagctactttacgaacatgtttgctacgtggtcaccctctaaggcaaggcttcatttgcaaggccggtctaatgcctggagacctcaggtgaacaacccgaaagaatggctccaggtggactttcagaagaccatgaaagtaacaggtgtcactactcagggagttaagtccttggatactagcatgtatgtgaaggagttccttatttcctcatcacaagatggccaccagtggaccctcttctttcagaatggtaaggtcaaagtgtttcagggcaatcaagacagcttcacacccgtggtgaacagtcttgatcctccactcttgacacgataccttcgaatccatccacagtcttgggagcaccagattgcattgcgcatggaagtacttggatgcgaggctcaggacctctac

SEQ ID NO: 1836 - protein, 1457 aa, synthetic construct
  REGION 1..1457: note = Variant of human B-domain deleted Factor VIII
MQIELSTCFFLCLLRFCFSATRRYYLGAVELSWDYMQSDLGELPVDARFPPRVPKSFPFNTSQVYKKTLFVEFTDHLFNIAKPRPPWMGLLGPTIQAEVYDTVVITLKNMASHPVSLHAVGVSYWKASEGAEYDDQTSQREKEDDKVFPGGSHTYVWQVLKENGPMASDPPCLTYSYLSHVDLVKDLNSGLIGALLVCREGSLAKEKTQTLAKFILLFAVFDEGKSWHSETKNSLMQDRDAASARAWPKMHTVNGYVNRTLPGLIGCHRKSVYWHVIGMGTTPEVHSIFLEGHTFLVRNHRQASLGISPITFLTAQTLLRDLGQFLLFCHIPSHQHDGMEAYVKVDSCPEEPQLRMKNNEEAEDYDDDLTDSEMDVVRFDDDNSPSIIQARSGAKKHPKTWVHYIAAEEEDWDYAPLVLAPDDRSYKSQYLNNGPQRIGRKYKKVRFMAYTDETFKTREAIQHESGILGPLLYGEVGDTLLIIFKNQASRPYNIYPHGITDVRPLYSRRLPKGVKHLKDFPILPGEIFKYKWTITVEDGPTKSDPRCLTRYYSSFVNWERDLASGLIGPLLICYKESVDQRGNQIMSDKRNVILFSVFDENRSWYLTENIQRFLPNPAGVQLEDPEFQASNIMHSINGYVFDSLQLSVCLHEVAYWYILSIGAQTDFLSVFFSGYTFKHKGVYEDTLTLFPFSGETVFMSMENPGLWILGCLNSDFRNRGMTALLKVSSCDWNTGDYYEDSYEDISAYFDSKNNAIEPRSFSQNPPVLKRHQREGTRTTLQSDQEEIDYDDTISVEMKKEDFDIYDEDENQSPRSFQKKTRHYFIAAVERLWDYGMSSSPHVLRNRAQSGSVPQFKKVVFQEFTDGSFTQPLYRGELNEHLGLLGPYIRAEVEDNIMVTFRNQASRPYSFYSSLISYEEDQRQGAEPRKNFVKPNETKTYFWKVQHHMAPTKDEFDCKAWAYFSDVDLEKDVHSGLIGPLLVCHTNTLNPAHGRQVTVQEFALFFTIFDETKSWYFTENMERNCRAPCNIQMEDPTFKENYRFHAINGYIMDTLPGLVMAQDQRIRWYLLSMGSNENIHSIHFSGHVFTVRKKEEYKMALYNLYPGVFETVEMLPSKAGIWRVECLIGEHLHAGMSTLFLVYSNKCQNPLGMASGHIRDFQITASGQYGQWAPKLARLHYSGSINAWSTKEPFSWIKVDLLAPMIIHGIKTQGARQKFSSLYISQFIIMYSLDGKKWQTYRGNSTGTDMVFFGNVDSSGIKHNIFNPPIIARYIRLHPTHYSIRSTLRMELMGCDLNSCSMPLGMESKAISDAQITASSYFTNMFATWSPSKARLHLQGRSNAWRPQVNNPKEWLQVDFQKTMKVTGVTTQGVKSLDTSMYVKEFLISSSQDGHQWTLFFQNGKVKVFQGNQDSFTPVVNSLDPPLLTRYLRIHPQSWEHQIALRMEVLGCEAQDLY

SEQ ID NO: 1837 - DNA, 4371 bp, synthetic construct
  misc_feature 1..4371: note = Variant of human B-domain deleted Factor VIII
  source 1..4371: mol_type = other DNA
atgcagattgaactgtctacctgcttcttcctctgtttgctgaggttctgctttagcgccactagacggtactaccttggcgctgtggagctgtcctgggactatatgcagagtgatttgggagagcttcccgtcgacgcacgatttcctcctcgcgttccaaagtcatttccctttaacacaagccaggtgtacaagaagacgctcttcgtcgaattcaccgatcacctgttcaatatcgccaaacccagaccaccatggatgggtcttttggggcctaccatacaagcggaggtgtatgacacagttgttatcactctcaagaacatggcttctcatccggtaagtcttcacgcagtgggcgtgtcctactggaaagcttcagaaggagccgagtatgatgatcagacatcccagagggagaaagaagacgacaaggtatttccaggtgggtctcatacctatgtgtggcaagtgctcaaagagaatggccctatggcaagcgatccgccgtgtttgacttacagctacctttcacacgttgacctcgtcaaggacctcaactccgggttgattggagccttgttggtatgcagggaaggatctcttgccaaagagaagacacagaccctggccaagtttatccttctctttgctgtgttcgatgagggcaaaagttggcatagcgaaacgaagaattccctcatgcaggatcgcgacgcagccagcgccagagcttggcccaagatgcacactgtgaacggatatgtcaataggacgcttcctggcttgattgggtgtcatcggaaaagtgtctactggcacgtgatcggaatggggacaacaccagaggtccactccatatttctcgaaggccataccttccttgttcgaaaccacagacaggcatccttggggatctctcccattacctttctcactgcccaaacgctccttcgtgacttgggtcagttccttctcttttgccatatcccgtcacaccagcatgatggtatggaagcttatgtgaaagtcgacagttgtcctgaggagccacagttgcgcatgaagaataatgaagaagccgaggattacgacgacgatctcaccgattctgagatggacgtggtgaggtttgatgacgacaactctccctccatcattcaagctcggagcggggcgaagaaacaccccaagacttgggtccactatatagcggcggaagaggaggattgggattacgctcctcttgtattggcaccagatgaccgctcatacaaaagccagtacctcaacaacggaccgcagagaattggccggaagtataagaaagtgcgatttatggcctatacagacgaaacctttaagacaagggaggccatccagcatgagagtgggattttgggacctcttctttacggcgaagttggtgataccctcctcatcatcttcaagaatcaagcttctcgcccctataacatttacccacacgggatcactgacgttaggcctttgtatagcagaagacttcccaaaggcgtgaagcatctcaaagacttccccattttgccaggcgagatctttaagtacaaatggaccattacagtggaagatggaccgactaaatcagaccctcgatgccttacgcggtactattcctccttcgtgaattgggagagagatttggcaagcggactcataggaccactcctcatctgttacaaggaatctgtagaccagaggggtaaccagattatgagtgataaacgcaatgtgatcctttttagcgtcttcgacgagaaccggtcctggtacttgaccgagaatatacaaaggttccttcccaaccccgcaggcgttcagttggaagaccctgagtttcaggccagcaatattatgcactcaatcaacggctatgtgtttgatagtctccagctttctgtttgcctccatgaagtagcctattggtacatcttgtcaattggtgctcaaacagacttcctctccgtcttcttctccggctacacctttaagcacaagggcgtgtatgaggacactctcacactctttccattttctggagaaaccgtgttcatgagcatggagaatccaggcctttggatcttgggttgccacaacagtgattttcgcaatcggggaatgactgctctcctcaaagtcagcagctgtgattggaacacaggcgactattacgaagattcttacgaggacataagtgcctactttgactccaagaataacgccattgagcccagatcattctcccagaatcctcccgtgcttaaaaggcatcagcgcgaaggtaccagaactactcttcagtctgatcaagaggagattgactatgacgacaccattagcgtggaaatgaagaaggaggatttcgatatctatgacgaagatgagaaccagtctccgcggagctttcagaagaagacgcgacactacttcattgcagcagtcgaaaggctttgggactacggtatgtcatcatcccctcatgtgttgcgcaatagagctcagagtggaagtgttccacagttcaagaaagtcgtctttcaagagtttacagatggcagcttcacacagcctctctatcggggcgagcttaacgaacatttgggactccttggtccctatatccgagccgaagtggaggacaacattatggttacctttaggaatcaagcctctcgcccctacagcttctactcctccctcatcagttatgaggaggatcagagacaaggcgctgaaccacggaagaactttgtgaaaccgaatgagacgaagacctacttctggaaagtacagcaccacatggcccccacaaaagacgaattcgattgcaaagcatgggcgtatttttcagacgttgacttggagaaagatgtacattcaggacttattggtcctttgttggtgtgtcacactaacactctcaatccagcccatggcaggcaggtgacagtccaggaattcgctcttttctttaccatctttgatgagaccaagtcctggtacttcacggaaaacatggagcgcaattgcagagccccctgtaacatacagatggaggaccctacctttaaggaaaattatcggttccacgcaatcaacggatacattatggatacactccctggccttgtgatggctcaggaccaacgaatcaggtggtacctcctcagcatgggttctaatgagaacatacactccattcacttttcaggacatgtgttcactgtccggaagaaagaagagtataagatggccctctacaatttgtatccaggcgtgtttgagaccgttgaaatgcttccctctaaagctggcatctggagagtagagtgcttggtgggagaacatcttcacgcaggtatgagcaccttgttcctcgtgtacagcaacaaatgtcagaatccacttggcatggccagtggacacattcgcgactttcagatcacagcatctggccagtatggacaatgggccccaaagttggctcgcctccattactccggtagcataaatgcgtggtccactaaagaacctttcagctggattaaggtcgatcttcttgcccccatgatcatccacggcattaagacacagggagcgaggcagaaattctcctccctctacatctcacagttcattattatgtatagtttggacggcaagaagtggcaaacttatagaggtaacagtactggaacagacatggtgttcttcggcaacgttgatagctctggcatcaaacacaacatctttaatcctcccataatagctcggtacatcagattgcatccgacccactacagcattaggagtacactccgaatggagcttatgggttgcgacttgaattcctgttcaatgccactcggaatggagtctaaagccatctctgatgcacagataaccgccagtagctactttacgaacatgtttgctacgtggtcaccctctaaggcaaggcttcatttgcaaggccggtctaatgcctggagacctcaggtgaacaacccgaaagaatggctccaggtggactttcagaagaccatgaaagtaacaggtgtcactactcagggagttaagtccttggatactagcatgtatgtgaaggagttccttatttcctcatcacaagatggccaccagtggaccctcttctttcagaatggtaaggtcaaagtgtttcagggcaatcaagacagcttcacacccgtggtgaacagtcttgatcctccactcttgacacgataccttcgaatccatccacagtcttgggagcaccagattgcattgcgcatggaagtacttggatgcgaggctcaggacctctac

SEQ ID NO: 1838 - protein, 1457 aa, synthetic construct
  REGION 1..1457: note = Variant of human B-domain deleted Factor VIII
MQIELSTCFFLCLLRFCFSATRRYYLGAVELSWDYMQSDLGELPVDARFPPRVPKSFPFNTSQVYKKTLFVEFTDHLFNIAKPRPPWMGLLGPTIQAEVYDTVVITLKNMASHPVSLHAVGVSYWKASEGAEYDDQTSQREKEDDKVFPGGSHTYVWQVLKENGPMASDPPCLTYSYLSHVDLVKDLNSGLIGALLVCREGSLAKEKTQTLAKFILLFAVFDEGKSWHSETKNSLMQDRDAASARAWPKMHTVNGYVNRTLPGLIGCHRKSVYWHVIGMGTTPEVHSIFLEGHTFLVRNHRQASLGISPITFLTAQTLLRDLGQFLLFCHIPSHQHDGMEAYVKVDSCPEEPQLRMKNNEEAEDYDDDLTDSEMDVVRFDDDNSPSIIQARSGAKKHPKTWVHYIAAEEEDWDYAPLVLAPDDRSYKSQYLNNGPQRIGRKYKKVRFMAYTDETFKTREAIQHESGILGPLLYGEVGDTLLIIFKNQASRPYNIYPHGITDVRPLYSRRLPKGVKHLKDFPILPGEIFKYKWTITVEDGPTKSDPRCLTRYYSSFVNWERDLASGLIGPLLICYKESVDQRGNQIMSDKRNVILFSVFDENRSWYLTENIQRFLPNPAGVQLEDPEFQASNIMHSINGYVFDSLQLSVCLHEVAYWYILSIGAQTDFLSVFFSGYTFKHKGVYEDTLTLFPFSGETVFMSMENPGLWILGCHNSDFRNRGMTALLKVSSCDWNTGDYYEDSYEDISAYFDSKNNAIEPRSFSQNPPVLKRHQREGTRTTLQSDQEEIDYDDTISVEMKKEDFDIYDEDENQSPRSFQKKTRHYFIAAVERLWDYGMSSSPHVLRNRAQSGSVPQFKKVVFQEFTDGSFTQPLYRGELNEHLGLLGPYIRAEVEDNIMVTFRNQASRPYSFYSSLISYEEDQRQGAEPRKNFVKPNETKTYFWKVQHHMAPTKDEFDCKAWAYFSDVDLEKDVHSGLIGPLLVCHTNTLNPAHGRQVTVQEFALFFTIFDETKSWYFTENMERNCRAPCNIQMEDPTFKENYRFHAINGYIMDTLPGLVMAQDQRIRWYLLSMGSNENIHSIHFSGHVFTVRKKEEYKMALYNLYPGVFETVEMLPSKAGIWRVECLVGEHLHAGMSTLFLVYSNKCQNPLGMASGHIRDFQITASGQYGQWAPKLARLHYSGSINAWSTKEPFSWIKVDLLAPMIIHGIKTQGARQKFSSLYISQFIIMYSLDGKKWQTYRGNSTGTDMVFFGNVDSSGIKHNIFNPPIIARYIRLHPTHYSIRSTLRMELMGCDLNSCSMPLGMESKAISDAQITASSYFTNMFATWSPSKARLHLQGRSNAWRPQVNNPKEWLQVDFQKTMKVTGVTTQGVKSLDTSMYVKEFLISSSQDGHQWTLFFQNGKVKVFQGNQDSFTPVVNSLDPPLLTRYLRIHPQSWEHQIALRMEVLGCEAQDLY

SEQ ID NO: 1839 - DNA, 4371 bp, synthetic construct
  misc_feature 1..4371: note = Variant of human B-domain deleted Factor VIII
  source 1..4371: mol_type = other DNA
atgcagattgaactgtctacctgcttcttcctctgtttgctgaggttctgctttagcgccactagacggtactaccttggcgctgtggagctgtcctgggactatatgcagagtgatttgggagagcttcccgtcgacgcacgatttcctcctcgcgttccaaagtcatttccctttaacacaagccaggtgtacaagaagacgctcttcgtcgaattcaccgatcacctgttcaatatcgccaaacccagaccaccatggatgggtcttttggggcctaccatacaagcggaggtgtatgacacagttgttatcactctcaagaacatggcttctcatccggtaagtcttcacgcagtgggcgtgtcctactggaaagcttcagaaggagccgagtatgatgatcagacatcccagagggagaaagaagacgacaaggtatttccaggtgggtctcatacctatgtgtggcaagtgctcaaagagaatggccctatggcaagcgatccgccgtgtttgacttacagctacctttcacacgttgacctcgtcaaggacctcaactccgggttgattggagccttgttggtatgcagggaaggatctcttgccaaagagaagacacagaccctggccaagtttatccttctctttgctgtgttcgatgagggcaaaagttggcatagcgaaacgaagaattccctcatgcaggatcgcgacgcagccagcgccagagcttggcccaagatgcacactgtgaacggatatgtcaataggacgcttcctggcttgattgggtgtcatcggaaaagtgtctactggcacgtgatcggaatggggacaacaccagaggtccactccatatttctcgaaggccataccttccttgttcgaaaccacagacaggcatccttggggatctctcccattacctttctcactgcccaaacgctccttcgtgacttgggtcagttccttctcttttgccatatcccgtcacaccagcatgatggtatggaagcttatgtgaaagtcgacagttgtcctgaggagccacagttgcgcatgaagaataatgaagaagccgaggattacgacgacgatctcaccgattctgagatggacgtggtgaggtttgatgacgacaactctccctccatcattcaagctcggagcggggcgaagaaacaccccaagacttgggtccactatatagcggcggaagaggaggattgggattacgctcctcttgtattggcaccagatgaccgctcatacaaaagccagtacctcaacaacggaccgcagagaattggccggaagtataagaaagtgcgatttatggcctatacagacgaaacctttaagacaagggaggccatccagcatgagagtgggattttgggacctcttctttacggcgaagttggtgataccctcctcatcatcttcaagaatcaagcttctcgcccctataacatttacccacacgggatcactgacgttaggcctttgtatagcagaagacttcccaaaggcgtgaagcatctcaaagacttccccattttgccaggcgagatctttaagtacaaatggaccattacagtggaagatggaccgactaaatcagaccctcgatgccttacgcggtactattcctccttcgtgaattgggagagagatttggcaagcggactcataggaccactcctcatctgttacaaggaatctgtagaccagaggggtaaccagattatgagtgataaacgcaatgtgatcctttttagcgtcttcgacgagaaccggtcctggtacttgaccgagaatatacaaaggttccttcccaaccccgcaggcgttcagttggaagaccctgagtttcaggccagcaatattatgcactcaatcaacggctatgtgtttgatagtctccagctttctgtttgcctccatgaagtagcctattggtacatcttgtcaattggtgctcaaacagacttcctctccgtcttcttctccggctacacctttaagcacaagggcgtgtatgaggacactctcacactctttccattttctggagaaaccgtgttcatgagcatggagaatccaggcctttggatcttgggttgccacaacagtgattttcgcaatcggggaatgactgctctcctcaaagtcagcagctgtgattggaacacaggcgactattacgaagattcttacgaggacataagtgcctactttgactccaagaataacgccattgagcccagatcattctcccagaatcctcccgtgcttaaaaggcatcagcgcgaaggtaccagaactactcttcagtctgatcaagaggagattgactatgacgacaccattagcgtggaaatgaagaaggaggatttcgatatctatgacgaagatgagaaccagtctccgcggagctttcagaagaagacgcgacactacttcattgcagcagtcgaaaggctttgggactacggtatgtcatcatcccctcatgtgttgcgcaatagagctcagagtggaagtgttccacagttcaagaaagtcgtctttcaagagtttacagatggcagcttcacacagcctctctatcggggcgagcttaacgaacatttgggactccttggtccctatatccgagccgaagtggaggacaacattatggttacctttaggaatcaagcctctcgcccctacagcttctactcctccctcatcagttatgaggaggatcagagacaaggcgctgaaccacggaagaactttgtgaaaccgaatgagacgaagtcgtacttctggaaagtacagcaccacatggcccccacaaaagacgaattcgattgcaaagcatgggcgtatttttcagacgttgacttggagaaagatgtacattcaggacttattggtcctttgttggtgtgtcacactaacactctcaatccagcccatggcaggcaggtgacagtccaggaattcgctcttttctttaccatctttgatgagaccaagtcctggtacttcacggaaaacatggagcgcaattgcagagccccctgtaacatacagatggaggaccctacctttaaggaaaattatcggttccacgcaatcaacggatacattatggatacactccctggccttgtgatggctcaggaccaacgaatcaggtggtacctcctcagcatgggttctaatgagaacatacactccattcacttttcaggacatgtgttcactgtccggaagaaagaagagtataagatggccctctacaatttgtatccaggcgtgtttgagaccgttgaaatgcttccctctaaagctggcatctggagagtagagtgcttgatcggagaacatcttcacgcaggtatgagcaccttgttcctcgtgtacagcaacaaatgtcagaatccacttggcatggccagtggacacattcgcgactttcagatcacagcatctggccagtatggacaatgggccccaaagttggctcgcctccattactccggtagcataaatgcgtggtccactaaagaacctttcagctggattaaggtcgatcttcttgcccccatgatcatccacggcattaagacacagggagcgaggcagaaattctcctccctctacatctcacagttcattattatgtatagtttggacggcaagaagtggcaaacttatagaggtaacagtactggaacagacatggtgttcttcggcaacgttgatagctctggcatcaaacacaacatctttaatcctcccataatagctcggtacatcagattgcatccgacccactacagcattaggagtacactccgaatggagcttatgggttgcgacttgaattcctgttcaatgccactcggaatggagtctaaagccatctctgatgcacagataaccgccagtagctactttacgaacatgtttgctacgtggtcaccctctaaggcaaggcttcatttgcaaggccggtctaatgcctggagacctcaggtgaacaacccgaaagaatggctccaggtggactttcagaagaccatgaaagtaacaggtgtcactactcagggagttaagtccttggatactagcatgtatgtgaaggagttccttatttcctcatcacaagatggccaccagtggaccctcttctttcagaatggtaaggtcaaagtgtttcagggcaatcaagacagcttcacacccgtggtgaacagtcttgatcctccactcttgacacgataccttcgaatccatccacagtcttgggagcaccagattgcattgcgcatggaagtacttggatgcgaggctcaggacctctac

SEQ ID NO: 1840 - protein, 1457 aa, synthetic construct
  REGION 1..1457: note = Variant of human B-domain deleted Factor VIII
MQIELSTCFFLCLLRFCFSATRRYYLGAVELSWDYMQSDLGELPVDARFPPRVPKSFPFNTSQVYKKTLFVEFTDHLFNIAKPRPPWMGLLGPTIQAEVYDTVVITLKNMASHPVSLHAVGVSYWKASEGAEYDDQTSQREKEDDKVFPGGSHTYVWQVLKENGPMASDPPCLTYSYLSHVDLVKDLNSGLIGALLVCREGSLAKEKTQTLAKFILLFAVFDEGKSWHSETKNSLMQDRDAASARAWPKMHTVNGYVNRTLPGLIGCHRKSVYWHVIGMGTTPEVHSIFLEGHTFLVRNHRQASLGISPITFLTAQTLLRDLGQFLLFCHIPSHQHDGMEAYVKVDSCPEEPQLRMKNNEEAEDYDDDLTDSEMDVVRFDDDNSPSIIQARSGAKKHPKTWVHYIAAEEEDWDYAPLVLAPDDRSYKSQYLNNGPQRIGRKYKKVRFMAYTDETFKTREAIQHESGILGPLLYGEVGDTLLIIFKNQASRPYNIYPHGITDVRPLYSRRLPKGVKHLKDFPILPGEIFKYKWTITVEDGPTKSDPRCLTRYYSSFVNWERDLASGLIGPLLICYKESVDQRGNQIMSDKRNVILFSVFDENRSWYLTENIQRFLPNPAGVQLEDPEFQASNIMHSINGYVFDSLQLSVCLHEVAYWYILSIGAQTDFLSVFFSGYTFKHKGVYEDTLTLFPFSGETVFMSMENPGLWILGCHNSDFRNRGMTALLKVSSCDWNTGDYYEDSYEDISAYFDSKNNAIEPRSFSQNPPVLKRHQREGTRTTLQSDQEEIDYDDTISVEMKKEDFDIYDEDENQSPRSFQKKTRHYFIAAVERLWDYGMSSSPHVLRNRAQSGSVPQFKKVVFQEFTDGSFTQPLYRGELNEHLGLLGPYIRAEVEDNIMVTFRNQASRPYSFYSSLISYEEDQRQGAEPRKNFVKPNETKSYFWKVQHHMAPTKDEFDCKAWAYFSDVDLEKDVHSGLIGPLLVCHTNTLNPAHGRQVTVQEFALFFTIFDETKSWYFTENMERNCRAPCNIQMEDPTFKENYRFHAINGYIMDTLPGLVMAQDQRIRWYLLSMGSNENIHSIHFSGHVFTVRKKEEYKMALYNLYPGVFETVEMLPSKAGIWRVECLIGEHLHAGMSTLFLVYSNKCQNPLGMASGHIRDFQITASGQYGQWAPKLARLHYSGSINAWSTKEPFSWIKVDLLAPMIIHGIKTQGARQKFSSLYISQFIIMYSLDGKKWQTYRGNSTGTDMVFFGNVDSSGIKHNIFNPPIIARYIRLHPTHYSIRSTLRMELMGCDLNSCSMPLGMESKAISDAQITASSYFTNMFATWSPSKARLHLQGRSNAWRPQVNNPKEWLQVDFQKTMKVTGVTTQGVKSLDTSMYVKEFLISSSQDGHQWTLFFQNGKVKVFQGNQDSFTPVVNSLDPPLLTRYLRIHPQSWEHQIALRMEVLGCEAQDLY

SEQ ID NO: 1841 - DNA, 4371 bp, synthetic construct
  misc_feature 1..4371: note = Variant of human B-domain deleted Factor VIII
  source 1..4371: mol_type = other DNA
atgcagattgaactgtctacctgcttcttcctctgtttgctgaggttctgctttagcgccactagacggtactaccttggcgctgtggagctgtcctgggactatatgcagagtgatttgggagagcttcccgtcgacgcacgatttcctcctcgcgttccaaagtcatttccctttaacacaagccaggtgtacaagaagacgctcttcgtcgaattcaccgatcacctgttcaatatcgccaaacccagaccaccatggatgggtcttttggggcctaccatacaagcggaggtgtatgacacagttgttatcactctcaagaacatggcttctcatccggtaagtcttcacgcagtgggcgtgtcctactggaaagcttcagaaggagccgagtatgatgatcagacatcccagagggagaaagaagacgacaaggtatttccaggtgggtctcatacctatgtgtggcaagtgctcaaagagaatggccctatggcaagcgatccgccgtgtttgacttacagctacatgtcacacgttgacctcgtcaaggacctcaactccgggttgattggagccttgttggtatgcagggaaggatctcttgccaaagagaagacacagaccctggccaagtttatccttctctttgctgtgttcgatgagggcaaaagttggcatagcgaaacgaagaattccctcatgcaggatcgcgacgcagccagcgccagagcttggcccaagatgcacactgtgaacggatatgtcaataggacgcttcctggcttgattgggtgtcatcggaaaagtgtctactggcacgtgatcggaatggggacaacaccagaggtccactccatatttctcgaaggccataccttccttgttcgaaaccacagacaggcatccttggggatctctcccattacctttctcactgcccaaacgctccttcgtgacttgggtcagttccttctcttttgccatatcccgtcacaccagcatgatggtatggaagcttatgtgaaagtcgacagttgtcctgaggagccacagttgcgcatgaagaataatgaagaagccgaggattacgacgacgatctcaccgattctgagatggacgtggtgaggtttgatgacgacaactctccctccatcattcaagctcggagcggggcgaagaaacaccccaagacttgggtccactatatagcggcggaagaggaggattgggattacgctcctcttgtattggcaccagatgaccgctcatacaaaagccagtacctcaacaacggaccgcagagaattggccggaagtataagaaagtgcgatttatggcctatacagacgaaacctttaagacaagggaggccatccagcatgagagtgggattttgggacctcttctttacggcgaagttggtgataccctcctcatcatcttcaagaatcaagcttctcgcccctataacatttacccacacgggatcactgacgttaggcctttgtatagcagaagacttcccaaaggcgtgaagcatctcaaagacttccccattttgccaggcgagatctttaagtacaaatggaccattacagtggaagatggaccgactaaatcagaccctcgatgccttacgcggtactattcctccttcgtgaattgggagagagatttggcaagcggactcataggaccactcctcatctgttacaaggaatctgtagaccagaggggtaaccagattatgagtgataaacgcaatgtgatcctttttagcgtcttcgacgagaaccggtcctggtacttgaccgagaatatacaaaggttccttcccaaccccgcaggcgttcagttggaagaccctgagtttcaggccagcaatattatgcactcaatcaacggctatgtgtttgatagtctccagctttctgtttgcctccatgaagtagcctattggtacatcttgtcaattggtgctcaaacagacttcctctccgtcttcttctccggctacacctttaagcacaagggcgtgtatgaggacactctcacactctttccattttctggagaaaccgtgttcatgagcatggagaatccaggcctttggatcttgggttgccacaacagtgattttcgcaatcggggaatgactgctctcctcaaagtcagcagctgtgattggaacacaggcgactattacgaagattcttacgaggacataagtgcctactttgactccaagaataacgccattgagcccagatcattctcccagaatcctcccgtgcttaaaaggcatcagcgcgaaggtaccagaactactcttcagtctgatcaagaggagattgactatgacgacaccattagcgtggaaatgaagaaggaggatttcgatatctatgacgaagatgagaaccagtctccgcggagctttcagaagaagacgcgacactacttcattgcagcagtcgaaaggctttgggactacggtatgtcatcatcccctcatgtgttgcgcaatagagctcagagtggaagtgttccacagttcaagaaagtcgtctttcaagagtttacagatggcagcttcacacagcctctctatcggggcgagcttaacgaacatttgggactccttggtccctatatccgagccgaagtggaggacaacattatggttacctttaggaatcaagcctctcgcccctacagcttctactcctccctcatcagttatgaggaggatcagagacaaggcgctgaaccacggaagaactttgtgaaaccgaatgagacgaagacctacttctggaaagtacagcaccacatggcccccacaaaagacgaattcgattgcaaagcatgggcgtatttttcagacgttgacttggagaaagatgtacattcaggacttattggtcctttgttggtgtgtcacactaacactctcaatccagcccatggcaggcaggtgacagtccaggaattcgctcttttctttaccatctttgatgagaccaagtcctggtacttcacggaaaacatggagcgcaattgcagagccccctgtaacatacagatggaggaccctacctttaaggaaaattatcggttccacgcaatcaacggatacattatggatacactccctggccttgtgatggctcaggaccaacgaatcaggtggtacctcctcagcatgggttctaatgagaacatacactccattcacttttcaggacatgtgttcactgtccggaagaaagaagagtataagatggccctctacaatttgtatccaggcgtgtttgagaccgttgaaatgcttccctctaaagctggcatctggagagtagagtgcttgatcggagaacatcttcacgcaggtatgagcaccttgttcctcgtgtacagcaacaaatgtcagaatccacttggcatggccagtggacacattcgcgactttcagatcacagcatctggccagtatggacaatgggccccaaagttggctcgcctccattactccggtagcataaatgcgtggtccactaaagaacctttcagctggattaaggtcgatcttcttgcccccatgatcatccacggcattaagacacagggagcgaggcagaaattctcctccctctacatctcacagttcattattatgtatagtttggacggcaagaagtggcaaacttatagaggtaacagtactggaacagacatggtgttcttcggcaacgttgatagctctggcatcaaacacaacatctttaatcctcccataatagctcggtacatcagattgcatccgacccactacagcattaggagtacactccgaatggagcttatgggttgcgacttgaattcctgttcaatgccactcggaatggagtctaaagccatctctgatgcacagataaccgccagtagctactttacgaacatgtttgctacgtggtcaccctctaaggcaaggcttcatttgcaaggccggtctaatgcctggagacctcaggtgaacaacccgaaagaatggctccaggtggactttcagaagaccatgaaagtaacaggtgtcactactcagggagttaagtccttggatactagcatgtatgtgaaggagttccttatttcctcatcacaagatggccaccagtggaccctcttctttcagaatggtaaggtcaaagtgtttcagggcaatcaagacagcttcacacccgtggtgaacagtcttgatcctccactcttgacacgataccttcgaatccatccacagtcttgggagcaccagattgcattgcgcatggaagtacttggatgcgaggctcaggacctctac

SEQ ID NO: 1842 - protein, 1457 aa, synthetic construct
  REGION 1..1457: note = Variant of human B-domain deleted Factor VIII
MQIELSTCFFLCLLRFCFSATRRYYLGAVELSWDYMQSDLGELPVDARFPPRVPKSFPFNTSQVYKKTLFVEFTDHLFNIAKPRPPWMGLLGPTIQAEVYDTVVITLKNMASHPVSLHAVGVSYWKASEGAEYDDQTSQREKEDDKVFPGGSHTYVWQVLKENGPMASDPPCLTYSYMSHVDLVKDLNSGLIGALLVCREGSLAKEKTQTLAKFILLFAVFDEGKSWHSETKNSLMQDRDAASARAWPKMHTVNGYVNRTLPGLIGCHRKSVYWHVIGMGTTPEVHSIFLEGHTFLVRNHRQASLGISPITFLTAQTLLRDLGQFLLFCHIPSHQHDGMEAYVKVDSCPEEPQLRMKNNEEAEDYDDDLTDSEMDVVRFDDDNSPSIIQARSGAKKHPKTWVHYIAAEEEDWDYAPLVLAPDDRSYKSQYLNNGPQRIGRKYKKVRFMAYTDETFKTREAIQHESGILGPLLYGEVGDTLLIIFKNQASRPYNIYPHGITDVRPLYSRRLPKGVKHLKDFPILPGEIFKYKWTITVEDGPTKSDPRCLTRYYSSFVNWERDLASGLIGPLLICYKESVDQRGNQIMSDKRNVILFSVFDENRSWYLTENIQRFLPNPAGVQLEDPEFQASNIMHSINGYVFDSLQLSVCLHEVAYWYILSIGAQTDFLSVFFSGYTFKHKGVYEDTLTLFPFSGETVFMSMENPGLWILGCHNSDFRNRGMTALLKVSSCDWNTGDYYEDSYEDISAYFDSKNNAIEPRSFSQNPPVLKRHQREGTRTTLQSDQEEIDYDDTISVEMKKEDFDIYDEDENQSPRSFQKKTRHYFIAAVERLWDYGMSSSPHVLRNRAQSGSVPQFKKVVFQEFTDGSFTQPLYRGELNEHLGLLGPYIRAEVEDNIMVTFRNQASRPYSFYSSLISYEEDQRQGAEPRKNFVKPNETKTYFWKVQHHMAPTKDEFDCKAWAYFSDVDLEKDVHSGLIGPLLVCHTNTLNPAHGRQVTVQEFALFFTIFDETKSWYFTENMERNCRAPCNIQMEDPTFKENYRFHAINGYIMDTLPGLVMAQDQRIRWYLLSMGSNENIHSIHFSGHVFTVRKKEEYKMALYNLYPGVFETVEMLPSKAGIWRVECLIGEHLHAGMSTLFLVYSNKCQNPLGMASGHIRDFQITASGQYGQWAPKLARLHYSGSINAWSTKEPFSWIKVDLLAPMIIHGIKTQGARQKFSSLYISQFIIMYSLDGKKWQTYRGNSTGTDMVFFGNVDSSGIKHNIFNPPIIARYIRLHPTHYSIRSTLRMELMGCDLNSCSMPLGMESKAISDAQITASSYFTNMFATWSPSKARLHLQGRSNAWRPQVNNPKEWLQVDFQKTMKVTGVTTQGVKSLDTSMYVKEFLISSSQDGHQWTLFFQNGKVKVFQGNQDSFTPVVNSLDPPLLTRYLRIHPQSWEHQIALRMEVLGCEAQDLY

SEQ ID NO: 1843 - DNA, 4371 bp, synthetic construct
  misc_feature 1..4371: note = Variant of human B-domain deleted Factor VIII
  source 1..4371: mol_type = other DNA
atgcagattgaactgtctacctgcttcttcctctgtttgctgaggttctgctttagcgccactagacggtactaccttggcgctgtggagctgtcctgggactatatgcagagtgatttgggagagcttcccgtcgacgcacgatttcctcctcgcgttccaaagtcatttccctttaacacaagccaggtgtacaagaagacgctcttcgtcgaattcaccgatcacctgttcaatatcgccaaacccagaccaccatggatgggtcttttggggcctaccatacaagcggaggtgtatgacacagttgttatcactctcaagaacatggcttctcatccggtaagtcttcacgcagtgggcgtgtcctactggaaagcttcagaaggagccgagtatgatgatcagacatcccagagggagaaagaagacgacaaggtatttccaggtgggtctcatacctatgtgtggcaagtgctcaaagagaatggccctatggcaagcgatccgccgtgtttgacttacagctacctttcacacgttgacctcgtcaaggacctcaactccgggttgattggagccttgttggtatgcagggaaggatctcttgccaaagagaagacacagaccctggccaagtttatccttctctttgctgtgttcgatgagggcaaaagttggcatagcgaaacgaagaattccctcatgcaggatcgcgacgcagccagcgccagagcttggcccaagatgcacactgtgaacggatatgtcaataggacgcttcctggcttgattgggtgtcatcggaaaagtgtctactggcacgtgatcggaatggggacaacaccagaggtccactccatatttctcgaaggccataccttccttgttcgaaaccacagacaggcatccttggggatctctcccattacctttctcactgcccaaacgctccttcgtgacttgggtcagttccttctcttttgccatatcccgtcacaccagcatgatggtatggaagcttatgtgaaagtcgacagttgtcctgaggagccacagttgcgcatgaagaataatgaagaagccgaggattacgacgacgatctcaccgattctgagatggacgtggtgaggtttgatgacgacaactctccctccatcattcaagctcggagcggggcgaagaaacaccccaagacttgggtccactatatagcggcggaagaggaggattgggattacgctcctcttgtattggcaccagatgaccgctcatacaaaagccagtacctcaacaacggaccgcagagaattggccggaagtataagaaagtgcgatttatggcctatacagacgaaacctttaagacaagggaggccatccagcatgagagtgggattttgggacctcttctttacggcgaagttggtgataccctcctcatcatcttcaagaatcaagcttctcgcccctataacatttacccacacgggatcactgacgttaggcctttgtatagcagaagacttcccaaaggcgtgaagcatctcaaagacttccccattttgccaggcgagatctttaagtacaaatggaccattacagtggaagatggaccgactaaatcagaccctcgatgccttacgcggtactattcctccttcgtgaattgggagagagatttggcaagcggactcataggaccactcctcatctgttacaaggaatctgtagaccagaggggtaaccagattatgagtgataaacgcaatgtgatcctttttagcgtcttcgacgagaaccggtcctggtacttgaccgagaatatacaaaggttccttcccaaccccgcaggcgttcagttggaagaccctgagtttcaggccagcaatattatgcactcaatcaacggctatgtgtttgatagtctccagctttctgtttgcctccatgaagtagcctattggtacatcttgtcaattggtgctcaaacagacttcctctccgtcttcttctccggctacacctttaagcacaagggcgtgtatgaggacactctcacactctttccattttctggagaaaccgtgttcatgagcatggagaatccaggcctttggatcttgggttgccacaacagtgattttcgcaatcggggaatgactgctctcctcaaagtcagcagctgtaggtggaacacaggcgactattacgaagattcttacgaggacataagtgcctactttgactccaagaataacgccattgagcccagatcattctcccagaatcctcccgtgcttaaaaggcatcagcgcgaaggtaccagaactactcttcagtctgatcaagaggagattgactatgacgacaccattagcgtggaaatgaagaaggaggatttcgatatctatgacgaagatgagaaccagtctccgcggagctttcagaagaagacgcgacactacttcattgcagcagtcgaaaggctttgggactacggtatgtcatcatcccctcatgtgttgcgcaatagagctcagagtggaagtgttccacagttcaagaaagtcgtctttcaagagtttacagatggcagcttcacacagcctctctatcggggcgagcttaacgaacatttgggactccttggtccctatatccgagccgaagtggaggacaacattatggttacctttaggaatcaagcctctcgcccctacagcttctactcctccctcatcagttatgaggaggatcagagacaaggcgctgaaccacggaagaactttgtgaaaccgaatgagacgaagacctacttctggaaagtacagcaccacatggcccccacaaaagacgaattcgattgcaaagcatgggcgtatttttcagacgttgacttggagaaagatgtacattcaggacttattggtcctttgttggtgtgtcacactaacactctcaatccagcccatggcaggcaggtgacagtccaggaattcgctcttttctttaccatctttgatgagaccaagtcctggtacttcacggaaaacatggagcgcaattgcagagccccctgtaacatacagatggaggaccctacctttaaggaaaattatcggttccacgcaatcaacggatacattatggatacactccctggccttgtgatggctcaggaccaacgaatcaggtggtacctcctcagcatgggttctaatgagaacatacactccattcacttttcaggacatgtgttcactgtccggaagaaagaagagtataagatggccctctacaatttgtatccaggcgtgtttgagaccgttgaaatgcttccctctaaagctggcatctggagagtagagtgcttgatcggagaacatcttcacgcaggtatgagcaccttgttcctcgtgtacagcaacaaatgtcagaatccacttggcatggccagtggacacattcgcgactttcagatcacagcatctggccagtatggacaatgggccccaaagttggctcgcctccattactccggtagcataaatgcgtggtccactaaagaacctttcagctggattaaggtcgatcttcttgcccccatgatcatccacggcattaagacacagggagcgaggcagaaattctcctccctctacatctcacagttcattattatgtatagtttggacggcaagaagtggcaaacttatagaggtaacagtactggaacagacatggtgttcttcggcaacgttgatagctctggcatcaaacacaacatctttaatcctcccataatagctcggtacatcagattgcatccgacccactacagcattaggagtacactccgaatggagcttatgggttgcgacttgaattcctgttcaatgccactcggaatggagtctaaagccatctctgatgcacagataaccgccagtagctactttacgaacatgtttgctacgtggtcaccctctaaggcaaggcttcatttgcaaggccggtctaatgcctggagacctcaggtgaacaacccgaaagaatggctccaggtggactttcagaagaccatgaaagtaacaggtgtcactactcagggagttaagtccttggatactagcatgtatgtgaaggagttccttatttcctcatcacaagatggccaccagtggaccctcttctttcagaatggtaaggtcaaagtgtttcagggcaatcaagacagcttcacacccgtggtgaacagtcttgatcctccactcttgacacgataccttcgaatccatccacagtcttgggagcaccagattgcattgcgcatggaagtacttggatgcgaggctcaggacctctac

SEQ ID NO: 1844 - protein, 1457 aa, synthetic construct
  REGION 1..1457: note = Variant of human B-domain deleted Factor VIII
MQIELSTCFFLCLLRFCFSATRRYYLGAVELSWDYMQSDLGELPVDARFPPRVPKSFPFNTSQVYKKTLFVEFTDHLFNIAKPRPPWMGLLGPTIQAEVYDTVVITLKNMASHPVSLHAVGVSYWKASEGAEYDDQTSQREKEDDKVFPGGSHTYVWQVLKENGPMASDPPCLTYSYLSHVDLVKDLNSGLIGALLVCREGSLAKEKTQTLAKFILLFAVFDEGKSWHSETKNSLMQDRDAASARAWPKMHTVNGYVNRTLPGLIGCHRKSVYWHVIGMGTTPEVHSIFLEGHTFLVRNHRQASLGISPITFLTAQTLLRDLGQFLLFCHIPSHQHDGMEAYVKVDSCPEEPQLRMKNNEEAEDYDDDLTDSEMDVVRFDDDNSPSIIQARSGAKKHPKTWVHYIAAEEEDWDYAPLVLAPDDRSYKSQYLNNGPQRIGRKYKKVRFMAYTDETFKTREAIQHESGILGPLLYGEVGDTLLIIFKNQASRPYNIYPHGITDVRPLYSRRLPKGVKHLKDFPILPGEIFKYKWTITVEDGPTKSDPRCLTRYYSSFVNWERDLASGLIGPLLICYKESVDQRGNQIMSDKRNVILFSVFDENRSWYLTENIQRFLPNPAGVQLEDPEFQASNIMHSINGYVFDSLQLSVCLHEVAYWYILSIGAQTDFLSVFFSGYTFKHKGVYEDTLTLFPFSGETVFMSMENPGLWILGCHNSDFRNRGMTALLKVSSCRWNTGDYYEDSYEDISAYFDSKNNAIEPRSFSQNPPVLKRHQREGTRTTLQSDQEEIDYDDTISVEMKKEDFDIYDEDENQSPRSFQKKTRHYFIAAVERLWDYGMSSSPHVLRNRAQSGSVPQFKKVVFQEFTDGSFTQPLYRGELNEHLGLLGPYIRAEVEDNIMVTFRNQASRPYSFYSSLISYEEDQRQGAEPRKNFVKPNETKTYFWKVQHHMAPTKDEFDCKAWAYFSDVDLEKDVHSGLIGPLLVCHTNTLNPAHGRQVTVQEFALFFTIFDETKSWYFTENMERNCRAPCNIQMEDPTFKENYRFHAINGYIMDTLPGLVMAQDQRIRWYLLSMGSNENIHSIHFSGHVFTVRKKEEYKMALYNLYPGVFETVEMLPSKAGIWRVECLIGEHLHAGMSTLFLVYSNKCQNPLGMASGHIRDFQITASGQYGQWAPKLARLHYSGSINAWSTKEPFSWIKVDLLAPMIIHGIKTQGARQKFSSLYISQFIIMYSLDGKKWQTYRGNSTGTDMVFFGNVDSSGIKHNIFNPPIIARYIRLHPTHYSIRSTLRMELMGCDLNSCSMPLGMESKAISDAQITASSYFTNMFATWSPSKARLHLQGRSNAWRPQVNNPKEWLQVDFQKTMKVTGVTTQGVKSLDTSMYVKEFLISSSQDGHQWTLFFQNGKVKVFQGNQDSFTPVVNSLDPPLLTRYLRIHPQSWEHQIALRMEVLGCEAQDLY

SEQ ID NO: 1845 - DNA, 4371 bp, synthetic construct
  misc_feature 1..4371: note = Variant of human B-domain deleted Factor VIII
  source 1..4371: mol_type = other DNA
atgcagattgaactgtctacctgcttcttcctctgtttgctgaggttctgctttagcgccactagacggtactaccttggcgctgtggagctgtcctgggactatatgcagagtgatttgggagagcttcccgtcgacgcacgatttcctcctcgcgttccaaagtcatttccctttaacacaagccaggtgtacaagaagacgctcttcgtcgaattcaccgatcacctgttcaatatcgccaaacccagaccaccatggatgggtcttttggggcctaccatacaagcggaggtgtatgacacagttgttatcactctcaagaacatggcttctcatccggtaagtcttcacgcagtgggcgtgtcctactggaaagcttcagaaggagccgagtatgatgatcagacatcccagagggagaaagaagacgacaaggtatttccaggtgggtctcatacctatgtgtggcaagtgctcaaagagaatggccctatggcaagcgatccgccgtgtttgacttacagctacctttcacacgttgacctcgtcaaggacctcaactccgggttgattggagccttgttggtatgcagggaaggatctcttgccaaagagaagacacagaccctggccaagtttatccttctctttgctgtgttcgatgagggcaaaagttggcatagcgaaacgaagaattccctcatgcaggatcgcgacgcagccagcgccagagcttggcccaagatgcacactgtgaacggatatgtcaataggacgcttcctggcttgattgggtgtcatcggaaaagtgtctactggcacgtgatcggaatggggacaacaccagaggtccactccatatttctcgaaggccataccttccttgttcgaaaccacagacaggcatccttggggatctctcccattacctttctcactgcccaaacgctccttcgtgacttgggtcagttccttctcttttgccatatcccgtcacaccagcatgatggtatggaagcttatgtgaaagtcgacagttgtcctgaggagccacagttgcgcatgaagaataatgaagaagccgaggattacgacgacgatctcaccgattctgagatggacgtggtgaggtttgatgacgacaactctccctccatcattcaagctcggagcggggcgaagaaacaccccaagacttgggtccactatatagcggcggaagaggaggattgggattacgctcctcttgtattggcaccagatgaccgctcatacaaaagccagtacctcaacaacggaccgcagagaattggccggaagtataagaaagtgcgatttatggcctatacagacgaaacctttaagacaagggaggccatccagcatgagagtgggattttgggacctcttctttacggcgaagttggtgataccctcctcatcatcttcaagaatcaagcttctcgcccctataacatttacccacacgggatcactgacgttaggcctttgtatagcagaagacttcccaaaggcgtgaagcatctcaaagacttccccattttgccaggcgagatctttaagtacaaatggaccattacagtggaagatggaccgactaaatcagaccctcgatgccttacgcggtactattcctccttcgtgaattgggagagagatttggcaagcggactcataggaccactcctcatctgttacaaggaatctgtagaccagaggggtaaccagattatgagtgataaacgcaatgtgatcctttttagcgtcttcgacgagaaccggtcctggtacttgaccgagaatatacaaaggttccttcccaaccccgcaggcgttcagttggaagaccctgagtttcaggccagcaatattatgcactcaatcaacggctatgtgtttgatagtctccagctttctgtttgcctccatgaagtagcctattggtacatcttgtcaattggtgctcaaacagacttcctctccgtcttcttctccggctacacctttaagcacaagggcgtgtatgaggactggctcacactctttccattttctggagaaaccgtgttcatgagcatggagaatccaggcctttggatcttgggttgccacaacagtgattttcgcaatcggggaatgactgctctcctcaaagtcagcagctgtgattggaacacaggcgactattacgaagattcttacgaggacataagtgcctactttgactccaagaataacgccattgagcccagatcattctcccagaatcctcccgtgcttaaaaggcatcagcgcgaaggtaccagaactactcttcagtctgatcaagaggagattgactatgacgacaccattagcgtggaaatgaagaaggaggatttcgatatctatgacgaagatgagaaccagtctccgcggagctttcagaagaagacgcgacactacttcattgcagcagtcgaaaggctttgggactacggtatgtcatcatcccctcatgtgttgcgcaatagagctcagagtggaagtgttccacagttcaagaaagtcgtctttcaagagtttacagatggcagcttcacacagcctctctatcggggcgagcttaacgaacatttgggactccttggtccctatatccgagccgaagtggaggacaacattatggttacctttaggaatcaagcctctcgcccctacagcttctactcctccctcatcagttatgaggaggatcagagacaaggcgctgaaccacggaagaactttgtgaaaccgaatgagacgaagacctacttctggaaagtacagcaccacatggcccccacaaaagacgaattcgattgcaaagcatgggcgtatttttcagacgttgacttggagaaagatgtacattcaggacttattggtcctttgttggtgtgtcacactaacactctcaatccagcccatggcaggcaggtgacagtccaggaattcgctcttttctttaccatctttgatgagaccaagtcctggtacttcacggaaaacatggagcgcaattgcagagccccctgtaacatacagatggaggaccctacctttaaggaaaattatcggttccacgcaatcaacggatacattatggatacactccctggccttgtgatggctcaggaccaacgaatcaggtggtacctcctcagcatgggttctaatgagaacatacactccattcacttttcaggacatgtgttcactgtccggaagaaagaagagtataagatggccctctacaatttgtatccaggcgtgtttgagaccgttgaaatgcttccctctaaagctggcatctggagagtagagtgcttgatcggagaacatcttcacgcaggtatgagcaccttgttcctcgtgtacagcaacaaatgtcagaatccacttggcatggccagtggacacattcgcgactttcagatcacagcatctggccagtatggacaatgggccccaaagttggctcgcctccattactccggtagcataaatgcgtggtccactaaagaacctttcagctggattaaggtcgatcttcttgcccccatgatcatccacggcattaagacacagggagcgaggcagaaattctcctccctctacatctcacagttcattattatgtatagtttggacggcaagaagtggcaaacttatagaggtaacagtactggaacagacatggtgttcttcggcaacgttgatagctctggcatcaaacacaacatctttaatcctcccataatagctcggtacatcagattgcatccgacccactacagcattaggagtacactccgaatggagcttatgggttgcgacttgaattcctgttcaatgccactcggaatggagtctaaagccatctctgatgcacagataaccgccagtagctactttacgaacatgtttgctacgtggtcaccctctaaggcaaggcttcatttgcaaggccggtctaatgcctggagacctcaggtgaacaacccgaaagaatggctccaggtggactttcagaagaccatgaaagtaacaggtgtcactactcagggagttaagtccttggatactagcatgtatgtgaaggagttccttatttcctcatcacaagatggccaccagtggaccctcttctttcagaatggtaaggtcaaagtgtttcagggcaatcaagacagcttcacacccgtggtgaacagtcttgatcctccactcttgacacgataccttcgaatccatccacagtcttgggagcaccagattgcattgcgcatggaagtacttggatgcgaggctcaggacctctac

SEQ ID NO: 1846 - protein, 1457 aa, synthetic construct
  REGION 1..1457: note = Variant of human B-domain deleted Factor VIII
MQIELSTCFFLCLLRFCFSATRRYYLGAVELSWDYMQSDLGELPVDARFPPRVPKSFPFNTSQVYKKTLFVEFTDHLFNIAKPRPPWMGLLGPTIQAEVYDTVVITLKNMASHPVSLHAVGVSYWKASEGAEYDDQTSQREKEDDKVFPGGSHTYVWQVLKENGPMASDPPCLTYSYLSHVDLVKDLNSGLIGALLVCREGSLAKEKTQTLAKFILLFAVFDEGKSWHSETKNSLMQDRDAASARAWPKMHTVNGYVNRTLPGLIGCHRKSVYWHVIGMGTTPEVHSIFLEGHTFLVRNHRQASLGISPITFLTAQTLLRDLGQFLLFCHIPSHQHDGMEAYVKVDSCPEEPQLRMKNNEEAEDYDDDLTDSEMDVVRFDDDNSPSIIQARSGAKKHPKTWVHYIAAEEEDWDYAPLVLAPDDRSYKSQYLNNGPQRIGRKYKKVRFMAYTDETFKTREAIQHESGILGPLLYGEVGDTLLIIFKNQASRPYNIYPHGITDVRPLYSRRLPKGVKHLKDFPILPGEIFKYKWTITVEDGPTKSDPRCLTRYYSSFVNWERDLASGLIGPLLICYKESVDQRGNQIMSDKRNVILFSVFDENRSWYLTENIQRFLPNPAGVQLEDPEFQASNIMHSINGYVFDSLQLSVCLHEVAYWYILSIGAQTDFLSVFFSGYTFKHKGVYEDWLTLFPFSGETVFMSMENPGLWILGCHNSDFRNRGMTALLKVSSCDWNTGDYYEDSYEDISAYFDSKNNAIEPRSFSQNPPVLKRHQREGTRTTLQSDQEEIDYDDTISVEMKKEDFDIYDEDENQSPRSFQKKTRHYFIAAVERLWDYGMSSSPHVLRNRAQSGSVPQFKKVVFQEFTDGSFTQPLYRGELNEHLGLLGPYIRAEVEDNIMVTFRNQASRPYSFYSSLISYEEDQRQGAEPRKNFVKPNETKTYFWKVQHHMAPTKDEFDCKAWAYFSDVDLEKDVHSGLIGPLLVCHTNTLNPAHGRQVTVQEFALFFTIFDETKSWYFTENMERNCRAPCNIQMEDPTFKENYRFHAINGYIMDTLPGLVMAQDQRIRWYLLSMGSNENIHSIHFSGHVFTVRKKEEYKMALYNLYPGVFETVEMLPSKAGIWRVECLIGEHLHAGMSTLFLVYSNKCQNPLGMASGHIRDFQITASGQYGQWAPKLARLHYSGSINAWSTKEPFSWIKVDLLAPMIIHGIKTQGARQKFSSLYISQFIIMYSLDGKKWQTYRGNSTGTDMVFFGNVDSSGIKHNIFNPPIIARYIRLHPTHYSIRSTLRMELMGCDLNSCSMPLGMESKAISDAQITASSYFTNMFATWSPSKARLHLQGRSNAWRPQVNNPKEWLQVDFQKTMKVTGVTTQGVKSLDTSMYVKEFLISSSQDGHQWTLFFQNGKVKVFQGNQDSFTPVVNSLDPPLLTRYLRIHPQSWEHQIALRMEVLGCEAQDLY

SEQ ID NO: 1847 - DNA, 4371 bp, synthetic construct
  misc_feature 1..4371: note = Variant of human B-domain deleted Factor VIII
  source 1..4371: mol_type = other DNA
atgcagattgaactgtctacctgcttcttcctctgtttgctgaggttctgctttagcgccactagacggtactaccttggcgctgtggagctgtcctgggactatatgcagagtgatttgggagagcttcccgtcgacgcacgatttcctcctcgcgttccaaagtcatttccctttaacacaagccaggtgtacaagaagacgctcttcgtcgaattcaccgatcacctgttcaatatcgccaaacccagaccaccatggatgggtcttttggggcctaccatacaagcggaggtgtatgacacagttgttatcactctcaagaacatggcttctcatccggtaagtcttcacgcagtgggcgtgtcctactggaaagcttcagaaggagccgagtatgatgatcagacatcccagagggagaaagaagacgacaaggtatttccaggtgggtctcatacctatgtgtggcaagtgctcaaagagaatggccctatggcaagcgatccgccgtgtttgacttacagctacctttcacacgttgacctcgtcaaggacctcaactccgggttgattggagccttgttggtatgcagggaaggatctcttgccaaagagaagacacagaccctggccaagtttatccttctctttgctgtgttcgatgagggcaaaagttggcatagcgaaacgaagaattccctcatgcaggatcgcgacgcagccagcgccagagcttggcccaagatgcacactgtgaacggatatgtcaataggacgcttcctggcttgattgggtgtcatcggaaaagtgtctactggcacgtgatcggaatggggacaacaccagaggtccactccatatttctcgaaggccataccttccttgttcgaaaccacagacaggcatccttggggatctctcccattacctttctcactgcccaaacgctccttcgtgacttgggtcagttccttctcttttgccatatcccgtcacaccagcatgatggtatggaagcttatgtgaaagtcgacagttgtcctgaggagccacagttgcgcatgaagaataatgaagaagccgaggattacgacgacgatctcaccgattctgagatggacgtggtgaggtttgatgacgacaactctccctccatcattcaagctcggagcggggcgaagaaacaccccaagacttgggtccactatatagcggcggaagaggaggattgggattacgctcctcttgtattggcaccagatgaccgctcatacaaaagccagtacctcaacaacggaccgcagagaattggccggaagtataagaaagtgcgatttatggcctatacagacgaaacctttaagacaagggaggccatccagcatgagagtgggattttgggacctcttctttacggcgaagttggtgataccctcctcatcatcttcaagaatcaagcttctcgcccctataacatttacccacacgggatcactgacgttaggcctttgtatagcagaagacttcccaaaggcgtgaagcatctcaaagacttccccattttgccaggcgagatctttaagtacaaatggaccattacagtggaagatggaccgactaaaccggaccctcgatgccttacgcggtactattcctccttcgtgaattgggagagagatttggcaagcggactcataggaccactcctcatctgttacaaggaatctgtagaccagaggggtaaccagattatgagtgataaacgcaatgtgatcctttttagcgtcttcgacgagaaccggtcctggtacttgaccgagaatatacaaaggttccttcccaaccccgcaggcgttcagttggaagaccctgagtttcaggccagcaatattatgcactcaatcaacggctatgtgtttgatagtctccagctttctgtttgcctccatgaagtagcctattggtacatcttgtcaattggtgctcaaacagacttcctctccgtcttcttctccggctacacctttaagcacaagggcgtgtatgaggacactctcacactctttccattttctggagaaaccgtgttcatgagcatggagaatccaggcctttggatcttgggttgccacaacagtgattttcgcaatcggggaatgactgctctcctcaaagtcagcagctgtgattggaacacaggcgactattacgaagattcttacgaggacataagtgcctactttgactccaagaataacgccattgagcccagatcattctcccagaatcctcccgtgcttaaaaggcatcagcgcgaaggtaccagaactactcttcagtctgatcaagaggagattgactatgacgacaccattagcgtggaaatgaagaaggaggatttcgatatctatgacgaagatgagaaccagtctccgcggagctttcagaagaagacgcgacactacttcattgcagcagtcgaaaggctttgggactacggtatgtcatcatcccctcatgtgttgcgcaatagagctcagagtggaagtgttccacagttcaagaaagtcgtctttcaagagtttacagatggcagcttcacacagcctctctatcggggcgagcttaacgaacatttgggactccttggtccctatatccgagccgaagtggaggacaacattatggttacctttaggaatcaagcctctcgcccctacagcttctactcctccctcatcagttatgaggaggatcagagacaaggcgctgaaccacggaagaactttgtgaaaccgaatgagacgaagacctacttctggaaagtacagcaccacatggcccccacaaaagacgaattcgattgcaaagcatgggcgtatttttcagacgttgacttggagaaagatgtacattcaggacttattggtcctttgttggtgtgtcacactaacactctcaatccagcccatggcaggcaggtgacagtccaggaattcgctcttttctttaccatctttgatgagaccaagtcctggtacttcacggaaaacatggagcgcaattgcagagccccctgtaacatacagatggaggaccctacctttaaggaaaattatcggttccacgcaatcaacggatacattatggatacactccctggccttgtgatggctcaggaccaacgaatcaggtggtacctcctcagcatgggttctaatgagaacatacactccattcacttttcaggacatgtgttcactgtccggaagaaagaagagtataagatggccctctacaatttgtatccaggcgtgtttgagaccgttgaaatgcttccctctaaagctggcatctggagagtagagtgcttgatcggagaacatcttcacgcaggtatgagcaccttgttcctcgtgtacagcaacaaatgtcagaatccacttggcatggccagtggacacattcgcgactttcagatcacagcatctggccagtatggacaatgggccccaaagttggctcgcctccattactccggtagcataaatgcgtggtccactaaagaacctttcagctggattaaggtcgatcttcttgcccccatgatcatccacggcattaagacacagggagcgaggcagaaattctcctccctctacatctcacagttcattattatgtatagtttggacggcaagaagtggcaaacttatagaggtaacagtactggaacagacatggtgttcttcggcaacgttgatagctctggcatcaaacacaacatctttaatcctcccataatagctcggtacatcagattgcatccgacccactacagcattaggagtacactccgaatggagcttatgggttgcgacttgaattcctgttcaatgccactcggaatggagtctaaagccatctctgatgcacagataaccgccagtagctactttacgaacatgtttgctacgtggtcaccctctaaggcaaggcttcatttgcaaggccggtctaatgcctggagacctcaggtgaacaacccgaaagaatggctccaggtggactttcagaagaccatgaaagtaacaggtgtcactactcagggagttaagtccttggatactagcatgtatgtgaaggagttccttatttcctcatcacaagatggccaccagtggaccctcttctttcagaatggtaaggtcaaagtgtttcagggcaatcaagacagcttcacacccgtggtgaacagtcttgatcctccactcttgacacgataccttcgaatccatccacagtcttgggagcaccagattgcattgcgcatggaagtacttggatgcgaggctcaggacctctac

SEQ ID NO: 1848 - protein, 1457 aa, synthetic construct
  REGION 1..1457: note = Variant of human B-domain deleted Factor VIII
MQIELSTCFFLCLLRFCFSATRRYYLGAVELSWDYMQSDLGELPVDARFPPRVPKSFPFNTSQVYKKTLFVEFTDHLFNIAKPRPPWMGLLGPTIQAEVYDTVVITLKNMASHPVSLHAVGVSYWKASEGAEYDDQTSQREKEDDKVFPGGSHTYVWQVLKENGPMASDPPCLTYSYLSHVDLVKDLNSGLIGALLVCREGSLAKEKTQTLAKFILLFAVFDEGKSWHSETKNSLMQDRDAASARAWPKMHTVNGYVNRTLPGLIGCHRKSVYWHVIGMGTTPEVHSIFLEGHTFLVRNHRQASLGISPITFLTAQTLLRDLGQFLLFCHIPSHQHDGMEAYVKVDSCPEEPQLRMKNNEEAEDYDDDLTDSEMDVVRFDDDNSPSIIQARSGAKKHPKTWVHYIAAEEEDWDYAPLVLAPDDRSYKSQYLNNGPQRIGRKYKKVRFMAYTDETFKTREAIQHESGILGPLLYGEVGDTLLIIFKNQASRPYNIYPHGITDVRPLYSRRLPKGVKHLKDFPILPGEIFKYKWTITVEDGPTKPDPRCLTRYYSSFVNWERDLASGLIGPLLICYKESVDQRGNQIMSDKRNVILFSVFDENRSWYLTENIQRFLPNPAGVQLEDPEFQASNIMHSINGYVFDSLQLSVCLHEVAYWYILSIGAQTDFLSVFFSGYTFKHKGVYEDTLTLFPFSGETVFMSMENPGLWILGCHNSDFRNRGMTALLKVSSCDWNTGDYYEDSYEDISAYFDSKNNAIEPRSFSQNPPVLKRHQREGTRTTLQSDQEEIDYDDTISVEMKKEDFDIYDEDENQSPRSFQKKTRHYFIAAVERLWDYGMSSSPHVLRNRAQSGSVPQFKKVVFQEFTDGSFTQPLYRGELNEHLGLLGPYIRAEVEDNIMVTFRNQASRPYSFYSSLISYEEDQRQGAEPRKNFVKPNETKTYFWKVQHHMAPTKDEFDCKAWAYFSDVDLEKDVHSGLIGPLLVCHTNTLNPAHGRQVTVQEFALFFTIFDETKSWYFTENMERNCRAPCNIQMEDPTFKENYRFHAINGYIMDTLPGLVMAQDQRIRWYLLSMGSNENIHSIHFSGHVFTVRKKEEYKMALYNLYPGVFETVEMLPSKAGIWRVECLIGEHLHAGMSTLFLVYSNKCQNPLGMASGHIRDFQITASGQYGQWAPKLARLHYSGSINAWSTKEPFSWIKVDLLAPMIIHGIKTQGARQKFSSLYISQFIIMYSLDGKKWQTYRGNSTGTDMVFFGNVDSSGIKHNIFNPPIIARYIRLHPTHYSIRSTLRMELMGCDLNSCSMPLGMESKAISDAQITASSYFTNMFATWSPSKARLHLQGRSNAWRPQVNNPKEWLQVDFQKTMKVTGVTTQGVKSLDTSMYVKEFLISSSQDGHQWTLFFQNGKVKVFQGNQDSFTPVVNSLDPPLLTRYLRIHPQSWEHQIALRMEVLGCEAQDLY

SEQ ID NO: 1849 - DNA, 4371 bp, synthetic construct
  misc_feature 1..4371: note = Variant of human B-domain deleted Factor VIII
  source 1..4371: mol_type = other DNA
atgcagattgaactgtctacctgcttcttcctctgtttgctgaggttctgctttagcgccactagacggtactaccttggcgctgtggagctgtcctgggactatatgcagagtgatttgggagagcttcccgtcgacgcacgatttcctcctcgcgttccaaagtcatttccctttaacacaagccaggtgtacaagaagacgctcttcgtcgaattcaccgatcacctgttcaatatcgccaaacccagaccaccatggatgggtcttttggggcctaccatacaagcggaggtgtatgacacagttgttatcactctcaagaacatggcttctcatccggtaagtcttcacgcagtgggcgtgtcctactggaaagcttcagaaggagccgagtatgatgatcagacatcccagagggagaaagaagacgacaaggtatttccaggtgggtctcatacctatgtgtggcaagtgctcaaagagaatggccctatggcaagcgatccgccgtgtttgacttacagctacctttcacacgttgacctcgtcaaggacctcaactccgggttgattggagccttgttggtatgcagggaaggatctcttgccaaagagaagacacagaccctggccaagtttatccttctctttgctgtgttcgatgagggcaaaagttggcatagcgaaacgaagaattccctcatgcaggatcgcgacgcagccagcgccagagcttggcccaagatgcacactgtgaacggatatgtcaataggacgcttcctggcttgattgggtgtcatcggaaaagtgtctactggcacgtgatcggaatggggacaacaccagaggtccactccatatttctcgaaggccataccttccttgttcgaaaccacagacaggcatccttggggatctctcccattacctttctcactgcccaaacgctccttcgtgacttgggtcagttccttctcttttgccatatcccgtcacaccagcatgatggtatggaagcttatgtgaaagtcgacagttgtcctgaggagccacagttgcgcatgaagaataatgaagaagccgaggattacgacgacgatctcaccgattctgagatggacgtggtgaggtttgatgacgacaactctccctccatcattcaagctcggagcggggcgaagaaacaccccaagacttgggtccactatatagcggcggaagaggaggattgggattacgctcctcttgtattggcaccagatgaccgctcatacaaaagccagtacctcaacaacggaccgcagagaattggccggaagtataagaaagtgcgatttatggcctatacagacgaaacctttaagacaagggaggccatccagcatgagagtgggattttgggacctcttctttacggcgaagttggtgataccctcctcatcatcttcaagaatcaagcttctcgcccctataacatttacccacacgggatcactgacgttaggcctttgtatagcagaagacttcccaaaggcgtgaagcatctcaaagacttccccattttgccaggcgagatctttaagtacaaatggaccattacagtggaagatggaccgactaaatcagaccctcgatgccttacgcggtactattcctccttcgtgaattgggagagagatttggcaagcggactcataggaccactcctcatctgttacaaggaatctgtagaccagaggggtaaccagattatgagtgataaacgcaatgtgatcctttttagcgtcttcgacgagaaccggtcctggtacttgaccgagaatatacaaaggttccttcccaaccccgcaggcgttcagttggaagaccctgagtttcaggccagcaatattatgcactcaatcaacggctatgtgtttgatagtctccagctttctgtttgcctccatgaagtagcctattggtacatcttgtcaattggtgctcaaacagacttcctctccgtcttcttctccggctacacctttaagcacaagggcgtgtatgaggacactctcacactctttccattttctggagaaaccgtgttcatgagcatggagaatccaggcctttggatcttgggttgccacaacagtgattttcgcaatcggggaatgactgctctcctcaaagtcagcagctgtgattggaacacaggcgggtattacgaagattcttacgaggacataagtgcctactttgactccaagaataacgccattgagcccagatcattctcccagaatcctcccgtgcttaaaaggcatcagcgcgaaggtaccagaactactcttcagtctgatcaagaggagattgactatgacgacaccattagcgtggaaatgaagaaggaggatttcgatatctatgacgaagatgagaaccagtctccgcggagctttcagaagaagacgcgacactacttcattgcagcagtcgaaaggctttgggactacggtatgtcatcatcccctcatgtgttgcgcaatagagctcagagtggaagtgttccacagttcaagaaagtcgtctttcaagagtttacagatggcagcttcacacagcctctctatcggggcgagcttaacgaacatttgggactccttggtccctatatccgagccgaagtggaggacaacattatggttacctttaggaatcaagcctctcgcccctacagcttctactcctccctcatcagttatgaggaggatcagagacaaggcgctgaaccacggaagaactttgtgaaaccgaatgagacgaagacctacttctggaaagtacagcaccacatggcccccacaaaagacgaattcgattgcaaagcatgggcgtatttttcagacgttgacttggagaaagatgtacattcaggacttattggtcctttgttggtgtgtcacactaacactctcaatccagcccatggcaggcaggtgacagtccaggaattcgctcttttctttaccatctttgatgagaccaagtcctggtacttcacggaaaacatggagcgcaattgcagagccccctgtaacatacagatggaggaccctacctttaaggaaaattatcggttccacgcaatcaacggatacattatggatacactccctggccttgtgatggctcaggaccaacgaatcaggtggtacctcctcagcatgggttctaatgagaacatacactccattcacttttcaggacatgtgttcactgtccggaagaaagaagagtataagatggccctctacaatttgtatccaggcgtgtttgagaccgttgaaatgcttccctctaaagctggcatctggagagtagagtgcttgatcggagaacatcttcacgcaggtatgagcaccttgttcctcgtgtacagcaacaaatgtcagaatccacttggcatggccagtggacacattcgcgactttcagatcacagcatctggccagtatggacaatgggccccaaagttggctcgcctccattactccggtagcataaatgcgtggtccactaaagaacctttcagctggattaaggtcgatcttcttgcccccatgatcatccacggcattaagacacagggagcgaggcagaaattctcctccctctacatctcacagttcattattatgtatagtttggacggcaagaagtggcaaacttatagaggtaacagtactggaacagacatggtgttcttcggcaacgttgatagctctggcatcaaacacaacatctttaatcctcccataatagctcggtacatcagattgcatccgacccactacagcattaggagtacactccgaatggagcttatgggttgcgacttgaattcctgttcaatgccactcggaatggagtctaaagccatctctgatgcacagataaccgccagtagctactttacgaacatgtttgctacgtggtcaccctctaaggcaaggcttcatttgcaaggccggtctaatgcctggagacctcaggtgaacaacccgaaagaatggctccaggtggactttcagaagaccatgaaagtaacaggtgtcactactcagggagttaagtccttggatactagcatgtatgtgaaggagttccttatttcctcatcacaagatggccaccagtggaccctcttctttcagaatggtaaggtcaaagtgtttcagggcaatcaagacagcttcacacccgtggtgaacagtcttgatcctccactcttgacacgataccttcgaatccatccacagtcttgggagcaccagattgcattgcgcatggaagtacttggatgcgaggctcaggacctctac

SEQ ID NO: 1850 - protein, 1457 aa, synthetic construct
  REGION 1..1457: note = Variant of human B-domain deleted Factor VIII
MQIELSTCFFLCLLRFCFSATRRYYLGAVELSWDYMQSDLGELPVDARFPPRVPKSFPFNTSQVYKKTLFVEFTDHLFNIAKPRPPWMGLLGPTIQAEVYDTVVITLKNMASHPVSLHAVGVSYWKASEGAEYDDQTSQREKEDDKVFPGGSHTYVWQVLKENGPMASDPPCLTYSYLSHVDLVKDLNSGLIGALLVCREGSLAKEKTQTLAKFILLFAVFDEGKSWHSETKNSLMQDRDAASARAWPKMHTVNGYVNRTLPGLIGCHRKSVYWHVIGMGTTPEVHSIFLEGHTFLVRNHRQASLGISPITFLTAQTLLRDLGQFLLFCHIPSHQHDGMEAYVKVDSCPEEPQLRMKNNEEAEDYDDDLTDSEMDVVRFDDDNSPSIIQARSGAKKHPKTWVHYIAAEEEDWDYAPLVLAPDDRSYKSQYLNNGPQRIGRKYKKVRFMAYTDETFKTREAIQHESGILGPLLYGEVGDTLLIIFKNQASRPYNIYPHGITDVRPLYSRRLPKGVKHLKDFPILPGEIFKYKWTITVEDGPTKSDPRCLTRYYSSFVNWERDLASGLIGPLLICYKESVDQRGNQIMSDKRNVILFSVFDENRSWYLTENIQRFLPNPAGVQLEDPEFQASNIMHSINGYVFDSLQLSVCLHEVAYWYILSIGAQTDFLSVFFSGYTFKHKGVYEDTLTLFPFSGETVFMSMENPGLWILGCHNSDFRNRGMTALLKVSSCDWNTGGYYEDSYEDISAYFDSKNNAIEPRSFSQNPPVLKRHQREGTRTTLQSDQEEIDYDDTISVEMKKEDFDIYDEDENQSPRSFQKKTRHYFIAAVERLWDYGMSSSPHVLRNRAQSGSVPQFKKVVFQEFTDGSFTQPLYRGELNEHLGLLGPYIRAEVEDNIMVTFRNQASRPYSFYSSLISYEEDQRQGAEPRKNFVKPNETKTYFWKVQHHMAPTKDEFDCKAWAYFSDVDLEKDVHSGLIGPLLVCHTNTLNPAHGRQVTVQEFALFFTIFDETKSWYFTENMERNCRAPCNIQMEDPTFKENYRFHAINGYIMDTLPGLVMAQDQRIRWYLLSMGSNENIHSIHFSGHVFTVRKKEEYKMALYNLYPGVFETVEMLPSKAGIWRVECLIGEHLHAGMSTLFLVYSNKCQNPLGMASGHIRDFQITASGQYGQWAPKLARLHYSGSINAWSTKEPFSWIKVDLLAPMIIHGIKTQGARQKFSSLYISQFIIMYSLDGKKWQTYRGNSTGTDMVFFGNVDSSGIKHNIFNPPIIARYIRLHPTHYSIRSTLRMELMGCDLNSCSMPLGMESKAISDAQITASSYFTNMFATWSPSKARLHLQGRSNAWRPQVNNPKEWLQVDFQKTMKVTGVTTQGVKSLDTSMYVKEFLISSSQDGHQWTLFFQNGKVKVFQGNQDSFTPVVNSLDPPLLTRYLRIHPQSWEHQIALRMEVLGCEAQDLY

SEQ ID NO: 1851 - DNA, 4371 bp, synthetic construct
  misc_feature 1..4371: note = Variant of human B-domain deleted Factor VIII
  source 1..4371: mol_type = other DNA
atgcagattgaactgtctacctgcttcttcctctgtttgctgaggttctgctttagcgccactagacggtactaccttggcgctgtggagctgtcctgggactatatgcagagtgatttgggagagcttcccgtcgacgcacgatttcctcctcgcgttccaaagtcatttccctttaacacaagccaggtgtacaagaagacgctcttcgtcgaattcaccgatcacctgttcaatatcgccaaacccagaccaccatggatgggtcttttggggcctaccatacaagcggaggtgtatgacacagttgttatcactctcaagaacatggcttctcatccggtaagtcttcacgcagtgggcgtgtcctactggaaagcttcagaaggagccgagtatgatgatcagacatcccagagggagaaagaagacgacaaggtatttccaggtgggtctcatacctatgtgtggcaagtgctcaaagagaatggccctatggcaagcgatccgccgtgtttgacttacagctacctttcacacgttgacctcgtcaaggacctcaactccgggttgattggagccttgttggtatgcagggaaggatctcttgccaaagagaagacacagaccctggccaagtttatccttctctttgctgtgttcgatgagggcaaaagttggcatagcgaaacgaagaattccctcatgcaggatcgcgacgcagccagcgccagagcttggcccaagatgcacactgtgaacggatatgtcaataggacgcttcctggcttgattgggtgtcatcggaaaagtgtctactggcacgtgatcggaatggggacaacaccagaggtccactccatatttctcgaaggccataccttccttgttcgaaaccacagacaggcatccttggggatctctcccattacctttctcactgcccaaacgctccttcgtgacttgggtcagttccttctcttttgccatatcccgtcacaccagcatgatggtatggaagcttatgtgaaagtcgacagttgtcctgaggagccacagttgcgcatgaagaataatgaagaagccgaggattacgacgacgatctcaccgattctgagatggacgtggtgaggtttgatgacgacaactctccctccatcattcaagctcggagcggggcgaagaaacaccccaagacttgggtccactatatagcggcggaagaggaggattgggattacgctcctcttgtattggcaccagatgaccgctcatacaaaagccagtacctcaacaacggaccgcagagaattggccggaagtataagaaagtgcgatttatggcctatacagacgaaacctttaagacaagggaggccatccagcatgagagtgggattttgggacctcttctttacggcgaagttggtgataccctcctcatcatcttcaagaatcaagcttctcgcccctataacatttacccacacgggatcactgacgttaggcctttgtatagcagaagacttcccaaaggcgtgaagcatctcaaagacttccccattttgccaggcgagatctttaagtacaaatggaccattacagtggaagatggaccgactaaatcagaccctcgatgccttacgcggtactattcctccttcgtgaattgggagagagatttggcaagcggactcataggaccactcctcatctgttacaaggaatctgtagaccagaggggtaaccagattatgagtgataaacgcaatgtgatcctttttagcgtcttcgacgagaaccggtcctggtacttgaccgagaatatacaaaggttccttcccaaccccgcaggcgttcagttggaagaccctgagtttcaggccagcaatattatgcactcaatcaacggctatgtgtttgatagtctccagctttctgtttgcctccatgaagtagcctattggtacatcttgtcaattggtgctcaaacagacttcctctccgtcttcttctccggctacacctttaagcacaagggcgtgtatgaggacactctcacactctttccattttctggagaaaccgtgttcatgagcatggagaatccaggcctttggatcttgggttgccacaacagtgattttcgcaatcggggaatgactgctctcctcaaagtcagcagctgtgattggaacacaggcgactattacgaagattcttacgaggacataagtgcctactttgactccaagaataacgccattgagcccagatcattctcccagaatcctcccgtgcttaaaaggcatcagcgcgaaggtaccagaactactcttcagtctgatcaagaggagattgactatgacgacaccattagcgtggaaatgaagaaggaggatttcgatatctatgacgaagatgagaaccagtctccgcggagctttcagaagaagacgcgacactacttcattgcagcagtcgaaaggctttgggactacggtatgtcatcatcccctcatgtgttgcgcaatagagctcagagtggaagtgttccacagttcaagaaagtcgtctttcaagagtttacagatggcagcttcacacagcctctctatcggggcgagcttaacgaacatttgggactccttggtccctatatccgagccgaagtggaggacaacattatggttacctttaggaatcaagcctctcgcccctacagcttctactcctccctcatcagttatgaggaggatcagagacaaggcgctgaaccacggaagaactttgtgaaaccgaatgagacgaagacctacttctggaaagtacagcaccacatggcccccacaaaagacgaattcgattgcaaagcatgggcgtatttttcagacgttgacttggagaaagatgtacattcaggacttattggtcctttgttggtgtgtcacactaacactctcaatccagcccatggcaggcaggtgacagtccaggaattcgctcttttctttaccatctttgatgagaccaagtcctggtacttcacggaaaacatggagcgcaattgcagagccccctgtaacatacagatggaggaccctacctttaaggaaaattatcggttccacgcaatcaacggatacattatggatacactccctggccttgtgatggctcaggaccaacgaatcaggtggtacctcctcagcatgggttctaatgagaacatacactccattcacttttcaggacatgtgttcactgtccggaagaaagaagagtataagatggccctctacaatttgtatccaggcgtgtttgagaccgttgaaatgcttccctctaaagctggcatctggagagtagagtgcttgatcggacctcatcttcacgcaggtatgagcaccttgttcctcgtgtacagcaacaaatgtcagaatccacttggcatggccagtggacacattcgcgactttcagatcacagcatctggccagtatggacaatgggccccaaagttggctcgcctccattactccggtagcataaatgcgtggtccactaaagaacctttcagctggattaaggtcgatcttcttgcccccatgatcatccacggcattaagacacagggagcgaggcagaaattctcctccctctacatctcacagttcattattatgtatagtttggacggcaagaagtggcaaacttatagaggtaacagtactggaacagacatggtgttcttcggcaacgttgatagctctggcatcaaacacaacatctttaatcctcccataatagctcggtacatcagattgcatccgacccactacagcattaggagtacactccgaatggagcttatgggttgcgacttgaattcctgttcaatgccactcggaatggagtctaaagccatctctgatgcacagataaccgccagtagctactttacgaacatgtttgctacgtggtcaccctctaaggcaaggcttcatttgcaaggccggtctaatgcctggagacctcaggtgaacaacccgaaagaatggctccaggtggactttcagaagaccatgaaagtaacaggtgtcactactcagggagttaagtccttggatactagcatgtatgtgaaggagttccttatttcctcatcacaagatggccaccagtggaccctcttctttcagaatggtaaggtcaaagtgtttcagggcaatcaagacagcttcacacccgtggtgaacagtcttgatcctccactcttgacacgataccttcgaatccatccacagtcttgggagcaccagattgcattgcgcatggaagtacttggatgcgaggctcaggacctctac

SEQ ID NO: 1852 - protein, 1457 aa, synthetic construct
  REGION 1..1457: note = Variant of human B-domain deleted Factor VIII
MQIELSTCFFLCLLRFCFSATRRYYLGAVELSWDYMQSDLGELPVDARFPPRVPKSFPFNTSQVYKKTLFVEFTDHLFNIAKPRPPWMGLLGPTIQAEVYDTVVITLKNMASHPVSLHAVGVSYWKASEGAEYDDQTSQREKEDDKVFPGGSHTYVWQVLKENGPMASDPPCLTYSYLSHVDLVKDLNSGLIGALLVCREGSLAKEKTQTLAKFILLFAVFDEGKSWHSETKNSLMQDRDAASARAWPKMHTVNGYVNRTLPGLIGCHRKSVYWHVIGMGTTPEVHSIFLEGHTFLVRNHRQASLGISPITFLTAQTLLRDLGQFLLFCHIPSHQHDGMEAYVKVDSCPEEPQLRMKNNEEAEDYDDDLTDSEMDVVRFDDDNSPSIIQARSGAKKHPKTWVHYIAAEEEDWDYAPLVLAPDDRSYKSQYLNNGPQRIGRKYKKVRFMAYTDETFKTREAIQHESGILGPLLYGEVGDTLLIIFKNQASRPYNIYPHGITDVRPLYSRRLPKGVKHLKDFPILPGEIFKYKWTITVEDGPTKSDPRCLTRYYSSFVNWERDLASGLIGPLLICYKESVDQRGNQIMSDKRNVILFSVFDENRSWYLTENIQRFLPNPAGVQLEDPEFQASNIMHSINGYVFDSLQLSVCLHEVAYWYILSIGAQTDFLSVFFSGYTFKHKGVYEDTLTLFPFSGETVFMSMENPGLWILGCHNSDFRNRGMTALLKVSSCDWNTGDYYEDSYEDISAYFDSKNNAIEPRSFSQNPPVLKRHQREGTRTTLQSDQEEIDYDDTISVEMKKEDFDIYDEDENQSPRSFQKKTRHYFIAAVERLWDYGMSSSPHVLRNRAQSGSVPQFKKVVFQEFTDGSFTQPLYRGELNEHLGLLGPYIRAEVEDNIMVTFRNQASRPYSFYSSLISYEEDQRQGAEPRKNFVKPNETKTYFWKVQHHMAPTKDEFDCKAWAYFSDVDLEKDVHSGLIGPLLVCHTNTLNPAHGRQVTVQEFALFFTIFDETKSWYFTENMERNCRAPCNIQMEDPTFKENYRFHAINGYIMDTLPGLVMAQDQRIRWYLLSMGSNENIHSIHFSGHVFTVRKKEEYKMALYNLYPGVFETVEMLPSKAGIWRVECLIGPHLHAGMSTLFLVYSNKCQNPLGMASGHIRDFQITASGQYGQWAPKLARLHYSGSINAWSTKEPFSWIKVDLLAPMIIHGIKTQGARQKFSSLYISQFIIMYSLDGKKWQTYRGNSTGTDMVFFGNVDSSGIKHNIFNPPIIARYIRLHPTHYSIRSTLRMELMGCDLNSCSMPLGMESKAISDAQITASSYFTNMFATWSPSKARLHLQGRSNAWRPQVNNPKEWLQVDFQKTMKVTGVTTQGVKSLDTSMYVKEFLISSSQDGHQWTLFFQNGKVKVFQGNQDSFTPVVNSLDPPLLTRYLRIHPQSWEHQIALRMEVLGCEAQDLY

SEQ ID NO: 1853 - DNA, 4371 bp, synthetic construct
  misc_feature 1..4371: note = Variant of human B-domain deleted Factor VIII
  source 1..4371: mol_type = other DNA
atgcagattgaactgtctacctgcttcttcctctgtttgctgaggttctgctttagcgccactagacggtactaccttggcgctgtggagctgtcctgggactatatgcagagtgatttgggagagcttcccgtcgacgcacgatttcctcctcgcgttccaaagtcatttccctttaacacaagccaggtgtacaagaagacgctcttcgtcgaattcaccgatcacctgttcaatatcgccaaacccagaccaccatggatgggtcttttggggcctaccatacaagcggaggtgtatgacacagttgttatcactctcaagaacatggcttctcatccggtaagtcttcacgcagtgggcgtgtcctactggaaagcttcagaaggagccgagtatgatgatcagacatcccagagggagaaagaagacgacaaggtatttccaggtgggtctcatacctatgtgtggcaagtgctcaaagagaatggccctatggcaagcgatccgccgtgtttgacttacagctacctttcacacgttgacctcgtcaaggacctcaactccgggttgattggagccttgttggtatgcagggaaggatctcttgccaaagagaagacacagaccctggccaagtttatccttctctttgctgtgttcgatgagggcaaaagttggcatagcgaaacgaagaattccctcatgcaggatcgcgacgcagccagcgccagagcttggcccaagatgcacactgtgaacggatatgtcaataggacgcttcctggcttgattgggtgtcatcggaaaagtgtctactggcacgtgatcggaatggggacaacaccagaggtccactccatatttctcgaaggccataccttccttgttcgaaaccacagacaggcatccttggggatctctcccattacctttctcactgcccaaacgctccttcgtgacttgggtcagttccttctcttttgccatatcccgtcacaccagcatgatggtatggaagcttatgtgaaagtcgacagttgtcctgaggagccacagttgcgcatgaagaataatgaagaagccgaggattacgacgacgatctcaccgattctgagatggacgtggtgaggtttgatgacgacaactctccctccatcattcaagctcggagcggggcgaagaaacaccccaagacttgggtccactatatagcggcggaagaggaggattgggattacgctcctcttgtattggcaccagatgaccgctcatacaaaagccagtacctcaacaacggaccgcagagaattggccggaagtataagaaagtgcgatttatggcctatacagacgaaacctttaagacaagggaggccatccagcatgagagtgggattttgggacctcttctttacggcgaagttggtgataccctcctcatcatcttcaagaatcaagcttctcgcccctataacatttacccacacgggatcactgacgttaggcctttgtatagcagaagacttcccaaaggcgtgaagcatctcaaagacttccccattttgccaggcgagatctttaagtacaaatggaccattacagtggaagatggaccgactaaatcagaccctcgatgccttacgcggtactattcctccttcgtgaattgggagagagatttggcaagcggactcataggaccactcctcatctgttacaaggaatctgtagaccagaggggtaaccagattatgagtgataaacgcaatgtgatcctttttagcgtcttcgacgagaaccggtcctggtacttgaccgagaatatacaaaggttccttcccaaccccgcaggcgttcagttggaagaccctgagtttcaggccagcaatattatgcactcaatcaacggctatgtgtttgatagtctccagctttctgtttgcctccatgaagtagcctattggtacatcttgtcaattggtgctcaaacagacttcctctccgtcttcttctccggctacacctttaagcacaagggcgtgtatgaggacactctcacactctttccattttctggagaaaccgtgttcatgagcatggagaatccaggcctttggatcttgggttgccacaacagtgattttcgcaatcggggaatgactgctctcctcaaagtcagcagctgtgattggaacacaggcgactattacgaagattcttacgaggacataagtgcctactttgactccaagaataacgccattgagcccagatcattctcccagaatcctcccgtgcttaaaaggcatcagcgcgaaggtaccagaactactcttcagtctgatcaagaggagattgactatgacgacaccattagcgtggaaatgaagaaggaggatttcgatatctatgacgaagatgagaaccagtctccgcggagctttcagaagaagacgcgacactacttcattgcagcagtcgaaaggctttgggactacggtatgtcatcatcccctcatgtgttgcgcaatagagctcagagtggaagtgttccacagttcaagaaagtcgtctttcaagagtttacagatggcagcttcacacagcctctctatcggggcgagcttaacgaacatttgggactccttggtccctatatccgagccgaagtggaggacaacattatggttacctttaggaatcaagcctctcgcccctacagcttctactcctccctcatcagttatgaggaggatcagagacaaggcgctgaaccacggaagaactttgtgaaaccgaatgagacgaagacctacttctggaaagtacagcaccacatggcccccacaaaagacgaattcgattgcaaagcatgggcgtatttttcagacgttgacttggagaaagatgtacattcaggacttattggtcctttgttggtgtgtcacactaacactctcaatccagcccatggcaggcaggtgacagtccaggaattcgctcttttctttaccatctttgatgagaccaagtcctggtacttcacggaaaacatggagcgcaattgcagagccccctgtaacatacagatggaggaccctacctttaaggaaaattatcggttccacgcaatcaacggatacattatggatacactccctggccttgtgatggctcaggaccaacgaatcaggtggtacctcctcagcatgggttctaatgagaacatacactccattcacttttcaggacatgtgttcactgtccggaagaaagaagagtataagatggccctctacaatttgtatccaggcgtgtttgagaccgttgaaatgcttccctctaaagctggcatctggagagtagagtgcttgatcggagaacatcttcacgcaggtatgagcacccagttcctcgtgtacagcaacaaatgtcagaatccacttggcatggccagtggacacattcgcgactttcagatcacagcatctggccagtatggacaatgggccccaaagttggctcgcctccattactccggtagcataaatgcgtggtccactaaagaacctttcagctggattaaggtcgatcttcttgcccccatgatcatccacggcattaagacacagggagcgaggcagaaattctcctccctctacatctcacagttcattattatgtatagtttggacggcaagaagtggcaaacttatagaggtaacagtactggaacagacatggtgttcttcggcaacgttgatagctctggcatcaaacacaacatctttaatcctcccataatagctcggtacatcagattgcatccgacccactacagcattaggagtacactccgaatggagcttatgggttgcgacttgaattcctgttcaatgccactcggaatggagtctaaagccatctctgatgcacagataaccgccagtagctactttacgaacatgtttgctacgtggtcaccctctaaggcaaggcttcatttgcaaggccggtctaatgcctggagacctcaggtgaacaacccgaaagaatggctccaggtggactttcagaagaccatgaaagtaacaggtgtcactactcagggagttaagtccttggatactagcatgtatgtgaaggagttccttatttcctcatcacaagatggccaccagtggaccctcttctttcagaatggtaaggtcaaagtgtttcagggcaatcaagacagcttcacacccgtggtgaacagtcttgatcctccactcttgacacgataccttcgaatccatccacagtcttgggagcaccagattgcattgcgcatggaagtacttggatgcgaggctcaggacctctac

SEQ ID NO: 1854 - protein, 1457 aa, synthetic construct
  REGION 1..1457: note = Variant of human B-domain deleted Factor VIII
MQIELSTCFFLCLLRFCFSATRRYYLGAVELSWDYMQSDLGELPVDARFPPRVPKSFPFNTSQVYKKTLFVEFTDHLFNIAKPRPPWMGLLGPTIQAEVYDTVVITLKNMASHPVSLHAVGVSYWKASEGAEYDDQTSQREKEDDKVFPGGSHTYVWQVLKENGPMASDPPCLTYSYLSHVDLVKDLNSGLIGALLVCREGSLAKEKTQTLAKFILLFAVFDEGKSWHSETKNSLMQDRDAASARAWPKMHTVNGYVNRTLPGLIGCHRKSVYWHVIGMGTTPEVHSIFLEGHTFLVRNHRQASLGISPITFLTAQTLLRDLGQFLLFCHIPSHQHDGMEAYVKVDSCPEEPQLRMKNNEEAEDYDDDLTDSEMDVVRFDDDNSPSIIQARSGAKKHPKTWVHYIAAEEEDWDYAPLVLAPDDRSYKSQYLNNGPQRIGRKYKKVRFMAYTDETFKTREAIQHESGILGPLLYGEVGDTLLIIFKNQASRPYNIYPHGITDVRPLYSRRLPKGVKHLKDFPILPGEIFKYKWTITVEDGPTKSDPRCLTRYYSSFVNWERDLASGLIGPLLICYKESVDQRGNQIMSDKRNVILFSVFDENRSWYLTENIQRFLPNPAGVQLEDPEFQASNIMHSINGYVFDSLQLSVCLHEVAYWYILSIGAQTDFLSVFFSGYTFKHKGVYEDTLTLFPFSGETVFMSMENPGLWILGCHNSDFRNRGMTALLKVSSCDWNTGDYYEDSYEDISAYFDSKNNAIEPRSFSQNPPVLKRHQREGTRTTLQSDQEEIDYDDTISVEMKKEDFDIYDEDENQSPRSFQKKTRHYFIAAVERLWDYGMSSSPHVLRNRAQSGSVPQFKKVVFQEFTDGSFTQPLYRGELNEHLGLLGPYIRAEVEDNIMVTFRNQASRPYSFYSSLISYEEDQRQGAEPRKNFVKPNETKTYFWKVQHHMAPTKDEFDCKAWAYFSDVDLEKDVHSGLIGPLLVCHTNTLNPAHGRQVTVQEFALFFTIFDETKSWYFTENMERNCRAPCNIQMEDPTFKENYRFHAINGYIMDTLPGLVMAQDQRIRWYLLSMGSNENIHSIHFSGHVFTVRKKEEYKMALYNLYPGVFETVEMLPSKAGIWRVECLIGEHLHAGMSTQFLVYSNKCQNPLGMASGHIRDFQITASGQYGQWAPKLARLHYSGSINAWSTKEPFSWIKVDLLAPMIIHGIKTQGARQKFSSLYISQFIIMYSLDGKKWQTYRGNSTGTDMVFFGNVDSSGIKHNIFNPPIIARYIRLHPTHYSIRSTLRMELMGCDLNSCSMPLGMESKAISDAQITASSYFTNMFATWSPSKARLHLQGRSNAWRPQVNNPKEWLQVDFQKTMKVTGVTTQGVKSLDTSMYVKEFLISSSQDGHQWTLFFQNGKVKVFQGNQDSFTPVVNSLDPPLLTRYLRIHPQSWEHQIALRMEVLGCEAQDLY

SEQ ID NO: 1855 - DNA, 4371 bp, synthetic construct
  misc_feature 1..4371: note = Variant of human B-domain deleted Factor VIII
  source 1..4371: mol_type = other DNA
atgcagattgaactgtctacctgcttcttcctctgtttgctgaggttctgctttagcgccactagacggtactaccttggcgctgtggagctgtcctgggactatatgcagagtgatttgggagagcttcccgtcgacgcacgatttcctcctcgcgttccaaagtcatttccctttaacacaagccaggtgtacaagaagacgctcttcgtcgaattcaccgatcacctgttcaatatcgccaaacccagaccaccatggatgggtcttttggggcctaccatacaagcggaggtgtatgacacagttgttatcactctcaagaacatggcttctcatccggtaagtcttcacgcagtgggcgtgtcctactggaaagcttcagaaggagccgagtatgatgatcagacatcccagagggagaaagaagacgacaaggtatttccaggtgggtctcatacctatgtgtggcaagtgctcaaagagaatggccctatggcaagcgatccgccgtgtttgacttacagctacctttcacacgttgacctcgtcaaggacctcaactccgggttgattggagccttgttggtatgcagggaaggatctcttgccaaagagaagacacagaccctggccaagtttatccttctctttgctgtgttcgatgagggcaaaagttggcatagcgaaacgaagaattccctcatgcaggatcgcgacgcagccagcgccagagcttggcccaagatgcacactgtgaacggatatgtcaataggacgcttcctggcttgattgggtgtcatcggaaaagtgtctactggcacgtgatcggaatggggacaacaccagaggtccactccatatttctcgaaggccataccttccttgttcgaaaccacagacaggcatccttggggatctctcccattacctttctcactgcccaaacgctccttcgtgacttgggtcagttccttctcttttgccatatcccgtcacaccagcatgatggtatggaagcttatgtgaaagtcgacagttgtcctgaggagccacagttgcgcatgaagaataatgaagaagccgaggattacgacgacgatctcaccgattctgagatggacgtggtgaggtttgatgacgacaactctccctccatcattcaagctcggagcggggcgaagaaacaccccaagacttgggtccactatatagcggcggaagaggaggattgggattacgctcctcttgtattggcaccagatgaccgctcatacaaaagccagtacctcaacaacggaccgcagagaattggccggaagtataagaaagtgcgatttatggcctatacagacgaaacctttaagacaagggaggccatccagcatgagagtgggattttgggacctcttctttacggcgaagttggtgataccctcctcatcatcttcaagaatcaagcttctcgcccctataacatttacccacacgggatcactgacgttaggcctttgtatagcagaagacttcccaaaggcgtgaagcatctcaaagacttccccattttgccaggcgagatctttaagtacaaatggaccattacagtggaagatggaccgactaaatcagaccctcgatgccttacgcggtactattcctccttcgtgaattgggagagagatttggcaagcggactcataggaccactcctcatctgttacaaggaatctgtagaccagaggggtaaccagattatgagtgataaacgcaatgtgatcctttttagcgtcttcgacgagaaccggtcctggtacttgaccgagaatatacaaaggttccttcccaaccccgcaggcgttcagttggaagaccctgagtttcaggccagcaatattatgcactcaatcaacggctatgtgtttgatagtctccagctttctgtttgcctccatgaagtagcctattggtacatcttgtcaattggtgctcaaacagacttcctctccgtcttcttctccggctacacctttaagcacaagggcgtgtatgaggacactctcacactctttccattttctggagaaaccgtgttcatgagcatggagaatccaggcctttggatcttgggttgccacaacagtgattttcgcaatcggggaatgactgctctcctcaaagtcagcagctgtgattggaacacaggcgactattacgaagattcttacgaggacataagtgcctactttgactccaagaataacgccattgagcccagatcattctcccagaatcctcccgtgcttaaaaggcatcagcgcgaaggtaccagaactactcttcagtctgatcaagaggagattgactatgacgacaccattagcgtggaaatgaagaaggaggatttcgatatctatgacgaagatgagaaccaggtgccgcggagctttcagaagaagacgcgacactacttcattgcagcagtcgaaaggctttgggactacggtatgtcatcatcccctcatgtgttgcgcaatagagctcagagtggaagtgttccacagttcaagaaagtcgtctttcaagagtttacagatggcagcttcacacagcctctctatcggggcgagcttaacgaacatttgggactccttggtccctatatccgagccgaagtggaggacaacattatggttacctttaggaatcaagcctctcgcccctacagcttctactcctccctcatcagttatgaggaggatcagagacaaggcgctgaaccacggaagaactttgtgaaaccgaatgagacgaagacctacttctggaaagtacagcaccacatggcccccacaaaagacgaattcgattgcaaagcatgggcgtatttttcagacgttgacttggagaaagatgtacattcaggacttattggtcctttgttggtgtgtcacactaacactctcaatccagcccatggcaggcaggtgacagtccaggaattcgctcttttctttaccatctttgatgagaccaagtcctggtacttcacggaaaacatggagcgcaattgcagagccccctgtaacatacagatggaggaccctacctttaaggaaaattatcggttccacgcaatcaacggatacattatggatacactccctggccttgtgatggctcaggaccaacgaatcaggtggtacctcctcagcatgggttctaatgagaacatacactccattcacttttcaggacatgtgttcactgtccggaagaaagaagagtataagatggccctctacaatttgtatccaggcgtgtttgagaccgttgaaatgcttccctctaaagctggcatctggagagtagagtgcttgatcggagaacatcttcacgcaggtatgagcaccttgttcctcgtgtacagcaacaaatgtcagaatccacttggcatggccagtggacacattcgcgactttcagatcacagcatctggccagtatggacaatgggccccaaagttggctcgcctccattactccggtagcataaatgcgtggtccactaaagaacctttcagctggattaaggtcgatcttcttgcccccatgatcatccacggcattaagacacagggagcgaggcagaaattctcctccctctacatctcacagttcattattatgtatagtttggacggcaagaagtggcaaacttatagaggtaacagtactggaacagacatggtgttcttcggcaacgttgatagctctggcatcaaacacaacatctttaatcctcccataatagctcggtacatcagattgcatccgacccactacagcattaggagtacactccgaatggagcttatgggttgcgacttgaattcctgttcaatgccactcggaatggagtctaaagccatctctgatgcacagataaccgccagtagctactttacgaacatgtttgctacgtggtcaccctctaaggcaaggcttcatttgcaaggccggtctaatgcctggagacctcaggtgaacaacccgaaagaatggctccaggtggactttcagaagaccatgaaagtaacaggtgtcactactcagggagttaagtccttggatactagcatgtatgtgaaggagttccttatttcctcatcacaagatggccaccagtggaccctcttctttcagaatggtaaggtcaaagtgtttcagggcaatcaagacagcttcacacccgtggtgaacagtcttgatcctccactcttgacacgataccttcgaatccatccacagtcttgggagcaccagattgcattgcgcatggaagtacttggatgcgaggctcaggacctctac

SEQ ID NO: 1856 - protein, 1457 aa, synthetic construct
  REGION 1..1457: note = Variant of human B-domain deleted Factor VIII
MQIELSTCFFLCLLRFCFSATRRYYLGAVELSWDYMQSDLGELPVDARFPPRVPKSFPFNTSQVYKKTLFVEFTDHLFNIAKPRPPWMGLLGPTIQAEVYDTVVITLKNMASHPVSLHAVGVSYWKASEGAEYDDQTSQREKEDDKVFPGGSHTYVWQVLKENGPMASDPPCLTYSYLSHVDLVKDLNSGLIGALLVCREGSLAKEKTQTLAKFILLFAVFDEGKSWHSETKNSLMQDRDAASARAWPKMHTVNGYVNRTLPGLIGCHRKSVYWHVIGMGTTPEVHSIFLEGHTFLVRNHRQASLGISPITFLTAQTLLRDLGQFLLFCHIPSHQHDGMEAYVKVDSCPEEPQLRMKNNEEAEDYDDDLTDSEMDVVRFDDDNSPSIIQARSGAKKHPKTWVHYIAAEEEDWDYAPLVLAPDDRSYKSQYLNNGPQRIGRKYKKVRFMAYTDETFKTREAIQHESGILGPLLYGEVGDTLLIIFKNQASRPYNIYPHGITDVRPLYSRRLPKGVKHLKDFPILPGEIFKYKWTITVEDGPTKSDPRCLTRYYSSFVNWERDLASGLIGPLLICYKESVDQRGNQIMSDKRNVILFSVFDENRSWYLTENIQRFLPNPAGVQLEDPEFQASNIMHSINGYVFDSLQLSVCLHEVAYWYILSIGAQTDFLSVFFSGYTFKHKGVYEDTLTLFPFSGETVFMSMENPGLWILGCHNSDFRNRGMTALLKVSSCDWNTGDYYEDSYEDISAYFDSKNNAIEPRSFSQNPPVLKRHQREGTRTTLQSDQEEIDYDDTISVEMKKEDFDIYDEDENQVPRSFQKKTRHYFIAAVERLWDYGMSSSPHVLRNRAQSGSVPQFKKVVFQEFTDGSFTQPLYRGELNEHLGLLGPYIRAEVEDNIMVTFRNQASRPYSFYSSLISYEEDQRQGAEPRKNFVKPNETKTYFWKVQHHMAPTKDEFDCKAWAYFSDVDLEKDVHSGLIGPLLVCHTNTLNPAHGRQVTVQEFALFFTIFDETKSWYFTENMERNCRAPCNIQMEDPTFKENYRFHAINGYIMDTLPGLVMAQDQRIRWYLLSMGSNENIHSIHFSGHVFTVRKKEEYKMALYNLYPGVFETVEMLPSKAGIWRVECLIGEHLHAGMSTLFLVYSNKCQNPLGMASGHIRDFQITASGQYGQWAPKLARLHYSGSINAWSTKEPFSWIKVDLLAPMIIHGIKTQGARQKFSSLYISQFIIMYSLDGKKWQTYRGNSTGTDMVFFGNVDSSGIKHNIFNPPIIARYIRLHPTHYSIRSTLRMELMGCDLNSCSMPLGMESKAISDAQITASSYFTNMFATWSPSKARLHLQGRSNAWRPQVNNPKEWLQVDFQKTMKVTGVTTQGVKSLDTSMYVKEFLISSSQDGHQWTLFFQNGKVKVFQGNQDSFTPVVNSLDPPLLTRYLRIHPQSWEHQIALRMEVLGCEAQDLY

SEQ ID NO: 1857 - DNA, 4371 bp, synthetic construct
  misc_feature 1..4371: note = Variant of human B-domain deleted Factor VIII
  source 1..4371: mol_type = other DNA
atgcagattgaactgtctacctgcttcttcctctgtttgctgaggttctgctttagcgccactagacggtactaccttggcgctgtggagctgtcctgggactatatgcagagtgatttgggagagcttcccgtcgacgcacgatttcctcctcgcgttccaaagtcatttccctttaacacaagccaggtgtacaagaagacgctcttcgtcgaattcaccgatcacctgttcaatatcgccaaacccagaccaccatggatgggtcttttggggcctaccatacaagcggaggtgtatgacacagttgttatcactctcaagaacatggcttctcatccggtaagtcttcacgcagtgggcgtgtcctactggaaagcttcagaaggagccgagtatgatgatcagacatcccagagggagaaagaagacgacaaggtatttccaggtgggtctcatacctatgtgtggcaagtgctcaaagagaatggccctatggcaagcgatccgccgtgtttgacttacagctacctttcacacgttgacctcgtcaaggacctcaactccgggttgattggagccttgttggtatgcagggaaggatctcttgccaaagagaagacacagaccctggccaagtttatccttctctttgctgtgttcgatgagggcaaaagttggcatagcgaaacgaagaattccctcatgcaggatcgcgacgcagccagcgccagagcttggcccaagatgcacactgtgaacggatatgtcaataggacgcttcctggcttgattgggtgtcatcggaaaagtgtctactggcacgtgatcggaatggggacaacaccagaggtccactccatatttctcgaaggccataccttccttgttcgaaaccacagacaggcatccttggggatctctcccattacctttctcactgcccaaacgctccttcgtgacttgggtcagttccttctcttttgccatatcccgtcacaccagcatgatggtatggaagcttatgtgaaagtcgacagttgtcctgaggagccacagttgcgcatgaagaataatgaagaagccgaggattacgacgacgatctcaccgattctgagatggacgtggtgaggtttgatgacgacaactctccctccatcattcaagctcggagcggggcgaagaaacaccccaagacttgggtccactatatagcggcggaagaggaggattgggattacgctcctcttgtattggcaccagatgaccgctcatacaaaagccagtacctcaacaacggaccgcagagaattggccggaagtataagaaagtgcgatttatggcctatacagacgaaacctttaagacaagggaggccatccagcatgagagtgggattttgggacctcttctttacggcgaagttggtgataccctcctcatcatcttcaagaatcaagcttctcgcccctataacatttacccacacgggatcactgacgttaggcctttgtatagcagaagacttcccaaaggcgtgaagcatctcaaagacttccccattttgccaggcgagatctttaagtacaaatggaccattacagtggaagatggaccgactaaatcagaccctcgatgccttacgcggtactattcctccttcgtgaattgggagagagatttggcaagcggactcataggaccactcctcatctgttacaaggaatctgtagaccagaggggtaaccagattatgagtgataaacgcaatgtgatcctttttagcgtcttcgacgagaaccggtcctggtacttgaccgagaatatacaaaggttccttcccaaccccgcaggcgttcagttggaagaccctgagtttcaggccagcaatattatgcactcaatcaacggctatgtgtttgatagtctccagctttctgtttgcctccatgaagtagcctattggtacatcttgtcaattggtgctcaaacagacttcctctccgtcttcttctccggctacacctttaagcacaagggcgtgtatgaggacactctcacactctttccattttctggagaaaccgtgttcatgagcatggagaatccaggcctttggatcttgggttgccacaacagtgattttcgcaatcggggaatgactgctctcctcaaagtcagcagctgtgattggaacacaggcgactattacgaagattcttacgaggacataagtgcctactttgactccaagaataacgccattgagcccagatcattctcccagaatcctcccgtgcttaaaaggcatcagcgcgaaggtaccagaactactcttcagtctgatcaagaggatattgactatgacgacaccattagcgtggaaatgaagaaggaggatttcgatatctatgacgaagatgagaaccagtctccgcggagctttcagaagaagacgcaacactacttcattgcagcagtcgaaaggctttgggactacggtatgtcatcatcccctcatgtgttgcgcaatagagctcagagtggaagtgttccacagttcaagaaagtcgtctttcaagagtttacagatggcagcttcacacagcctctctatcggggcgagcttaacgaacatttgggactccttggtccctatatccgagccgaagtggaggacaacattatggttacctttaggaatcaagcctctcgcccctacagcttctactcctccctcatcagttatgaggaggatcagagacaaggcgctgaaccacggaagaactttgtgaaaccgaatgagacgaagacctacttctggaaagtacagcaccacatggcccccacaaaagacgaattcgattgcaaagcatgggcgtatttttcagacgttgacttggagaaagatgtacattcaggacttattggtcctttgttggtgtgtcacactaacactctcaatccagcccatggcaggcaggtgacagtccaggaattcgctcttttctttaccatctttgatgagaccaagtcctggtacttcacggaaaacatggagcgcaattgcagagccccctgtaacatacagatggaggaccctacctttaaggaaaattatcggttccacgcaatcaacggatacattatggatacactccctggccttgtgatggctcaggaccaacgaatcaggtggtacctcctcagcatgggttctaatgagaacatacactccattcacttttcaggacatgtgttcactgtccggaagaaagaagagtataagatggccctctacaatttgtatccaggcgtgtttgagaccgttgaaatgcttccctctaaagctggcatctggagagtagagtgcttgatcggagaacatcttcacgcaggtatgagcaccttgttcctcgtgtacagcaacaaatgtcagaatccacttggcatggccagtggacacattcgcgactttcagatcacagcatctggccagtatggacaatgggccccaaagttggctcgcctccattactccggtagcataaatgcgtggtccactaaagaacctttcagctggattaaggtcgatcttcttgcccccatgatcatccacggcattaagacacagggagcgaggcagaaattctcctccctctacatctcacagttcattattatgtatagtttggacggcaagaagtggcaaacttatagaggtaacagtactggaacagacatggtgttcttcggcaacgttgatagctctggcatcaaacacaacatctttaatcctcccataatagctcggtacatcagattgcatccgacccactacagcattaggagtacactccgaatggagcttatgggttgcgacttgaattcctgttcaatgccactcggaatggagtctaaagccatctctgatgcacagataaccgccagtagctactttacgaacatgtttgctacgtggtcaccctctaaggcaaggcttcatttgcaaggccggtctaatgcctggagacctcaggtgaacaacccgaaagaatggctccaggtggactttcagaagaccatgaaagtaacaggtgtcactactcagggagttaagtccttggatactagcatgtatgtgaaggagttccttatttcctcatcacaagatggccaccagtggaccctcttctttcagaatggtaaggtcaaagtgtttcagggcaatcaagacagcttcacacccgtggtgaacagtcttgatcctccactcttgacacgataccttcgaatccatccacagtcttgggagcaccagattgcattgcgcatggaagtacttggatgcgaggctcaggacctctac

SEQ ID NO: 1858 - protein, 1457 aa, synthetic construct
  REGION 1..1457: note = Variant of human B-domain deleted Factor VIII
MQIELSTCFFLCLLRFCFSATRRYYLGAVELSWDYMQSDLGELPVDARFPPRVPKSFPFNTSQVYKKTLFVEFTDHLFNIAKPRPPWMGLLGPTIQAEVYDTVVITLKNMASHPVSLHAVGVSYWKASEGAEYDDQTSQREKEDDKVFPGGSHTYVWQVLKENGPMASDPPCLTYSYLSHVDLVKDLNSGLIGALLVCREGSLAKEKTQTLAKFILLFAVFDEGKSWHSETKNSLMQDRDAASARAWPKMHTVNGYVNRTLPGLIGCHRKSVYWHVIGMGTTPEVHSIFLEGHTFLVRNHRQASLGISPITFLTAQTLLRDLGQFLLFCHIPSHQHDGMEAYVKVDSCPEEPQLRMKNNEEAEDYDDDLTDSEMDVVRFDDDNSPSIIQARSGAKKHPKTWVHYIAAEEEDWDYAPLVLAPDDRSYKSQYLNNGPQRIGRKYKKVRFMAYTDETFKTREAIQHESGILGPLLYGEVGDTLLIIFKNQASRPYNIYPHGITDVRPLYSRRLPKGVKHLKDFPILPGEIFKYKWTITVEDGPTKSDPRCLTRYYSSFVNWERDLASGLIGPLLICYKESVDQRGNQIMSDKRNVILFSVFDENRSWYLTENIQRFLPNPAGVQLEDPEFQASNIMHSINGYVFDSLQLSVCLHEVAYWYILSIGAQTDFLSVFFSGYTFKHKGVYEDTLTLFPFSGETVFMSMENPGLWILGCHNSDFRNRGMTALLKVSSCDWNTGDYYEDSYEDISAYFDSKNNAIEPRSFSQNPPVLKRHQREGTRTTLQSDQEDIDYDDTISVEMKKEDFDIYDEDENQSPRSFQKKTQHYFIAAVERLWDYGMSSSPHVLRNRAQSGSVPQFKKVVFQEFTDGSFTQPLYRGELNEHLGLLGPYIRAEVEDNIMVTFRNQASRPYSFYSSLISYEEDQRQGAEPRKNFVKPNETKTYFWKVQHHMAPTKDEFDCKAWAYFSDVDLEKDVHSGLIGPLLVCHTNTLNPAHGRQVTVQEFALFFTIFDETKSWYFTENMERNCRAPCNIQMEDPTFKENYRFHAINGYIMDTLPGLVMAQDQRIRWYLLSMGSNENIHSIHFSGHVFTVRKKEEYKMALYNLYPGVFETVEMLPSKAGIWRVECLIGEHLHAGMSTLFLVYSNKCQNPLGMASGHIRDFQITASGQYGQWAPKLARLHYSGSINAWSTKEPFSWIKVDLLAPMIIHGIKTQGARQKFSSLYISQFIIMYSLDGKKWQTYRGNSTGTDMVFFGNVDSSGIKHNIFNPPIIARYIRLHPTHYSIRSTLRMELMGCDLNSCSMPLGMESKAISDAQITASSYFTNMFATWSPSKARLHLQGRSNAWRPQVNNPKEWLQVDFQKTMKVTGVTTQGVKSLDTSMYVKEFLISSSQDGHQWTLFFQNGKVKVFQGNQDSFTPVVNSLDPPLLTRYLRIHPQSWEHQIALRMEVLGCEAQDLY

SEQ ID NO: 1859 - DNA, 4371 bp, synthetic construct
  misc_feature 1..4371: note = Variant of human B-domain deleted Factor VIII
  source 1..4371: mol_type = other DNA
atgcagattgaactgtctacctgcttcttcctctgtttgctgaggttctgctttagcgccactagacggtactaccttggcgctgtggagctgtcctgggactatatgcagagtgatttgggagagcttcccgtcgacgcacgatttcctcctcgcgttccaaagtcatttccctttaacacaagccaggtgtacaagaagacgctcttcgtcgaattcaccgatcacctgttcaatatcgccaaacccagaccaccatggatgggtcttttggggcctaccatacaagcggaggtgtatgacacagttgttatcactctcaagaacatggcttctcatccggtaagtcttcacgcagtgggcgtgtcctactggaaagcttcagaaggagccgagtatgatgatcagacatcccagagggagaaagaagacgacaaggtatttccaggtgggtctcatacctatgtgtggcaagtgctcaaagagaatggccctatggcaagcgatccgccgtgtttgacttacagctacctttcacacgttgacctcgtcaaggacctcaactccgggttgattggagccttgttggtatgcagggaaggatctcttgccaaagagaagacacagaccctggccaagtttatccttctctttgctgtgttcgatgagggcaaaagttggcatagcgaaacgaagaattccctcatgcaggatcgcgacgcagccagcgccagagcttggcccaagatgcacactgtgaacggatatgtcaataggacgcttcctggcttgattgggtgtcatcggaaaagtgtctactggcacgtgatcggaatggggacaacaccagaggtccactccatatttctcgaaggccataccttccttgttcgaaaccacagacaggcatccttggggatctctcccattacctttctcactgcccaaacgctccttcgtgacttgggtcagttccttctcttttgccatatcccgtcacaccagcatgatggtatggaagcttatgtgaaagtcgacagttgtcctgaggagccacagttgcgcatgaagaataatgaagaagccgaggattacgacgacgatctcaccgattctgagatggacgtggtgaggtttgatgacgacaactctccctccatcattcaagctcggagcggggcgaagaaacaccccaagacttgggtccactatatagcggcggaagaggaggattgggattacgctcctcttgtattggcaccagatgaccgctcatacaaaagccagtacctcaacaacggaccgcagagaattggccggaagtataagaaagtgcgatttatggcctatacagacgaaacctttaagacaagggaggccatccagcatgagagtgggattttgggacctcttctttacggcgaagttggtgataccctcctcatcatcttcaagaatcaagcttctcgcccctataacatttacccacacgggatcactgacgttaggcctttgtatagcagaagacttcccaaaggcgtgaagcatctcaaagacttccccattttgccaggcgagatctttaagtacaaatggaccatttgtgtggaagatggaccgactaaatcagaccctcgatgccttacgcggtactattcctccttcgtgaattgggagagagatttggcaagcggactcataggaccactcctcatctgttacaaggaatctgtagaccagaggggtaaccagattatgagtgataaacgcaatgtgatcctttttagcgtcttcgacgagaaccggtcctggtacttgaccgagaatatacaaaggttccttcccaaccccgcaggcgttcagttggaagaccctgagtttcaggccagcaatattatgcactcaatcaacggctatgtgtttgatagtctccagctttctgtttgcctccatgaagtagcctattggtacatcttgtcaattggtgctcaaacagacttcctctccgtcttcttctccggctacacctttaagcacaagggcgtgtatgaggacactctcacactctttccattttctggagaaaccgtgttcatgagcatggagaatccaggcctttggatcttgggttgccacaacagtgattttcgcaatcggggaatgactgctctcctcaaagtcagcagctgtgattggaacacaggcgactattacgaagattcttacgaggacataagtgcctactttgactccaagaataacgccattgagcccagatcattctcccagaatcctcccgtgcttaaaaggcatcagcgcgaaggtaccagaactactcttcagtctgatcaagaggagattgactatgacgacaccattagcgtggaaatgaagaaggaggatttcgatatctatgacgaagatgagaaccagtctccgcggagctttcagaagaagacgcgacactacttcattgcagcagtcgaaaggctttgggactacggtatgtcatcatcccctcatgtgttgcgcaatagagctcagagtggaagtgttccacagttcaagaaagtcgtctttcaagagtttacagatggcagcttcacacagcctctctatcggggcgagcttaacgaacatttgggactccttggtccctatatccgagccgaagtggaggacaacattatggttacctttaggaatcaagcctctcgcccctacagcttctactcctccctcatcagttatgaggaggatcagagacaaggcgctgaaccacggaagaactttgtgaaaccgaatgagacgaagacctacttctggaaagtacagcaccacatggcccccacaaaagacgaattcgattgcaaagcatgggcgtatttttcagacgttgacttggagaaagatgtacattcaggacttattggtcctttgttggtgtgtcacactaacactctcaatccagcccatggcaggcaggtgacagtccaggaattcgctcttttctttaccatctttgatgagaccaagtcctggtacttcacggaaaacatggagcgcaattgcagagccccctgtaacatacagatggaggaccctacctttaaggaaaattatcggttccacgcaatcaacggatacattatggatacactccctggccttgtgatggctcaggaccaacgaatcaggtggtacctcctcagcatgggttctaatgagaacatacactccattcacttttcaggacatgtgttcactgtccggaagaaagaagagtataagatggccctctacaatttgtatccaggcgtgtttgagaccgttgaaatgcttccctctaaagctggcatctggagagtagagtgcttgatcggagaacatcttcacgcaggtatgagcaccttgttcctcgtgtacagcaacaaatgtcagaatccacttggcatggccagtggacacattcgcgactttcagatcacagcatctggccagtatggacaatgggccccaaagttggctcgcctccattactccggtagcataaatgcgtggtccactaaagaacctttcagctggattaaggtcgatcttcttgcccccatgatcatccacggcattaagacacagggagcgaggcagaaattctcctccctctacatctcacagttcattattatgtatagtttggacggcaagaagtggcaaacttatagaggtaacagtactggaacagacatggtgttcttcggcaacgttgatagctctggcatcaaacacaacatctttaatcctcccataatagctcggtacatcagattgcatccgacccactacagcattaggagtacactccgaatggagcttatgggttgcgacttgaattcctgttcaatgccactcggaatggagtctaaagccatctctgatgcacagataaccgccagtagctactttacgaacatgtttgctacgtggtcaccctctaaggcaaggcttcatttgcaaggccggtctaatgcctggagacctcaggtgaacaacccgaaagaatggctccaggtggactttcagaagaccatgaaagtaacaggtgtcactactcagggagttaagtccttggatactagcatgtatgtgaaggagttccttatttcctcatcacaagatggccaccagtggaccctcttctttcagaatggtaaggtcaaagtgtttcagggcaatcaagacagcttcacacccgtggtgaacagtcttgatcctccactcttgacacgataccttcgaatccatccacagtcttgggagcaccagattgcattgcgcatggaagtacttggatgcgaggctcaggacctctac

SEQ ID NO: 1860 - protein, 1457 aa, synthetic construct
  REGION 1..1457: note = Variant of human B-domain deleted Factor VIII
MQIELSTCFFLCLLRFCFSATRRYYLGAVELSWDYMQSDLGELPVDARFPPRVPKSFPFNTSQVYKKTLFVEFTDHLFNIAKPRPPWMGLLGPTIQAEVYDTVVITLKNMASHPVSLHAVGVSYWKASEGAEYDDQTSQREKEDDKVFPGGSHTYVWQVLKENGPMASDPPCLTYSYLSHVDLVKDLNSGLIGALLVCREGSLAKEKTQTLAKFILLFAVFDEGKSWHSETKNSLMQDRDAASARAWPKMHTVNGYVNRTLPGLIGCHRKSVYWHVIGMGTTPEVHSIFLEGHTFLVRNHRQASLGISPITFLTAQTLLRDLGQFLLFCHIPSHQHDGMEAYVKVDSCPEEPQLRMKNNEEAEDYDDDLTDSEMDVVRFDDDNSPSIIQARSGAKKHPKTWVHYIAAEEEDWDYAPLVLAPDDRSYKSQYLNNGPQRIGRKYKKVRFMAYTDETFKTREAIQHESGILGPLLYGEVGDTLLIIFKNQASRPYNIYPHGITDVRPLYSRRLPKGVKHLKDFPILPGEIFKYKWTICVEDGPTKSDPRCLTRYYSSFVNWERDLASGLIGPLLICYKESVDQRGNQIMSDKRNVILFSVFDENRSWYLTENIQRFLPNPAGVQLEDPEFQASNIMHSINGYVFDSLQLSVCLHEVAYWYILSIGAQTDFLSVFFSGYTFKHKGVYEDTLTLFPFSGETVFMSMENPGLWILGCHNSDFRNRGMTALLKVSSCDWNTGDYYEDSYEDISAYFDSKNNAIEPRSFSQNPPVLKRHQREGTRTTLQSDQEEIDYDDTISVEMKKEDFDIYDEDENQSPRSFQKKTRHYFIAAVERLWDYGMSSSPHVLRNRAQSGSVPQFKKVVFQEFTDGSFTQPLYRGELNEHLGLLGPYIRAEVEDNIMVTFRNQASRPYSFYSSLISYEEDQRQGAEPRKNFVKPNETKTYFWKVQHHMAPTKDEFDCKAWAYFSDVDLEKDVHSGLIGPLLVCHTNTLNPAHGRQVTVQEFALFFTIFDETKSWYFTENMERNCRAPCNIQMEDPTFKENYRFHAINGYIMDTLPGLVMAQDQRIRWYLLSMGSNENIHSIHFSGHVFTVRKKEEYKMALYNLYPGVFETVEMLPSKAGIWRVECLIGEHLHAGMSTLFLVYSNKCQNPLGMASGHIRDFQITASGQYGQWAPKLARLHYSGSINAWSTKEPFSWIKVDLLAPMIIHGIKTQGARQKFSSLYISQFIIMYSLDGKKWQTYRGNSTGTDMVFFGNVDSSGIKHNIFNPPIIARYIRLHPTHYSIRSTLRMELMGCDLNSCSMPLGMESKAISDAQITASSYFTNMFATWSPSKARLHLQGRSNAWRPQVNNPKEWLQVDFQKTMKVTGVTTQGVKSLDTSMYVKEFLISSSQDGHQWTLFFQNGKVKVFQGNQDSFTPVVNSLDPPLLTRYLRIHPQSWEHQIALRMEVLGCEAQDLY

SEQ ID NO: 1861 - DNA, 4371 bp, synthetic construct
  misc_feature 1..4371: note = Variant of human B-domain deleted Factor VIII
  source 1..4371: mol_type = other DNA
atgcagattgaactgtctacctgcttcttcctctgtttgctgaggttctgctttagcgccactagacggtactaccttggcgctgtggagctgtcctgggactatatgcagagtgatttgggagagcttcccgtcgacgcacgatttcctcctcgcgttccaaagtcatttccctttaacacaagccaggtgtacaagaagacgctcttcgtcgaattcaccgatcacctgttcaatatcgccaaacccagaccaccatggatgggtcttttggggcctaccatacaagcggaggtgtatgacacagttgttatcactctcaagaacatggcttctcatccggtaagtcttcacgcagtgggcgtgtcctactggaaagcttcagaaggagccgagtatgatgatcagacatcccagagggagaaagaagacgacaaggtatttccaggtgggtctcatacctatgtgtggcaagtgctcaaagagaatggccctatggcaagcgatccgccgtgtttgacttacagctacctttcacacgttgacctcgtcaaggacctcaactccgggttgattggagccttgttggtatgcagggaaggatctcttgccaaagagaagacacagaccctggccaagtttatccttctctttgctgtgttcgatgagggcaaaagttggcatagcgaaacgaagaattccctcatgcaggatcgcgacgcagccagcgccagagcttggcccaagatgcacactgtgaacggatatgtcaataggacgcttcctggcttgattgggtgtcatcggaaaagtgtctactggcacgtgatcggaatggggacaacaccagaggtccactccatatttctcgaaggccataccttccttgttcgaaaccacagacaggcatccttggggatctctcccattacctttctcactgcccaaacgctccttcgtgacttgggtcagttccttctcttttgccatatcccgtcacaccagcatgatggtatggaagcttatgtgaaagtcgacagttgtcctgaggagccacagttgcgcatgaagaataatgaagaagccgaggattacgacgacgatctcaccgattctgagatggacgtggtgaggtttgatgacgacaactctccctccatcattcaagctcggagcggggcgaagaaacaccccaagacttgggtccactatatagcggcggaagaggaggattgggattacgctcctcttgtattggcaccagatgaccgctcatacaaaagccagtacctcaacaacggaccgcagagaattggccggaagtataagaaagtgcgatttatggcctatacagacgaaacctttaagacaagggaggccatccagcatgagagtgggattttgggacctcttctttacggcgaagttggtgataccctcctcatcatcttcaagaatcaagcttctcgcccctataacatttacccacacgggatcactgacgttaggcctttgtatagcagaagacttcccaaaggcgtgaagcatctcaaagacttccccattttgccaggcgagatctttaagtacaaatggaccattacagtggaagatggaccgactaaatcagaccctcgatgccttacgcggtactattcctccttcgtgaattgggagagagatttggcaagcggactcataggaccactcctcatctgttacaaggaatctgtagaccagaggggtaaccagattatgagtgataaacgcaatgtgatcctttttagcgtcttcgacgagaaccggtcctggtacttgaccgagaatatacaaaggttccttcccaaccccgcaggcgttcagttggaagaccctgagtttcaggccagcaatattatgcactcaatcaacggctatgtgtttgatagtctccagctttctgtttgcctccatgaagtagcctattggtacatcttgtcaattggtgctcaaacagacttcctctccgtcttcttctccggctacacctttaagcacaggggcgtgtatgaggacactctcacactctttccattttctggagaaaccgtgttcatgagcatggagaatccaggcctttggatcttgggttgccacaacagtgattttcgcaatcggggaatgactgctctcctcaaagtcagcagctgtgattggaacacaggcgactattacgaagattcttacgaggacataagtgcctactttgactccaagaataacgccattgagcccagatcattctcccagaatcctcccgtgcttaaaaggcatcagcgcgaaggtaccagaactactcttcagtctgatcaagaggagattgactatgacgacaccattagcgtggaaatgaagaaggaggatttcgatatctatgacgaagatgagaaccagtctccgcggagctttcagaagaagacgcgacactacttcattgcagcagtcgaaaggctttgggactacggtatgtcatcatcccctcatgtgttgcgcaatagagctcagagtggaagtgttccacagttcaagaaagtcgtctttcaagagtttacagatggcagcttcacacagcctctctatcggggcgagcttaacgaacatttgggactccttggtccctatatccgagccgaagtggaggacaacattatggttacctttaggaatcaagcctctcgcccctacagcttctactcctccctcatcagttatgaggaggatcagagacaaggcgctgaaccacggaagaactttgtgaaaccgaatgagacgaagacctacttctggaaagtacagcaccacatggcccccacaaaagacgaattcgattgcaaagcatgggcgtatttttcagacgttgacttggagaaagatgtacattcaggacttattggtcctttgttggtgtgtcacactaacactctcaatccagcccatggcaggcaggtgacagtccaggaattcgctcttttctttaccatctttgatgagaccaagtcctggtacttcacggaaaacatggagcgcaattgcagagccccctgtaacatacagatggaggaccctacctttaaggaaaattatcggttccacgcaatcaacggatacattatggatacactccctggccttgtgatggctcaggaccaacgaatcaggtggtacctcctcagcatgggttctaatgagaacatacactccattcacttttcaggacatgtgttcactgtccggaagaaagaagagtataagatggccctctacaatttgtatccaggcgtgtttgagaccgttgaaatgcttccctctaaagctggcatctggagagtagagtgcttgatcggagaacatcttcacgcaggtatgagcaccttgttcctcgtgtacagcaacaaatgtcagaatccacttggcatggccagtggacacattcgcgactttcagatcacagcatctggccagtatggacaatgggccccaaagttggctcgcctccattactccggtagcataaatgcgtggtccactaaagaacctttcagctggattaaggtcgatcttcttgcccccatgatcatccacggcattaagacacagggagcgaggcagaaattctcctccctctacatctcacagttcattattatgtatagtttggacggcaagaagtggcaaacttatagaggtaacagtactggaacagacatggtgttcttcggcaacgttgatagctctggcatcaaacacaacatctttaatcctcccataatagctcggtacatcagattgcatccgacccactacagcattaggagtacactccgaatggagcttatgggttgcgacttgaattcctgttcaatgccactcggaatggagtctaaagccatctctgatgcacagataaccgccagtagctactttacgaacatgtttgctacgtggtcaccctctaaggcaaggcttcatttgcaaggccggtctaatgcctggagacctcaggtgaacaacccgaaagaatggctccaggtggactttcagaagaccatgaaagtaacaggtgtcactactcagggagttaagtccttggatactagcatgtatgtgaaggagttccttatttcctcatcacaagatggccaccagtggaccctcttctttcagaatggtaaggtcaaagtgtttcagggcaatcaagacagcttcacacccgtggtgaacagtcttgatcctccactcttgacacgataccttcgaatccatccacagtcttgggagcaccagattgcattgcgcatggaagtacttggatgcgaggctcaggacctctac

SEQ ID NO: 1862 - protein, 1457 aa, synthetic construct
  REGION 1..1457: note = Variant of human B-domain deleted Factor VIII
MQIELSTCFFLCLLRFCFSATRRYYLGAVELSWDYMQSDLGELPVDARFPPRVPKSFPFNTSQVYKKTLFVEFTDHLFNIAKPRPPWMGLLGPTIQAEVYDTVVITLKNMASHPVSLHAVGVSYWKASEGAEYDDQTSQREKEDDKVFPGGSHTYVWQVLKENGPMASDPPCLTYSYLSHVDLVKDLNSGLIGALLVCREGSLAKEKTQTLAKFILLFAVFDEGKSWHSETKNSLMQDRDAASARAWPKMHTVNGYVNRTLPGLIGCHRKSVYWHVIGMGTTPEVHSIFLEGHTFLVRNHRQASLGISPITFLTAQTLLRDLGQFLLFCHIPSHQHDGMEAYVKVDSCPEEPQLRMKNNEEAEDYDDDLTDSEMDVVRFDDDNSPSIIQARSGAKKHPKTWVHYIAAEEEDWDYAPLVLAPDDRSYKSQYLNNGPQRIGRKYKKVRFMAYTDETFKTREAIQHESGILGPLLYGEVGDTLLIIFKNQASRPYNIYPHGITDVRPLYSRRLPKGVKHLKDFPILPGEIFKYKWTITVEDGPTKSDPRCLTRYYSSFVNWERDLASGLIGPLLICYKESVDQRGNQIMSDKRNVILFSVFDENRSWYLTENIQRFLPNPAGVQLEDPEFQASNIMHSINGYVFDSLQLSVCLHEVAYWYILSIGAQTDFLSVFFSGYTFKHRGVYEDTLTLFPFSGETVFMSMENPGLWILGCHNSDFRNRGMTALLKVSSCDWNTGDYYEDSYEDISAYFDSKNNAIEPRSFSQNPPVLKRHQREGTRTTLQSDQEEIDYDDTISVEMKKEDFDIYDEDENQSPRSFQKKTRHYFIAAVERLWDYGMSSSPHVLRNRAQSGSVPQFKKVVFQEFTDGSFTQPLYRGELNEHLGLLGPYIRAEVEDNIMVTFRNQASRPYSFYSSLISYEEDQRQGAEPRKNFVKPNETKTYFWKVQHHMAPTKDEFDCKAWAYFSDVDLEKDVHSGLIGPLLVCHTNTLNPAHGRQVTVQEFALFFTIFDETKSWYFTENMERNCRAPCNIQMEDPTFKENYRFHAINGYIMDTLPGLVMAQDQRIRWYLLSMGSNENIHSIHFSGHVFTVRKKEEYKMALYNLYPGVFETVEMLPSKAGIWRVECLIGEHLHAGMSTLFLVYSNKCQNPLGMASGHIRDFQITASGQYGQWAPKLARLHYSGSINAWSTKEPFSWIKVDLLAPMIIHGIKTQGARQKFSSLYISQFIIMYSLDGKKWQTYRGNSTGTDMVFFGNVDSSGIKHNIFNPPIIARYIRLHPTHYSIRSTLRMELMGCDLNSCSMPLGMESKAISDAQITASSYFTNMFATWSPSKARLHLQGRSNAWRPQVNNPKEWLQVDFQKTMKVTGVTTQGVKSLDTSMYVKEFLISSSQDGHQWTLFFQNGKVKVFQGNQDSFTPVVNSLDPPLLTRYLRIHPQSWEHQIALRMEVLGCEAQDLY

SEQ ID NO: 1863 - DNA, 4371 bp, synthetic construct
  misc_feature 1..4371: note = Variant of human B-domain deleted Factor VIII
  source 1..4371: mol_type = other DNA
atgcagattgaactgtctacctgcttcttcctctgtttgctgaggttctgctttagcgccactagacggtactaccttggcgctgtggagctgtcctgggactatatgcagagtgatttgggagagcttcccgtcgacgcacgatttcctcctcgcgttccaaagtcatttccctttaacacaagccaggtgtacaagaagacgctcttcgtcgaattcaccgatcacctgttcaatatcgccaaacccagaccaccatggatgggtcttttggggcctaccatacaagcggaggtgtatgacacagttgttatcactctcaagaacatggcttctcatccggtaagtcttcacgcagtgggcgtgtcctactggaaagcttcagaaggagccgagtatgatgatcagacatcccagagggagaaagaagacgacaaggtatttccaggtgggtctcatacctatgtgtggcaagtgctcaaagagaatggccctatggcaagcgatccgccgtgtttgacttacagctacctttcacacgttgacctcgtcaaggacctcaactccgggttgattggagccttgttggtatgcagggaaggatctcttgccaaagagaagacacagaccctggccaagtttatccttctctttgctgtgttcgatgagggcaaaagttggcatagcgaaacgaagaattccctcatgcaggatcgcgacgcagccagcgccagagcttggcccaagatgcacactgtgaacggatatgtcaataggacgcttcctggcttgattgggtgtcatcggaaaagtgtctactggcacgtgatcggaatggggacaacaccagaggtccactccatatttctcgaaggccataccttccttgttcgaaaccacagacaggcatccttggggatctctcccattacctttctcactgcccaaacgctccttcgtgacttgggtcagttccttctcttttgccatatcccgtcacaccagcatgatggtatggaagcttatgtgaaagtcgacagttgtcctgaggagccacagttgcgcatgaagaataatgaagaagccgaggattacgacgacgatctcaccgattctgagatggacgtggtgaggtttgatgacgacaactctccctccatcattcaagctcggagcggggcgaagaaacaccccaagacttgggtccactatatagcggcggaagaggaggattgggattacgctcctcttgtattggcaccagatgaccgctcatacaaaagccagtacctcaacaacggaccgcagagaattggccggaagtataagaaagtgcgatttatggcctatacagacgaaacctttaagacaagggaggccatccagcatgagagtgggattttgggacctcttctttacggcgaagttggtgataccctcctcatcatcttcaagaatcaagcttctcgcccctataacatttacccacacgggatcactgacgttaggcctttgtatagcagaagacttcccaaaggcgtgaagcatctcaaagacttccccattttgccaggcgagatctttaagtacaaatggaccattacagtggaagatggaccgactaaatcagaccctcgatgccttacgcggtactattcctccttcgtgaattgggagagagatttggcaagcggactcataggaccactcctcatctgttacaaggaatctgtagaccagaggggtaaccagattatgagtgataaacgcaatgtgatcctttttagcgtcttcgacgagaaccggtcctggtacttgaccgagaatatacaaaggttccttcccaaccccgcaggcgttcagttggaagaccctgagtttcaggccagcaatattatgcactcaatcaacggctatgtgtttgatagtctccagctttctgtttgcctccatgaagtagcctattggtacatcttgtcaattggtgctcaaacagacttcctctccgtcttcttctccggctacacctttaagcacaagggcgtgtatgaggacactctcacactctttccattttctggagaaaccgtgttcatgagcatggagaatccaggcctttggatcttgggttgccacaacagtgattttcgcaatcggggaatgactgctctcctcaaagtcagcagctgtgattggaacacaggcgactattacgaagattcttacgaggacataagtgcctactttgactccaagaataacgccattgagcccagatcattctcccagaatcctcccgtgcttaaaaggcatcagcgcgaaggtaccagaactactcttcagtctgatcaagaggagattgactatgacgacaccattagcgtggaaatgaagaaggaggatttcgatatctatgacgaagatgagaaccagtctccgcggagctttcagaagaagacgcgacactacttcattgcagcagtcgaaaggctttgggactacggtatgtcatcatcccctcatgtgttgcgcaatagagctcagagtggaagtgttccacagttcaagaaagtcgtctttcaagagtttacagatggcagcttcacacagcctctctatcggggcgagcttaacgaacatttgggactccttggtccctatatccgagccgaagtggaggacaacattatggttacctttaggaatcaagcctctcgcccctacagcttctactcctccctcatcagttatgaggaggatcagagacaaggcgctgaaccacggaagaactttgtgaaaccgaatgagacgaagacctacttctggaaagtacagcaccacatggcccccacaaaagacgaattcgattgcaaagcatgggcgtatttttcagacgttgacttggagaaagatgtacattcaggacttattggtcctttgttggtgtgtcacactaacactctcaatccagcccatggcaggcaggtgacagtccaggaattcgctcttttctttaccatctttgatgagaccaagtcctggtacttcacggaaaacatggagcgcaattgcagagccccctgtaacatacagatggaggaccctacctttaaggaaaattatcggttccacgcaatcaacggatacattatggatacactccctggccttgtgatggctcaggaccaacgaatcaggtggtacctcctcagcatgggttctaatgagaacatacactccattcacttttcaggacatgtgttcactgtccggaagaaagaagagtataagatggccctctacaatttgtatccaggcgtgtttgagaccgttgaaatgcttcccattaaagctggcatctggagagtagagtgcttgatcggagaacatcttcacgcaggtatgagcaccttgttcctcgtgtacagcaacaaatgtcagaatccacttggcatggccagtggacacattcgcgactttcagatcacagcatctggccagtatggacaatgggccccaaagttggctcgcctccattactccggtagcataaatgcgtggtccactaaagaacctttcagctggattaaggtcgatcttcttgcccccatgatcatccacggcattaagacacagggagcgaggcagaaattctcctccctctacatctcacagttcattattatgtatagtttggacggcaagaagtggcaaacttatagaggtaacagtactggaacagacatggtgttcttcggcaacgttgatagctctggcatcaaacacaacatctttaatcctcccataatagctcggtacatcagattgcatccgacccactacagcattaggagtacactccgaatggagcttatgggttgcgacttgaattcctgttcaatgccactcggaatggagtctaaagccatctctgatgcacagataaccgccagtagctactttacgaacatgtttgctacgtggtcaccctctaaggcaaggcttcatttgcaaggccggtctaatgcctggagacctcaggtgaacaacccgaaagaatggctccaggtggactttcagaagaccatgaaagtaacaggtgtcactactcagggagttaagtccttggatactagcatgtatgtgaaggagttccttatttcctcatcacaagatggccaccagtggaccctcttctttcagaatggtaaggtcaaagtgtttcagggcaatcaagacagcttcacacccgtggtgaacagtcttgatcctccactcttgacacgataccttcgaatccatccacagtcttgggagcaccagattgcattgcgcatggaagtacttggatgcgaggctcaggacctctac

SEQ ID NO: 1864 - protein, 1457 aa, synthetic construct
  REGION 1..1457: note = Variant of human B-domain deleted Factor VIII
MQIELSTCFFLCLLRFCFSATRRYYLGAVELSWDYMQSDLGELPVDARFPPRVPKSFPFNTSQVYKKTLFVEFTDHLFNIAKPRPPWMGLLGPTIQAEVYDTVVITLKNMASHPVSLHAVGVSYWKASEGAEYDDQTSQREKEDDKVFPGGSHTYVWQVLKENGPMASDPPCLTYSYLSHVDLVKDLNSGLIGALLVCREGSLAKEKTQTLAKFILLFAVFDEGKSWHSETKNSLMQDRDAASARAWPKMHTVNGYVNRTLPGLIGCHRKSVYWHVIGMGTTPEVHSIFLEGHTFLVRNHRQASLGISPITFLTAQTLLRDLGQFLLFCHIPSHQHDGMEAYVKVDSCPEEPQLRMKNNEEAEDYDDDLTDSEMDVVRFDDDNSPSIIQARSGAKKHPKTWVHYIAAEEEDWDYAPLVLAPDDRSYKSQYLNNGPQRIGRKYKKVRFMAYTDETFKTREAIQHESGILGPLLYGEVGDTLLIIFKNQASRPYNIYPHGITDVRPLYSRRLPKGVKHLKDFPILPGEIFKYKWTITVEDGPTKSDPRCLTRYYSSFVNWERDLASGLIGPLLICYKESVDQRGNQIMSDKRNVILFSVFDENRSWYLTENIQRFLPNPAGVQLEDPEFQASNIMHSINGYVFDSLQLSVCLHEVAYWYILSIGAQTDFLSVFFSGYTFKHKGVYEDTLTLFPFSGETVFMSMENPGLWILGCHNSDFRNRGMTALLKVSSCDWNTGDYYEDSYEDISAYFDSKNNAIEPRSFSQNPPVLKRHQREGTRTTLQSDQEEIDYDDTISVEMKKEDFDIYDEDENQSPRSFQKKTRHYFIAAVERLWDYGMSSSPHVLRNRAQSGSVPQFKKVVFQEFTDGSFTQPLYRGELNEHLGLLGPYIRAEVEDNIMVTFRNQASRPYSFYSSLISYEEDQRQGAEPRKNFVKPNETKTYFWKVQHHMAPTKDEFDCKAWAYFSDVDLEKDVHSGLIGPLLVCHTNTLNPAHGRQVTVQEFALFFTIFDETKSWYFTENMERNCRAPCNIQMEDPTFKENYRFHAINGYIMDTLPGLVMAQDQRIRWYLLSMGSNENIHSIHFSGHVFTVRKKEEYKMALYNLYPGVFETVEMLPIKAGIWRVECLIGEHLHAGMSTLFLVYSNKCQNPLGMASGHIRDFQITASGQYGQWAPKLARLHYSGSINAWSTKEPFSWIKVDLLAPMIIHGIKTQGARQKFSSLYISQFIIMYSLDGKKWQTYRGNSTGTDMVFFGNVDSSGIKHNIFNPPIIARYIRLHPTHYSIRSTLRMELMGCDLNSCSMPLGMESKAISDAQITASSYFTNMFATWSPSKARLHLQGRSNAWRPQVNNPKEWLQVDFQKTMKVTGVTTQGVKSLDTSMYVKEFLISSSQDGHQWTLFFQNGKVKVFQGNQDSFTPVVNSLDPPLLTRYLRIHPQSWEHQIALRMEVLGCEAQDLY

SEQ ID NO: 1865 - DNA, 4371 bp, synthetic construct
  misc_feature 1..4371: note = Variant of human B-domain deleted Factor VIII
  source 1..4371: mol_type = other DNA
atgcagattgaactgtctacctgcttcttcctctgtttgctgaggttctgctttagcgccactagacggtactaccttggcgctgtggagctgtcctgggactatatgcagagtgatttgggagagcttcccgtcgacgcacgatttcctcctcgcgttccaaagtcatttccctttaacacaagccaggtgtacaagaagacgctcttcgtcgaattcaccgatcacctgttcaatatcgccaaacccagaccaccatggatgggtcttttggggcctaccatacaagcggaggtgtatgacacagttgttatcactctcaagaacatggcttctcatccggtaagtcttcacgcagtgggcgtgtcctactggaaagcttcagaaggagccgagtatgatgatcagacatcccagagggagaaagaagacgacaaggtatttccaggtgggtctcatacctatgtgtggcaagtgctcaaagagaatggccctatggcaagcgatccgccgtgtttgacttacagctacctttcacacgttgacctcgtcaaggacctcaactccgggttgattggagccttgttggtatgcagggaaggatctcttgccaaagagaagacacagaccctggccaagtttatccttctctttgctgtgttcgatgagggcaaaagttggcatagcgaaacgaagaattccctcatgcaggatcgcgacgcagccagcgccagagcttggcccaagatgcacactgtgaacggatatgtcaataggacgcttcctggcttgattgggtgtcatcggaaaagtgtctactggcacgtgatcggaatggggacaacaccagaggtccactccatatttctcgaaggccataccttccttgttcgaaaccacagacaggcatccttggggatctctcccattacctttctcactgcccaaacgctccttcgtgacttgggtcagttccttctcttttgccatatcccgtcacaccagcatgatggtatggaagcttatgtgaaagtcgacagttgtcctgaggagccacagttgcgcatgaagaataatgaagaagccgaggattacgacgacgatctcaccgattctgagatggacgtggtgaggtttgatgacgacaactctccctccatcattcaagctcggagcggggcgaagaaacaccccaagacttgggtccactatatagcggcggaagaggaggattgggattacgctcctcttgtattggcaccagatgaccgctcatacaaaagccagtacctcaacaacggaccgcagagaattggccggaagtataagaaagtgcgatttatggcctatacagacgaaacctttaagacaagggaggccatccagcatgagagtgggattttgggacctcttctttacggcgaagttggtgataccctcctcatcatcttcaagaatcaagcttctcgcccctataacatttacccacacgggatcactgacgttaggcctttgtatagcagaagacttcccaaaggcgtgaagcatctcaaagacttccccattttgccaggcgagatctttaagtacaaatggaccattacagtggaagatggaccgactaaatcagaccctcgatgccttacgcggtactattcctccttcgtgaattgggagagagatttggcaagcggactcataggaccactcctcatctgttacaaggaatctgtagaccagaggggtaaccagattatgagtgataaacgcaatgtgatcctttttagcgtcttcgacgagaaccggtcctggtacttgaccgagaatatacaaaggttccttcccaaccccgcaggcgttcagttggaagaccctgagtttcaggccagcaatattatgcactcaatcaacggctatgtgtttgatagtctccagctttctgtttgcctccatgaagtagcctattggtacatcttgtcaattggtgctcaaacagacttcctctccgtcttcttctccggctacacctttaagcacaagggcgtgtatgaggacactctcacactctttccattttctggagaaaccgtgttcatgagcatggagaatccaggcctttggatcttgggttgccacaacagtgattttcgcaatcggggaatgactgctctcctcaaagtcagcagctgtgattggaacacaggcgactattacgaagattcttacgaggacataagtgcctactttgactccaagaataacgccattgagcccagatcattctcccagaatcctcccgtgcttaaaaggcatcagcgcgaaggtaccagaactactcttcagtctgatcaagaggagattgactatgacgacaccattagcgtggaaatgaagaaggaggatttcgatatctatgacgaagatgagaaccagtctccgcggagctttcagaagaagacgcgacactacttcattgcagcagtcgaaaggctttgggactacggtatgtcatcatcccctcatgtgttgcgcaatagagctcagagtggaagtgttccacagttcaagaaagtcgtctttcaagagtttacagatggcagcttcacacagcctctctatcggggcgagcttaacgaacatttgggactccttggtccctatatccgagccgaagtggaggacaacattatggttacctttaggaatcaagcctctcgcccctacagcttctactcctccctcatcagttatgaggaggatcagagacaaggcgctgaaccacggaagaactttgtgaaaccgaatgagacgaagacctacttctggaaagtacagcaccacatggcccccacaaaagacgaattcgattgcaaagcatgggcgtatttttcagacgttgacttggagaaagatgtacattcaggacttattggtcctttgttggtgtgtcacactaacactctcaatccagcccatggcaggcaggtgacagtccaggaattcgctcttttctttaccatctttgatgagaccaagtcctggtacttcacggaaaacatggagcgcaattgcagagccccctgtaacatacagatggaggaccctacctttaaggaaaattatcggttccacgcaatcaacggatacattatggatacactccctggccttgtgatggctcaggaccaacgaatcaggtggtacctcctcagcatgggttctaatgagaacatacactccattcacttttcaggacatgtgttctttgtccggaagaaagaagagtataagatggccctctacaatttgtatccaggcgtgtttgagaccgttgaaatgcttccctctaaagctggcatctggagagtagagtgcttgatcggagaacatcttcacgcaggtatgagcaccttgttcctcgtgtacagcaacaaatgtcagaatccacttggcatggccagtggacacattcgcgactttcagatcacagcatctggccagtatggacaatgggccccaaagttggctcgcctccattactccggtagcataaatgcgtggtccactaaagaacctttcagctggattaaggtcgatcttcttgcccccatgatcatccacggcattaagacacagggagcgaggcagaaattctcctccctctacatctcacagttcattattatgtatagtttggacggcaagaagtggcaaacttatagaggtaacagtactggaacagacatggtgttcttcggcaacgttgatagctctggcatcaaacacaacatctttaatcctcccataatagctcggtacatcagattgcatccgacccactacagcattaggagtacactccgaatggagcttatgggttgcgacttgaattcctgttcaatgccactcggaatggagtctaaagccatctctgatgcacagataaccgccagtagctactttacgaacatgtttgctacgtggtcaccctctaaggcaaggcttcatttgcaaggccggtctaatgcctggagacctcaggtgaacaacccgaaagaatggctccaggtggactttcagaagaccatgaaagtaacaggtgtcactactcagggagttaagtccttggatactagcatgtatgtgaaggagttccttatttcctcatcacaagatggccaccagtggaccctcttctttcagaatggtaaggtcaaagtgtttcagggcaatcaagacagcttcacacccgtggtgaacagtcttgatcctccactcttgacacgataccttcgaatccatccacagtcttgggagcaccagattgcattgcgcatggaagtacttggatgcgaggctcaggacctctac

SEQ ID NO: 1866 - protein, 1457 aa, synthetic construct
  REGION 1..1457: note = Variant of human B-domain deleted Factor VIII
MQIELSTCFFLCLLRFCFSATRRYYLGAVELSWDYMQSDLGELPVDARFPPRVPKSFPFNTSQVYKKTLFVEFTDHLFNIAKPRPPWMGLLGPTIQAEVYDTVVITLKNMASHPVSLHAVGVSYWKASEGAEYDDQTSQREKEDDKVFPGGSHTYVWQVLKENGPMASDPPCLTYSYLSHVDLVKDLNSGLIGALLVCREGSLAKEKTQTLAKFILLFAVFDEGKSWHSETKNSLMQDRDAASARAWPKMHTVNGYVNRTLPGLIGCHRKSVYWHVIGMGTTPEVHSIFLEGHTFLVRNHRQASLGISPITFLTAQTLLRDLGQFLLFCHIPSHQHDGMEAYVKVDSCPEEPQLRMKNNEEAEDYDDDLTDSEMDVVRFDDDNSPSIIQARSGAKKHPKTWVHYIAAEEEDWDYAPLVLAPDDRSYKSQYLNNGPQRIGRKYKKVRFMAYTDETFKTREAIQHESGILGPLLYGEVGDTLLIIFKNQASRPYNIYPHGITDVRPLYSRRLPKGVKHLKDFPILPGEIFKYKWTITVEDGPTKSDPRCLTRYYSSFVNWERDLASGLIGPLLICYKESVDQRGNQIMSDKRNVILFSVFDENRSWYLTENIQRFLPNPAGVQLEDPEFQASNIMHSINGYVFDSLQLSVCLHEVAYWYILSIGAQTDFLSVFFSGYTFKHKGVYEDTLTLFPFSGETVFMSMENPGLWILGCHNSDFRNRGMTALLKVSSCDWNTGDYYEDSYEDISAYFDSKNNAIEPRSFSQNPPVLKRHQREGTRTTLQSDQEEIDYDDTISVEMKKEDFDIYDEDENQSPRSFQKKTRHYFIAAVERLWDYGMSSSPHVLRNRAQSGSVPQFKKVVFQEFTDGSFTQPLYRGELNEHLGLLGPYIRAEVEDNIMVTFRNQASRPYSFYSSLISYEEDQRQGAEPRKNFVKPNETKTYFWKVQHHMAPTKDEFDCKAWAYFSDVDLEKDVHSGLIGPLLVCHTNTLNPAHGRQVTVQEFALFFTIFDETKSWYFTENMERNCRAPCNIQMEDPTFKENYRFHAINGYIMDTLPGLVMAQDQRIRWYLLSMGSNENIHSIHFSGHVFFVRKKEEYKMALYNLYPGVFETVEMLPSKAGIWRVECLIGEHLHAGMSTLFLVYSNKCQNPLGMASGHIRDFQITASGQYGQWAPKLARLHYSGSINAWSTKEPFSWIKVDLLAPMIIHGIKTQGARQKFSSLYISQFIIMYSLDGKKWQTYRGNSTGTDMVFFGNVDSSGIKHNIFNPPIIARYIRLHPTHYSIRSTLRMELMGCDLNSCSMPLGMESKAISDAQITASSYFTNMFATWSPSKARLHLQGRSNAWRPQVNNPKEWLQVDFQKTMKVTGVTTQGVKSLDTSMYVKEFLISSSQDGHQWTLFFQNGKVKVFQGNQDSFTPVVNSLDPPLLTRYLRIHPQSWEHQIALRMEVLGCEAQDLY

SEQ ID NO: 1867 - DNA, 4371 bp, synthetic construct
  misc_feature 1..4371: note = Variant of human B-domain deleted Factor VIII
  source 1..4371: mol_type = other DNA
atgcagattgaactgtctacctgcttcttcctctgtttgctgaggttctgctttagcgccactagacggtactaccttggcgctgtggagctgtcctgggactatatgcagagtgatttgggagagcttcccgtcgacgcacgatttcctcctcgcgttccaaagtcatttccctttaacacaagccaggtgtacaagaagacgctcttcgtcgaattcaccgatcacctgttcaatatcgccaaacccagaccaccatggatgggtcttttggggcctaccatacaagcggaggtgtatgacacagttgttatcactctcaagaacatggcttctcatccggtaagtcttcacgcagtgggcgtgtcctactggaaagcttcagaaggagccgagtatgatgatcagacatcccagagggagaaagaagacgacaaggtatttccaggtgggtctcatacctatgtgtggcaagtgctcaaagagaatggccctatggcaagcgatccgccgtgtttgacttacagctacctttcacacgttgacctcgtcaaggacctcaactccgggttgattggagccttgttggtatgcagggaaggatctcttgccaaagagaagacacagaccctggccaagtttatccttctctttgctgtgttcgatgagggcaaaagttggcatagcgaaacgaagaattccctcatgcaggatcgcgacgcagccagcgccagagcttggcccaagatgcacactgtgaacggatatgtcaataggacgcttcctggcttgattgggtgtcatcggaaaagtgtctactggcacgtgatcggaatggggacaacaccagaggtccactccatatttctcgaaggccataccttccttgttcgaaaccacagacaggcagagttggggatctctcccattacctttctcactgcccaaacgctccttcgtgacttgggtcagttccttctcttttgccatatcccgtcacaccagcatgatggtatggaagcttatgtgaaagtcgacagttgtcctgaggagccacagttgcgcatgaagaataatgaagaagccgaggattacgacgacgatctcaccgattctgagatggacgtggtgaggtttgatgacgacaactctccctccatcattcaagctcggagcggggcgaagaaacaccccaagacttgggtccactatatagcggcggaagaggaggattgggattacgctcctcttgtattggcaccagatgaccgctcatacaaaagccagtacctcaacaacggaccgcagagaattggccggaagtataagaaagtgcgatttatggcctatacagacgaaacctttaagacaagggaggccatccagcatgagagtgggattttgggacctcttctttacggcgaagttggtgataccctcctcatcatcttcaagaatcaagcttctcgcccctataacatttacccacacgggatcactgacgttaggcctttgtatagcagaagacttcccaaaggcgtgaagcatctcaaagacttccccattttgccaggcgagatctttaagtacaaatggaccattacagtggaagatggaccgactaaatcagaccctcgatgccttacgcggtactattcctccttcgtgaattgggagagagatttggcaagcggactcataggaccactcctcatctgttacaaggaatctgtagaccagaggggtaaccagattatgagtgataaacgcaatgtgatcctttttagcgtcttcgacgagaaccggtcctggtacttgaccgagaatatacaaaggttccttcccaaccccgcaggcgttcagttggaagaccctgagtttcaggccagcaatattatgcactcaatcaacggctatgtgtttgatagtctccagctttctgtttgcctccatgaagtagcctattggtacatcttgtcaattggtgctcaaacagacttcctctccgtcttcttctccggctacacctttaagcacaagggcgtgtatgaggacactctcacactctttccattttctggagaaaccgtgttcatgagcatggagaatccaggcctttggatcttgggttgccacaacagtgattttcgcaatcggggaatgactgctctcctcaaagtcagcagctgtgattggaacacaggcgactattacgaagattcttacgaggacataagtgcctactttgactccaagaataacgccattgagcccagatcattctcccagaatcctcccgtgcttaaaaggcatcagcgcgaaggtaccagaactactcttcagtctgatcaagaggagattgactatgacgacaccattagcgtggaaatgaagaaggaggatttcgatatctatgacgaagatgagaaccagtctccgcggagctttcagaagaagacgcgacactacttcattgcagcagtcgaaaggctttgggactacggtatgtcatcatcccctcatgtgttgcgcaatagagctcagagtggaagtgttccacagttcaagaaagtcgtctttcaagagtttacagatggcagcttcacacagcctctctatcggggcgagcttaacgaacatttgggactccttggtccctatatccgagccgaagtggaggacaacattatggttacctttaggaatcaagcctctcgcccctacagcttctactcctccctcatcagttatgaggaggatcagagacaaggcgctgaaccacggaagaactttgtgaaaccgaatgagacgaagacctacttctggaaagtacagcaccacatggcccccacaaaagacgaattcgattgcaaagcatgggcgtatttttcagacgttgacttggagaaagatgtacattcaggacttattggtcctttgttggtgtgtcacactaacactctcaatccagcccatggcaggcaggtgacagtccaggaattcgctcttttctttaccatctttgatgagaccaagtcctggtacttcacggaaaacatggagcgcaattgcagagccccctgtaacatacagatggaggaccctacctttaaggaaaattatcggttccacgcaatcaacggatacattatggatacactccctggccttgtgatggctcaggaccaacgaatcaggtggtacctcctcagcatgggttctaatgagaacatacactccattcacttttcaggacatgtgttcactgtccggaagaaagaagagtataagatggccctctacaatttgtatccaggcgtgtttgagaccgttgaaatgcttccctctaaagctggcatctggagagtagagtgcttgatcggagaacatcttcacgcaggtatgagcaccttgttcctcgtgtacagcaacaaatgtcagaatccacttggcatggccagtggacacattcgcgactttcagatcacagcatctggccagtatggacaatgggccccaaagttggctcgcctccattactccggtagcataaatgcgtggtccactaaagaacctttcagctggattaaggtcgatcttcttgcccccatgatcatccacggcattaagacacagggagcgaggcagaaattctcctccctctacatctcacagttcattattatgtatagtttggacggcaagaagtggcaaacttatagaggtaacagtactggaacagacatggtgttcttcggcaacgttgatagctctggcatcaaacacaacatctttaatcctcccataatagctcggtacatcagattgcatccgacccactacagcattaggagtacactccgaatggagcttatgggttgcgacttgaattcctgttcaatgccactcggaatggagtctaaagccatctctgatgcacagataaccgccagtagctactttacgaacatgtttgctacgtggtcaccctctaaggcaaggcttcatttgcaaggccggtctaatgcctggagacctcaggtgaacaacccgaaagaatggctccaggtggactttcagaagaccatgaaagtaacaggtgtcactactcagggagttaagtccttggatactagcatgtatgtgaaggagttccttatttcctcatcacaagatggccaccagtggaccctcttctttcagaatggtaaggtcaaagtgtttcagggcaatcaagacagcttcacacccgtggtgaacagtcttgatcctccactcttgacacgataccttcgaatccatccacagtcttgggagcaccagattgcattgcgcatggaagtacttggatgcgaggctcaggacctctac

SEQ ID NO: 1868 - protein, 1457 aa, synthetic construct
  REGION 1..1457: note = Variant of human B-domain deleted Factor VIII
MQIELSTCFFLCLLRFCFSATRRYYLGAVELSWDYMQSDLGELPVDARFPPRVPKSFPFNTSQVYKKTLFVEFTDHLFNIAKPRPPWMGLLGPTIQAEVYDTVVITLKNMASHPVSLHAVGVSYWKASEGAEYDDQTSQREKEDDKVFPGGSHTYVWQVLKENGPMASDPPCLTYSYLSHVDLVKDLNSGLIGALLVCREGSLAKEKTQTLAKFILLFAVFDEGKSWHSETKNSLMQDRDAASARAWPKMHTVNGYVNRTLPGLIGCHRKSVYWHVIGMGTTPEVHSIFLEGHTFLVRNHRQAELGISPITFLTAQTLLRDLGQFLLFCHIPSHQHDGMEAYVKVDSCPEEPQLRMKNNEEAEDYDDDLTDSEMDVVRFDDDNSPSIIQARSGAKKHPKTWVHYIAAEEEDWDYAPLVLAPDDRSYKSQYLNNGPQRIGRKYKKVRFMAYTDETFKTREAIQHESGILGPLLYGEVGDTLLIIFKNQASRPYNIYPHGITDVRPLYSRRLPKGVKHLKDFPILPGEIFKYKWTITVEDGPTKSDPRCLTRYYSSFVNWERDLASGLIGPLLICYKESVDQRGNQIMSDKRNVILFSVFDENRSWYLTENIQRFLPNPAGVQLEDPEFQASNIMHSINGYVFDSLQLSVCLHEVAYWYILSIGAQTDFLSVFFSGYTFKHKGVYEDTLTLFPFSGETVFMSMENPGLWILGCHNSDFRNRGMTALLKVSSCDWNTGDYYEDSYEDISAYFDSKNNAIEPRSFSQNPPVLKRHQREGTRTTLQSDQEEIDYDDTISVEMKKEDFDIYDEDENQSPRSFQKKTRHYFIAAVERLWDYGMSSSPHVLRNRAQSGSVPQFKKVVFQEFTDGSFTQPLYRGELNEHLGLLGPYIRAEVEDNIMVTFRNQASRPYSFYSSLISYEEDQRQGAEPRKNFVKPNETKTYFWKVQHHMAPTKDEFDCKAWAYFSDVDLEKDVHSGLIGPLLVCHTNTLNPAHGRQVTVQEFALFFTIFDETKSWYFTENMERNCRAPCNIQMEDPTFKENYRFHAINGYIMDTLPGLVMAQDQRIRWYLLSMGSNENIHSIHFSGHVFTVRKKEEYKMALYNLYPGVFETVEMLPSKAGIWRVECLIGEHLHAGMSTLFLVYSNKCQNPLGMASGHIRDFQITASGQYGQWAPKLARLHYSGSINAWSTKEPFSWIKVDLLAPMIIHGIKTQGARQKFSSLYISQFIIMYSLDGKKWQTYRGNSTGTDMVFFGNVDSSGIKHNIFNPPIIARYIRLHPTHYSIRSTLRMELMGCDLNSCSMPLGMESKAISDAQITASSYFTNMFATWSPSKARLHLQGRSNAWRPQVNNPKEWLQVDFQKTMKVTGVTTQGVKSLDTSMYVKEFLISSSQDGHQWTLFFQNGKVKVFQGNQDSFTPVVNSLDPPLLTRYLRIHPQSWEHQIALRMEVLGCEAQDLY

SEQ ID NO: 1869 - DNA, 4371 bp, synthetic construct
  misc_feature 1..4371: note = Variant of human B-domain deleted Factor VIII
  source 1..4371: mol_type = other DNA
atgcagattgaactgtctacctgcttcttcctctgtttgctgaggttctgctttagcgccactagacggtactaccttggcgctgtggagctgtcctgggactatatgcagagtgatttgggagagcttcccgtcgacgcacgatttcctcctcgcgttccaaagtcatttccctttaacacaagccaggtgtacaagaagacgctcttcgtcgaattcaccgatcacctgttcaatatcgccaaacccagaccaccatggatgggtcttttggggcctaccatacaagcggaggtgtatgacacagttgttatcactctcaagaacatggcttctcatccggtaagtcttcacgcagtgggcgtgtcctactggaaagcttcagaaggagccgagtatgatgatcagacatcccagagggagaaagaagacgacaaggtatttccaggtgggtctcatacctatgtgtggcaagtgctcaaagagaatggccctatggcaagcgatccgccgtgtttgacttacagctactggtcacacgttgacctcgtcaaggacctcaactccgggttgattggagccttgttggtatgcagggaaggatctcttgccaaagagaagacacagaccctggccaagtttatccttctctttgctgtgttcgatgagggcaaaagttggcatagcgaaacgaagaattccctcatgcaggatcgcgacgcagccagcgccagagcttggcccaagatgcacactgtgaacggatatgtcaataggacgcttcctggcttgattgggtgtcatcggaaaagtgtctactggcacgtgatcggaatggggacaacaccagaggtccactccatatttctcgaaggccataccttccttgttcgaaaccacagacaggcatccttggggatctctcccattacctttctcactgcccaaacgctccttcgtgacttgggtcagttccttctcttttgccatatcccgtcacaccagcatgatggtatggaagcttatgtgaaagtcgacagttgtcctgaggagccacagttgcgcatgaagaataatgaagaagccgaggattacgacgacgatctcaccgattctgagatggacgtggtgaggtttgatgacgacaactctccctccatcattcaagctcggagcggggcgaagaaacaccccaagacttgggtccactatatagcggcggaagaggaggattgggattacgctcctcttgtattggcaccagatgaccgctcatacaaaagccagtacctcaacaacggaccgcagagaattggccggaagtataagaaagtgcgatttatggcctatacagacgaaacctttaagacaagggaggccatccagcatgagagtgggattttgggacctcttctttacggcgaagttggtgataccctcctcatcatcttcaagaatcaagcttctcgcccctataacatttacccacacgggatcactgacgttaggcctttgtatagcagaagacttcccaaaggcgtgaagcatctcaaagacttccccattttgccaggcgagatctttaagtacaaatggaccattacagtggaagatggaccgactaaatcagaccctcgatgccttacgcggtactattcctccttcgtgaattgggagagagatttggcaagcggactcataggaccactcctcatctgttacaaggaatctgtagaccagaggggtaaccagattatgagtgataaacgcaatgtgatcctttttagcgtcttcgacgagaaccggtcctggtacttgaccgagaatatacaaaggttccttcccaaccccgcaggcgttcagttggaagaccctgagtttcaggccagcaatattatgcactcaatcaacggctatgtgtttgatagtctccagctttctgtttgcctccatgaagtagcctattggtacatcttgtcaattggtgctcaaacagacttcctctccgtcttcttctccggctacacctttaagcacaagggcgtgtatgaggacactctcacactctttccattttctggagaaaccgtgttcatgagcatggagaatccaggcctttggatcttgggttgccacaacagtgattttcgcaatcggggaatgactgctctcctcaaagtcagcagctgtgattggaacacaggcgactattacgaagattcttacgaggacataagtgcctactttgactccaagaataacgccattgagcccagatcattctcccagaatcctcccgtgcttaaaaggcatcagcgcgaaggtaccagaactactcttcagtctgatcaagaggagattgactatgacgacaccattagcgtggaaatgaagaaggaggatttcgatatctatgacgaagatgagaaccagtctccgcggagctttcagaagaagacgcgacactacttcattgcagcagtcgaaaggctttgggactacggtatgtcatcatcccctcatgtgttgcgcaatagagctcagagtggaagtgttccacagttcaagaaagtcgtctttcaagagtttacagatggcagcttcacacagcctctctatcggggcgagcttaacgaacatttgggactccttggtccctatatccgagccgaagtggaggacaacattatggttacctttaggaatcaagcctctcgcccctacagcttctactcctccctcatcagttatgaggaggatcagagacaaggcgctgaaccacggaagaactttgtgaaaccgaatgagacgaagacctacttctggaaagtacagcaccacatggcccccacaaaagacgaattcgattgcaaagcatgggcgtatttttcagacgttgacttggagaaagatgtacattcaggacttattggtcctttgttggtgtgtcacactaacactctcaatccagcccatggcaggcaggtgacagtccaggaattcgctcttttctttaccatctttgatgagaccaagtcctggtacttcacggaaaacatggagcgcaattgcagagccccctgtaacatacagatggaggaccctacctttaaggaaaattatcggttccacgcaatcaacggatacattatggatacactccctggccttgtgatggctcaggaccaacgaatcaggtggtacctcctcagcatgggttctaatgagaacatacactccattcacttttcaggacatgtgttcactgtccggaagaaagaagagtataagatggccctctacaatttgtatccaggcgtgtttgagaccgttgaaatgcttccctctaaagctggcatctggagagtagagtgcttgatcggagaacatcttcacgcaggtatgagcaccttgttcctcgtgtacagcaacaaatgtcagaatccacttggcatggccagtggacacattcgcgactttcagatcacagcatctggccagtatggacaatgggccccaaagttggctcgcctccattactccggtagcataaatgcgtggtccactaaagaacctttcagctggattaaggtcgatcttcttgcccccatgatcatccacggcattaagacacagggagcgaggcagaaattctcctccctctacatctcacagttcattattatgtatagtttggacggcaagaagtggcaaacttatagaggtaacagtactggaacagacatggtgttcttcggcaacgttgatagctctggcatcaaacacaacatctttaatcctcccataatagctcggtacatcagattgcatccgacccactacagcattaggagtacactccgaatggagcttatgggttgcgacttgaattcctgttcaatgccactcggaatggagtctaaagccatctctgatgcacagataaccgccagtagctactttacgaacatgtttgctacgtggtcaccctctaaggcaaggcttcatttgcaaggccggtctaatgcctggagacctcaggtgaacaacccgaaagaatggctccaggtggactttcagaagaccatgaaagtaacaggtgtcactactcagggagttaagtccttggatactagcatgtatgtgaaggagttccttatttcctcatcacaagatggccaccagtggaccctcttctttcagaatggtaaggtcaaagtgtttcagggcaatcaagacagcttcacacccgtggtgaacagtcttgatcctccactcttgacacgataccttcgaatccatccacagtcttgggagcaccagattgcattgcgcatggaagtacttggatgcgaggctcaggacctctac

SEQ ID NO: 1870 - protein, 1457 aa, synthetic construct
  REGION 1..1457: note = Variant of human B-domain deleted Factor VIII
MQIELSTCFFLCLLRFCFSATRRYYLGAVELSWDYMQSDLGELPVDARFPPRVPKSFPFNTSQVYKKTLFVEFTDHLFNIAKPRPPWMGLLGPTIQAEVYDTVVITLKNMASHPVSLHAVGVSYWKASEGAEYDDQTSQREKEDDKVFPGGSHTYVWQVLKENGPMASDPPCLTYSYWSHVDLVKDLNSGLIGALLVCREGSLAKEKTQTLAKFILLFAVFDEGKSWHSETKNSLMQDRDAASARAWPKMHTVNGYVNRTLPGLIGCHRKSVYWHVIGMGTTPEVHSIFLEGHTFLVRNHRQASLGISPITFLTAQTLLRDLGQFLLFCHIPSHQHDGMEAYVKVDSCPEEPQLRMKNNEEAEDYDDDLTDSEMDVVRFDDDNSPSIIQARSGAKKHPKTWVHYIAAEEEDWDYAPLVLAPDDRSYKSQYLNNGPQRIGRKYKKVRFMAYTDETFKTREAIQHESGILGPLLYGEVGDTLLIIFKNQASRPYNIYPHGITDVRPLYSRRLPKGVKHLKDFPILPGEIFKYKWTITVEDGPTKSDPRCLTRYYSSFVNWERDLASGLIGPLLICYKESVDQRGNQIMSDKRNVILFSVFDENRSWYLTENIQRFLPNPAGVQLEDPEFQASNIMHSINGYVFDSLQLSVCLHEVAYWYILSIGAQTDFLSVFFSGYTFKHKGVYEDTLTLFPFSGETVFMSMENPGLWILGCHNSDFRNRGMTALLKVSSCDWNTGDYYEDSYEDISAYFDSKNNAIEPRSFSQNPPVLKRHQREGTRTTLQSDQEEIDYDDTISVEMKKEDFDIYDEDENQSPRSFQKKTRHYFIAAVERLWDYGMSSSPHVLRNRAQSGSVPQFKKVVFQEFTDGSFTQPLYRGELNEHLGLLGPYIRAEVEDNIMVTFRNQASRPYSFYSSLISYEEDQRQGAEPRKNFVKPNETKTYFWKVQHHMAPTKDEFDCKAWAYFSDVDLEKDVHSGLIGPLLVCHTNTLNPAHGRQVTVQEFALFFTIFDETKSWYFTENMERNCRAPCNIQMEDPTFKENYRFHAINGYIMDTLPGLVMAQDQRIRWYLLSMGSNENIHSIHFSGHVFTVRKKEEYKMALYNLYPGVFETVEMLPSKAGIWRVECLIGEHLHAGMSTLFLVYSNKCQNPLGMASGHIRDFQITASGQYGQWAPKLARLHYSGSINAWSTKEPFSWIKVDLLAPMIIHGIKTQGARQKFSSLYISQFIIMYSLDGKKWQTYRGNSTGTDMVFFGNVDSSGIKHNIFNPPIIARYIRLHPTHYSIRSTLRMELMGCDLNSCSMPLGMESKAISDAQITASSYFTNMFATWSPSKARLHLQGRSNAWRPQVNNPKEWLQVDFQKTMKVTGVTTQGVKSLDTSMYVKEFLISSSQDGHQWTLFFQNGKVKVFQGNQDSFTPVVNSLDPPLLTRYLRIHPQSWEHQIALRMEVLGCEAQDLY

SEQ ID NO: 1871 - DNA, 4371 bp, synthetic construct
  misc_feature 1..4371: note = Variant of human B-domain deleted Factor VIII
  source 1..4371: mol_type = other DNA
atgcagattgaactgtctacctgcttcttcctctgtttgctgaggttctgctttagcgccactagacggtactaccttggcgctgtggagctgtcctgggactatatgcagagtgatttgggagagcttcccgtcgacgcacgatttcctcctcgcgttccaaagtcatttccctttaacacaagccaggtgtacaagaagacgctcttcgtcgaattcaccgatcacctgttcaatatcgccaaacccagaccaccatggatgggtcttttggggcctaccatacaagcggaggtgtatgacacagttgttatcactctcaagaacatggcttctcatccggtaagtcttcacgcagtgggcgtgtcctactggaaagcttcagaaggagccgagtatgatgatcagacatcccagagggagaaagaagacgacaaggtatttccaggtgggtctcatacctatgtgtggcaagtgctcaaagagaatggccctatggcaagcgatccgccgtgtttgacttacagctacctttcacacgttgacctcgtcaaggacctcaactccgggttgattggagccttgttggtatgcagggaaggatctcttgccaaagagaagacacagaccctggccaagtttatccttctctttgctgtgttcgatgagggcaaaagttggcatagcgaaacgaagaattccctcatgcaggatcgcgacgcagccagcgccagagcttggcccaagatgcacactgtgaacggatatgtcaataggacgcttcctggcttgattgggtgtcatcggaaaagtgtctactggcacgtgatcggaatggggacaacaccagaggtccactccatatttctcgaaggccataccttccttgttcgaaaccacagacaggcatccttggggatctctcccattacctttctcactgcccaaacgctccttcgtgacttgggtcagttccttctcttttgccatatcccgtcacaccagcatgatggtatggaagcttatgtgaaagtcgacagttgtcctgaggagccacagttgcgcatgaagaataatgaagaagccgaggattacgacgacgatctcaccgattctgagatggacgtggtgaggtttgatgacgacaactctccctccatcattcaagctcggagcggggcgaagaaacaccccaagacttgggtccactatatagcggcggaagaggaggattgggattacgctcctcttgtattggcaccagatgaccgctcatacaaaagccagtacctcaacaacggaccgcagagaattggccggaagtataagaaagtgcgatttatggcctatacagacgaaacctttaagacaagggaggccatccagcatgagagtgggattttgggacctcttctttacggcgaagttggtgataccctcctcatcatcttcaagaatcaagcttctcgcccctataacatttacccacacgggatcactgacgttaggcctttgtatagcagaagacttcccaaaggcgtgaagcatctcaaagacttccccattttgccaggcgagatctttaagtacaaatggaccattacagtggaagatggaccgactaaatcagaccctcgatgccttacgcggtactattcctccttcgtgaattgggagagagatttggcaagcggactcataggaccactcctcatctgttacaaggaatctgtagaccagaggggtaaccagattatgagtgataaacgcaatgtgatcctttttagcgtcttcgacgagaaccggtcctggtacttgaccgagaatatacaaaggttccttcccaaccccgcaggcgttcagttggaagaccctgagtttcaggccagcaatattatgcactcaatcaacggctatgtgtttgatagtctccagctttctgtttgcctccatgaagtagcctattggtacatcttgtcaattggtgctcaaacagacttcctctccgtcttcttctccggctacacctttaagcacaagggcgtgtatgaggacactctcacactctttccattttctggagaaaccgtgttcatgagcatggagaatccaggcctttggatcttgggttgccacaacagtgattttcgcaatcggggaatgactgctctcctcaaagtcagcagctgtgattggaacacaggcgactattacgaagattcttacgaggacataagtgcctactttgactccaagaataacgccattgagcccagatcattctcccagaatcctcccgtgcttaaaaggcatcagcgcgaaggtaccagaactactcttcagtctgatcaagaggagattgactatgacgacaccattagcgtggaaatgaagaaggaggatttcgatatctatgacgaagatgagaaccagtctccgcggagctttcagaagaagacgcgacactacttcattgcagcagtcgaaaggctttgggactacggtatgtcatcatcccctcatgtgttgcgcaatagagctcagagtggaagtgttccacagttcaagaaagtcgtctttcaagagtttacagatggcagcttcacacagcctctctatcggggcgagcttaacgaacatttgggactccttggtccctatatccgagccgaagtggaggacaacattatggttacctttaggaatcaagcctctcgcccctacagcttctactcctccctcatcagttatgaggaggatcagagacaaggcgctgaaccacggaagaactttgtgaaaccgaatgagacgaagacctacttctggaaagtacagcaccacatggcccccacaaaagacgaattcgattgcaaagcatgggcgtatttttcagacgttgacttggagaaagatgtacattcaggacttattggtcctttgttggtgtgtcacactaacactctcaatccagcccatggcaggcaggtgacagtccaggaattcgctcttttctttaccatctttgatgagaccaagtcctggtacttcacggaaaacatggagcgcaattgcagagccccctgtaacatacagatggaggaccctacctttaaggaaaattatcggttccacgcaatcaacggatacattatggatacactccctggccttgtgatggctcaggaccaacgaatcaggtggtacctcctcagcatgggttctaatgagaacatacactccattcacttttcaggacatgtgttcactgtccggaagaaagaagagtataagatggccctctacaatttgtgtccaggcgtgtttgagaccgttgaaatgcttccctctaaagctggcatctggagagtagagtgcttgatcggagaacatcttcacgcaggtatgagcaccttgttcctcgtgtacagcaacaaatgtcagaatccacttggcatggccagtggacacattcgcgactttcagatcacagcatctggccagtatggacaatgggccccaaagttggctcgcctccattactccggtagcataaatgcgtggtccactaaagaacctttcagctggattaaggtcgatcttcttgcccccatgatcatccacggcattaagacacagggagcgaggcagaaattctcctccctctacatctcacagttcattattatgtatagtttggacggcaagaagtggcaaacttatagaggtaacagtactggaacagacatggtgttcttcggcaacgttgatagctctggcatcaaacacaacatctttaatcctcccataatagctcggtacatcagattgcatccgacccactacagcattaggagtacactccgaatggagcttatgggttgcgacttgaattcctgttcaatgccactcggaatggagtctaaagccatctctgatgcacagataaccgccagtagctactttacgaacatgtttgctacgtggtcaccctctaaggcaaggcttcatttgcaaggccggtctaatgcctggagacctcaggtgaacaacccgaaagaatggctccaggtggactttcagaagaccatgaaagtaacaggtgtcactactcagggagttaagtccttggatactagcatgtatgtgaaggagttccttatttcctcatcacaagatggccaccagtggaccctcttctttcagaatggtaaggtcaaagtgtttcagggcaatcaagacagcttcacacccgtggtgaacagtcttgatcctccactcttgacacgataccttcgaatccatccacagtcttgggagcaccagattgcattgcgcatggaagtacttggatgcgaggctcaggacctctac

SEQ ID NO: 1872 - protein, 1457 aa, synthetic construct
  REGION 1..1457: note = Variant of human B-domain deleted Factor VIII
MQIELSTCFFLCLLRFCFSATRRYYLGAVELSWDYMQSDLGELPVDARFPPRVPKSFPFNTSQVYKKTLFVEFTDHLFNIAKPRPPWMGLLGPTIQAEVYDTVVITLKNMASHPVSLHAVGVSYWKASEGAEYDDQTSQREKEDDKVFPGGSHTYVWQVLKENGPMASDPPCLTYSYLSHVDLVKDLNSGLIGALLVCREGSLAKEKTQTLAKFILLFAVFDEGKSWHSETKNSLMQDRDAASARAWPKMHTVNGYVNRTLPGLIGCHRKSVYWHVIGMGTTPEVHSIFLEGHTFLVRNHRQASLGISPITFLTAQTLLRDLGQFLLFCHIPSHQHDGMEAYVKVDSCPEEPQLRMKNNEEAEDYDDDLTDSEMDVVRFDDDNSPSIIQARSGAKKHPKTWVHYIAAEEEDWDYAPLVLAPDDRSYKSQYLNNGPQRIGRKYKKVRFMAYTDETFKTREAIQHESGILGPLLYGEVGDTLLIIFKNQASRPYNIYPHGITDVRPLYSRRLPKGVKHLKDFPILPGEIFKYKWTITVEDGPTKSDPRCLTRYYSSFVNWERDLASGLIGPLLICYKESVDQRGNQIMSDKRNVILFSVFDENRSWYLTENIQRFLPNPAGVQLEDPEFQASNIMHSINGYVFDSLQLSVCLHEVAYWYILSIGAQTDFLSVFFSGYTFKHKGVYEDTLTLFPFSGETVFMSMENPGLWILGCHNSDFRNRGMTALLKVSSCDWNTGDYYEDSYEDISAYFDSKNNAIEPRSFSQNPPVLKRHQREGTRTTLQSDQEEIDYDDTISVEMKKEDFDIYDEDENQSPRSFQKKTRHYFIAAVERLWDYGMSSSPHVLRNRAQSGSVPQFKKVVFQEFTDGSFTQPLYRGELNEHLGLLGPYIRAEVEDNIMVTFRNQASRPYSFYSSLISYEEDQRQGAEPRKNFVKPNETKTYFWKVQHHMAPTKDEFDCKAWAYFSDVDLEKDVHSGLIGPLLVCHTNTLNPAHGRQVTVQEFALFFTIFDETKSWYFTENMERNCRAPCNIQMEDPTFKENYRFHAINGYIMDTLPGLVMAQDQRIRWYLLSMGSNENIHSIHFSGHVFTVRKKEEYKMALYNLCPGVFETVEMLPSKAGIWRVECLIGEHLHAGMSTLFLVYSNKCQNPLGMASGHIRDFQITASGQYGQWAPKLARLHYSGSINAWSTKEPFSWIKVDLLAPMIIHGIKTQGARQKFSSLYISQFIIMYSLDGKKWQTYRGNSTGTDMVFFGNVDSSGIKHNIFNPPIIARYIRLHPTHYSIRSTLRMELMGCDLNSCSMPLGMESKAISDAQITASSYFTNMFATWSPSKARLHLQGRSNAWRPQVNNPKEWLQVDFQKTMKVTGVTTQGVKSLDTSMYVKEFLISSSQDGHQWTLFFQNGKVKVFQGNQDSFTPVVNSLDPPLLTRYLRIHPQSWEHQIALRMEVLGCEAQDLY

SEQ ID NO: 1873 - DNA, 4371 bp, synthetic construct
  misc_feature 1..4371: note = Variant of human B-domain deleted Factor VIII
  source 1..4371: mol_type = other DNA
atgcagattgaactgtctacctgcttcttcctctgtttgctgaggttctgctttagcgccactagacggtactaccttggcgctgtggagctgtcctgggactatatgcagagtgatttgggagagcttcccgtcgacgcacgatttcctcctcgcgttccaaagtcatttccctttaacacaagccaggtgtacaagaagacgctcttcgtcgaattcaccgatcacctgttcaatatcgccaaacccagaccaccatggatgggtcttttggggcctaccatacaagcggaggtgtatgacacagttgttatcactctcaagaacatggcttctcatccggtaagtcttcacgcagtgggcgtgtcctactggaaagcttcagaaggagccgagtatgatgatcagacatcccagagggagaaagaagacgacaaggtatttccaggtgggtctcatacctatgtgtggcaagtgctcaaagagaatggccctatggcaagcgatccgccgtgtttgacttacagctacctttcacacgttgacctcgtcaaggacctcaactccgggttgattggagccttgttggtatgcagggaaggatctcttgccaaagagaagacacagaccctggccaagtttatccttctctttgctgtgttcgatgagggcaaaagttggcatagcgaaacgaagaattccctcatgcaggatcgcgacgcagccagcgccagagcttggcccaagatgcacactgtgaacggatatgtcaataggacgcttcctggcttgattgggtgtcatcggaaaagtgtctactggcacgtgatcggaatggggacaacaccagaggtccactccatatttctcgaaggccataccttccttgttcgaaaccacagacaggcatccttggggatctctcccattacctttctcactgcccaaacgctccttcgtgacttgggtcagttccttctcttttgccatatcccgtcacaccagcatgatggtatggaagcttatgtgaaagtcgacagttgtcctgaggagccacagttgcgcatgaagaataatgaagaagccgaggattacgacgacgatctcaccgattctgagatggacgtggtgaggtttgatgacgacaactctccctccatcattcaagctcggagcggggcgaagaaacaccccaagacttgggtccactatatagcggcggaagaggaggattgggattacgctcctcttgtattggcaccagatgaccgctcatacaaaagccagtacctcaacaacggaccgcagagaattggccggaagtataagaaagtgcgatttatggcctatacagacgaaacctttaagacaagggaggccatccagcatgagagtgggattttgggacctcttctttacggcgaagttggtgataccctcctcatcatcttcaagaatcaagcttctcgcccctataacatttacccacacgggatcactgacgttaggcctttgtatagcagaagacttcccaaaggcgtgaagcatctcaaagacttccccattttgccaggcgagatctttaagtacaaatggaccattacagtggaagatggaccgactaaatcagaccctcgatgccttacgcggtactattcctccttcgtgaattgggagagagatttggcaagcggactcataggaccactcctcatctgttacaaggaatctgtagaccagaggggtaaccagattatgagtgataaacgcaatgtgatcctttttagcgtcttcgacgagaaccggtcctggtacttgaccgagaatatacaaaggttccttcccaaccccgcaggcgttcagttggaagaccctgagtttcaggccagcaatattatgcactcaatcaacggctatgtgtttgatagtctccagctttctgtttgcctccatgaagtagcctattggtacatcttgtcaattggtgctcaaacagacttcctctccgtcttcttctccggctacacctttaagcacaagggcgtgtatgaggacactctcacactctttccattttctggagaaaccgtgttcatgagcatggagaatccaggcctttggatcttgggttgccacaacagtgattttcgcaatcggggaatgactgctctcctcaaagtcagcagctgtgattggaacacaggcgactattacgaagattcttacgagaggataagtgcctactttgactccaagaataacgccattgagcccagatcattctcccagaatcctcccgtgcttaaaaggcatcagcgcgaaggtaccagaactactcttcagtctgatcaagaggagattgactatgacgacaccattagcgtggaaatgaagaaggaggatttcgatatctatgacgaagatgagaaccagtctccgcggagctttcagaagaagacgcgacactacttcattgcagcagtcgaaaggctttgggactacggtatgtcatcatcccctcatgtgttgcgcaatagagctcagagtggaagtgttccacagttcaagaaagtcgtctttcaagagtttacagatggcagcttcacacagcctctctatcggggcgagcttaacgaacatttgggactccttggtccctatatccgagccgaagtggaggacaacattatggttacctttaggaatcaagcctctcgcccctacagcttctactcctccctcatcagttatgaggaggatcagagacaaggcgctgaaccacggaagaactttgtgaaaccgaatgagacgaagacctacttctggaaagtacagcaccacatggcccccacaaaagacgaattcgattgcaaagcatgggcgtatttttcagacgttgacttggagaaagatgtacattcaggacttattggtcctttgttggtgtgtcacactaacactctcaatccagcccatggcaggcaggtgacagtccaggaattcgctcttttctttaccatctttgatgagaccaagtcctggtacttcacggaaaacatggagcgcaattgcagagccccctgtaacatacagatggaggaccctacctttaaggaaaattatcggttccacgcaatcaacggatacattatggatacactccctggccttgtgatggctcaggaccaacgaatcaggtggtacctcctcagcatgggttctaatgagaacatacactccattcacttttcaggacatgtgttcactgtccggaagaaagaagagtataagatggccctctacaatttgtatccaggcgtgtttgagaccgttgaaatgcttccctctaaagctggcatctggagagtagagtgcttgatcggagaacatcttcacgcaggtatgagcaccttgttcctcgtgtacagcaacaaatgtcagaatccacttggcatggccagtggacacattcgcgactttcagatcacagcatctggccagtatggacaatgggccccaaagttggctcgcctccattactccggtagcataaatgcgtggtccactaaagaacctttcagctggattaaggtcgatcttcttgcccccatgatcatccacggcattaagacacagggagcgaggcagaaattctcctccctctacatctcacagttcattattatgtatagtttggacggcaagaagtggcaaacttatagaggtaacagtactggaacagacatggtgttcttcggcaacgttgatagctctggcatcaaacacaacatctttaatcctcccataatagctcggtacatcagattgcatccgacccactacagcattaggagtacactccgaatggagcttatgggttgcgacttgaattcctgttcaatgccactcggaatggagtctaaagccatctctgatgcacagataaccgccagtagctactttacgaacatgtttgctacgtggtcaccctctaaggcaaggcttcatttgcaaggccggtctaatgcctggagacctcaggtgaacaacccgaaagaatggctccaggtggactttcagaagaccatgaaagtaacaggtgtcactactcagggagttaagtccttggatactagcatgtatgtgaaggagttccttatttcctcatcacaagatggccaccagtggaccctcttctttcagaatggtaaggtcaaagtgtttcagggcaatcaagacagcttcacacccgtggtgaacagtcttgatcctccactcttgacacgataccttcgaatccatccacagtcttgggagcaccagattgcattgcgcatggaagtacttggatgcgaggctcaggacctctac

SEQ ID NO: 1874 - protein, 1457 aa, synthetic construct
  REGION 1..1457: note = Variant of human B-domain deleted Factor VIII
MQIELSTCFFLCLLRFCFSATRRYYLGAVELSWDYMQSDLGELPVDARFPPRVPKSFPFNTSQVYKKTLFVEFTDHLFNIAKPRPPWMGLLGPTIQAEVYDTVVITLKNMASHPVSLHAVGVSYWKASEGAEYDDQTSQREKEDDKVFPGGSHTYVWQVLKENGPMASDPPCLTYSYLSHVDLVKDLNSGLIGALLVCREGSLAKEKTQTLAKFILLFAVFDEGKSWHSETKNSLMQDRDAASARAWPKMHTVNGYVNRTLPGLIGCHRKSVYWHVIGMGTTPEVHSIFLEGHTFLVRNHRQASLGISPITFLTAQTLLRDLGQFLLFCHIPSHQHDGMEAYVKVDSCPEEPQLRMKNNEEAEDYDDDLTDSEMDVVRFDDDNSPSIIQARSGAKKHPKTWVHYIAAEEEDWDYAPLVLAPDDRSYKSQYLNNGPQRIGRKYKKVRFMAYTDETFKTREAIQHESGILGPLLYGEVGDTLLIIFKNQASRPYNIYPHGITDVRPLYSRRLPKGVKHLKDFPILPGEIFKYKWTITVEDGPTKSDPRCLTRYYSSFVNWERDLASGLIGPLLICYKESVDQRGNQIMSDKRNVILFSVFDENRSWYLTENIQRFLPNPAGVQLEDPEFQASNIMHSINGYVFDSLQLSVCLHEVAYWYILSIGAQTDFLSVFFSGYTFKHKGVYEDTLTLFPFSGETVFMSMENPGLWILGCHNSDFRNRGMTALLKVSSCDWNTGDYYEDSYERISAYFDSKNNAIEPRSFSQNPPVLKRHQREGTRTTLQSDQEEIDYDDTISVEMKKEDFDIYDEDENQSPRSFQKKTRHYFIAAVERLWDYGMSSSPHVLRNRAQSGSVPQFKKVVFQEFTDGSFTQPLYRGELNEHLGLLGPYIRAEVEDNIMVTFRNQASRPYSFYSSLISYEEDQRQGAEPRKNFVKPNETKTYFWKVQHHMAPTKDEFDCKAWAYFSDVDLEKDVHSGLIGPLLVCHTNTLNPAHGRQVTVQEFALFFTIFDETKSWYFTENMERNCRAPCNIQMEDPTFKENYRFHAINGYIMDTLPGLVMAQDQRIRWYLLSMGSNENIHSIHFSGHVFTVRKKEEYKMALYNLYPGVFETVEMLPSKAGIWRVECLIGEHLHAGMSTLFLVYSNKCQNPLGMASGHIRDFQITASGQYGQWAPKLARLHYSGSINAWSTKEPFSWIKVDLLAPMIIHGIKTQGARQKFSSLYISQFIIMYSLDGKKWQTYRGNSTGTDMVFFGNVDSSGIKHNIFNPPIIARYIRLHPTHYSIRSTLRMELMGCDLNSCSMPLGMESKAISDAQITASSYFTNMFATWSPSKARLHLQGRSNAWRPQVNNPKEWLQVDFQKTMKVTGVTTQGVKSLDTSMYVKEFLISSSQDGHQWTLFFQNGKVKVFQGNQDSFTPVVNSLDPPLLTRYLRIHPQSWEHQIALRMEVLGCEAQDLY

SEQ ID NO: 1875 - DNA, 4371 bp, synthetic construct
  misc_feature 1..4371: note = Variant of human B-domain deleted Factor VIII
  source 1..4371: mol_type = other DNA
atgcagattgaactgtctacctgcttcttcctctgtttgctgaggttctgctttagcgccactagacggtactaccttggcgctgtggagctgtcctgggactatatgcagagtgatttgggagagcttcccgtcgacgcacgatttcctcctcgcgttccaaagtcatttccctttaacacaagccaggtgtacaagaagacgctcttcgtcgaattcaccgatcacctgttcaatatcgccaaacccagaccaccatggatgggtcttttggggcctaccatacaagcggaggtgtatgacacagttgttatcactctcaagaacatggcttctcatccggtaagtcttcacgcagtgggcgtgtcctactggaaagcttcagaaggagccgagtatgatgatcagacatcccagagggagaaagaagacgacaaggtatttccaggtgggtctcatacctatgtgtggcaagtgctcaaagagaatggccctatggcaagcgatccgccgtgtttgacttacagctacctttcacacgttgacctcgtcaaggacctcaactccgggttgattggagccttgttggtatgcagggaaggatctcttgccaaagagaagacacagaccctggccaagtttatccttctctttgctgtgttcgatgagggcaaaagttggcatagcgaaacgaagaattccctcatgcaggatcgcgacgcagccagcgccagagcttggcccaagatgcacactgtgaacggatatgtcaataggacgcttcctggcttgattgggtgtcatcggaaaagtgtctactggcacgtgatcggaatggggacaacaccagaggtccactccatatttctcgaaggccataccttccttgttcgaaaccacagacaggcatccttggggatctctcccattacctttctcactgcccaaacgctccttcgtgacttgggtcagttccttctcttttgccatatcccgtcacaccagcatgatggtatggaagcttatgtgaaagtcgacagttgtcctgaggagccacagttgcgcatgaagaataatgaagaagccgaggattacgacgacgatctcaccgattctgagatggacgtggtgaggtttgatgacgacaactctccctccatcattcaagctcggagcggggcgaagaaacaccccaagacttgggtccactatatagcggcggaagaggaggattgggattacgctcctcttgtattggcaccagatgaccgctcatacaaaagccagtacctcaacaacggaccgcagagaattggccggaagtataagaaagtgcgatttatggcctatacagacgaaacctttaagacaagggaggccatccagcatgagagtgggattttgggacctcttctttacggcgaagttggtgataccctcctcatcatcttcaagaatcaagcttctcgcccctataacatttacccacacgggatcactgacgttaggcctttgtatagcagaagacttcccaaaggcgtgaagcatctcaaagacttccccattttgccaggcgagatctttaagtacaaatggaccattacagtggaagatggaccgactaaatcagaccctcgatgccttacgcggtactattcctccttcgtgaattgggagagagatttggcaagcggactcataggaccactcctcatctgttacaaggaatctgtagaccagaggggtaaccagattatgagtgataaacgcaatgtgatcctttttagcgtcttcgacgagaaccggtcctggtacttgaccgagaatatacaaaggttccttcccaaccccgcaggcgttcagttggaagaccctgagtttcaggccagcaatattatgcactcaatcaacggctatgtgtttgatagtctccagctttctgtttgcctccatgaagtagcctattggtacatcttgtcaattggtgctcaaacagacttcctctccgtcttcttctccggctacacctttaagcacaagggcgtgtatgaggacactctcacactctttccattttctggagaaaccgtgttcatgagcatggagaatccaggcctttggatcttgggttgccacaacagtgattttcgcaatcggggaatgactgctctcctcaaagtcagcagctgtgattggaacacaggcgactatagggaagattcttacgaggacataagtgcctactttgactccaagaataacgccattgagcccagatcattctcccagaatcctcccgtgcttaaaaggcatcagcgcgaaggtaccagaactactcttcagtctgatcaagaggagattgactatgacgacaccattagcgtggaaatgaagaaggaggatttcgatatctatgacgaagatgagaaccagtctccgcggagctttcagaagaagacgcgacactacttcattgcagcagtcgaaaggctttgggactacggtatgtcatcatcccctcatgtgttgcgcaatagagctcagagtggaagtgttccacagttcaagaaagtcgtctttcaagagtttacagatggcagcttcacacagcctctctatcggggcgagcttaacgaacatttgggactccttggtccctatatccgagccgaagtggaggacaacattatggttacctttaggaatcaagcctctcgcccctacagcttctactcctccctcatcagttatgaggaggatcagagacaaggcgctgaaccacggaagaactttgtgaaaccgaatgagacgaagacctacttctggaaagtacagcaccacatggcccccacaaaagacgaattcgattgcaaagcatgggcgtatttttcagacgttgacttggagaaagatgtacattcaggacttattggtcctttgttggtgtgtcacactaacactctcaatccagcccatggcaggcaggtgacagtccaggaattcgctcttttctttaccatctttgatgagaccaagtcctggtacttcacggaaaacatggagcgcaattgcagagccccctgtaacatacagatggaggaccctacctttaaggaaaattatcggttccacgcaatcaacggatacattatggatacactccctggccttgtgatggctcaggaccaacgaatcaggtggtacctcctcagcatgggttctaatgagaacatacactccattcacttttcaggacatgtgttcactgtccggaagaaagaagagtataagatggccctctacaatttgtatccaggcgtgtttgagaccgttgaaatgcttccctctaaagctggcatctggagagtagagtgcttgatcggagaacatcttcacgcaggtatgagcaccttgttcctcgtgtacagcaacaaatgtcagaatccacttggcatggccagtggacacattcgcgactttcagatcacagcatctggccagtatggacaatgggccccaaagttggctcgcctccattactccggtagcataaatgcgtggtccactaaagaacctttcagctggattaaggtcgatcttcttgcccccatgatcatccacggcattaagacacagggagcgaggcagaaattctcctccctctacatctcacagttcattattatgtatagtttggacggcaagaagtggcaaacttatagaggtaacagtactggaacagacatggtgttcttcggcaacgttgatagctctggcatcaaacacaacatctttaatcctcccataatagctcggtacatcagattgcatccgacccactacagcattaggagtacactccgaatggagcttatgggttgcgacttgaattcctgttcaatgccactcggaatggagtctaaagccatctctgatgcacagataaccgccagtagctactttacgaacatgtttgctacgtggtcaccctctaaggcaaggcttcatttgcaaggccggtctaatgcctggagacctcaggtgaacaacccgaaagaatggctccaggtggactttcagaagaccatgaaagtaacaggtgtcactactcagggagttaagtccttggatactagcatgtatgtgaaggagttccttatttcctcatcacaagatggccaccagtggaccctcttctttcagaatggtaaggtcaaagtgtttcagggcaatcaagacagcttcacacccgtggtgaacagtcttgatcctccactcttgacacgataccttcgaatccatccacagtcttgggagcaccagattgcattgcgcatggaagtacttggatgcgaggctcaggacctctac

SEQ ID NO: 1876 - protein, 1457 aa, synthetic construct
  REGION 1..1457: note = Variant of human B-domain deleted Factor VIII
MQIELSTCFFLCLLRFCFSATRRYYLGAVELSWDYMQSDLGELPVDARFPPRVPKSFPFNTSQVYKKTLFVEFTDHLFNIAKPRPPWMGLLGPTIQAEVYDTVVITLKNMASHPVSLHAVGVSYWKASEGAEYDDQTSQREKEDDKVFPGGSHTYVWQVLKENGPMASDPPCLTYSYLSHVDLVKDLNSGLIGALLVCREGSLAKEKTQTLAKFILLFAVFDEGKSWHSETKNSLMQDRDAASARAWPKMHTVNGYVNRTLPGLIGCHRKSVYWHVIGMGTTPEVHSIFLEGHTFLVRNHRQASLGISPITFLTAQTLLRDLGQFLLFCHIPSHQHDGMEAYVKVDSCPEEPQLRMKNNEEAEDYDDDLTDSEMDVVRFDDDNSPSIIQARSGAKKHPKTWVHYIAAEEEDWDYAPLVLAPDDRSYKSQYLNNGPQRIGRKYKKVRFMAYTDETFKTREAIQHESGILGPLLYGEVGDTLLIIFKNQASRPYNIYPHGITDVRPLYSRRLPKGVKHLKDFPILPGEIFKYKWTITVEDGPTKSDPRCLTRYYSSFVNWERDLASGLIGPLLICYKESVDQRGNQIMSDKRNVILFSVFDENRSWYLTENIQRFLPNPAGVQLEDPEFQASNIMHSINGYVFDSLQLSVCLHEVAYWYILSIGAQTDFLSVFFSGYTFKHKGVYEDTLTLFPFSGETVFMSMENPGLWILGCHNSDFRNRGMTALLKVSSCDWNTGDYREDSYEDISAYFDSKNNAIEPRSFSQNPPVLKRHQREGTRTTLQSDQEEIDYDDTISVEMKKEDFDIYDEDENQSPRSFQKKTRHYFIAAVERLWDYGMSSSPHVLRNRAQSGSVPQFKKVVFQEFTDGSFTQPLYRGELNEHLGLLGPYIRAEVEDNIMVTFRNQASRPYSFYSSLISYEEDQRQGAEPRKNFVKPNETKTYFWKVQHHMAPTKDEFDCKAWAYFSDVDLEKDVHSGLIGPLLVCHTNTLNPAHGRQVTVQEFALFFTIFDETKSWYFTENMERNCRAPCNIQMEDPTFKENYRFHAINGYIMDTLPGLVMAQDQRIRWYLLSMGSNENIHSIHFSGHVFTVRKKEEYKMALYNLYPGVFETVEMLPSKAGIWRVECLIGEHLHAGMSTLFLVYSNKCQNPLGMASGHIRDFQITASGQYGQWAPKLARLHYSGSINAWSTKEPFSWIKVDLLAPMIIHGIKTQGARQKFSSLYISQFIIMYSLDGKKWQTYRGNSTGTDMVFFGNVDSSGIKHNIFNPPIIARYIRLHPTHYSIRSTLRMELMGCDLNSCSMPLGMESKAISDAQITASSYFTNMFATWSPSKARLHLQGRSNAWRPQVNNPKEWLQVDFQKTMKVTGVTTQGVKSLDTSMYVKEFLISSSQDGHQWTLFFQNGKVKVFQGNQDSFTPVVNSLDPPLLTRYLRIHPQSWEHQIALRMEVLGCEAQDLY

SEQ ID NO: 1877 - DNA, 4371 bp, synthetic construct
  misc_feature 1..4371: note = Variant of human B-domain deleted Factor VIII
  source 1..4371: mol_type = other DNA
atgcagattgaactgtctacctgcttcttcctctgtttgctgaggttctgctttagcgccactagacggtactaccttggcgctgtggagctgtcctgggactatatgcagagtgatttgggagagcttcccgtcgacgcacgatttcctcctcgcgttccaaagtcatttccctttaacacaagccaggtgtacaagaagacgctcttcgtcgaattcaccgatcacctgttcaatatcgccaaacccagaccaccatggatgggtcttttggggcctaccatacaagcggaggtgtatgacacagttgttatcactctcaagaacatggcttctcatccggtaagtcttcacgcagtgggcgtgtcctactggaaagcttcagaaggagccgagtatgatgatcagacatcccagagggagaaagaagacgacaaggtatttccaggtgggtctcatacctatgtgtggcaagtgctcaaagagaatggccctatggcaagcgatccgccgtgtttgacttacagctacctttcacacgttgacctcgtcaaggacctcaactccgggttgattggagccttgttggtatgcagggaaggatctcttgccaaagagaagacacagaccctggccaagtttatccttctctttgctgtgttcgatgagggcaaaagttggcatagcgaaacgaagaattccctcatgcaggatcgcgacgcagccagcgccagagcttggcccaagatgcacactgtgaacggatatgtcaataggacgcttcctggcttgattgggtgtcatcggaaaagtgtctactggcacgtgatcggaatggggacaacaccagaggtccactccatatttctcgaaggccataccttccttgttcgaaaccacagacaggcatccttggggatctctcccattacctttctcactgcccaaacgctccttcgtgacttgggtcagttccttctcttttgccatatcccgtcacaccagcatgatggtatggaagcttatgtgaaagtcgacagttgtcctgaggagccacagttgcgcatgaagaataatgaagaagccgaggattacgacgacgatctcaccgattctgagatggacgtggtgaggtttgatgacgacaactctccctccatcattcaagctcggagcggggcgaagaaacaccccaagacttgggtccactatatagcggcggaagaggaggattgggattacgctcctcttgtattggcaccagatgaccgctcatacaaaagccagtacctcaacaacggaccgcagagaattggccggaagtataagaaagtgcgatttatggcctatacagacgaaacctttaagacaagggaggccatccagcatgagagtgggattttgggacctcttctttacggcgaagttggtgataccctcctcatcatcttcaagaatcaagcttctcgcccctataacatttacccacacgggatcactgacgttaggcctttgtatagcagaagacttcccaaaggcgtgaagcatctcaaagacttccccattttgccaggcgagatctttaagtacaaatggaccattacagtggaagatggaccgactaaatcagaccctcgatgccttacgcggtactattcctccttcgtgaattgggagagagatttggcaagcggactcataggaccactcctcatctgttacaaggaatctgtagaccagaggggtaaccagattatgagtgataaacgcaatgtgatcctttttagcgtcttcgacgagaaccggtcctggtacttgaccgagaatatacaaaggttccttcccaaccccgcaggcgttcagttggaagaccctgagtttcaggccagcaatattatgcactcaatcaacggctatgtgtttgatagtctccagctttctgtttgcctccatgaagtagcctattggtacatcttgtcaattggtgctcaaacagacttcctctccgtcttcttctccggctacacctttaagcacaagggcgtgtatgaggacactctcacactctttccattttctggagaaaccgtgttcatgagcatggagaatccaggcctttggatcttgggttgccacaacagtgattttcgcaatcggggaatgactgctctcctcaaagtcagcagctgtgattggaacacaggcgactattacgaagattcttacgaggacataagtgcctactttgactccaagaataacgccattgagcccagatcattctcccagaatcctcccgtgcttaaaaggcatcagcgcgaaggtaccagaactactcttcagtctgatcaagaggagattgactatgacgacaccattagcgtggaaatgaagaaggaggatttcgatatctatgacgaagatgagaaccagtctccgcggagctttcagaagaagacgcgacactacttcattgcagcagtcgaaaggctttgggactacggtatgtcatcatcccctcatgtgttgcgcaatagagctcagagtggaagtgttccacagttcaagaaagtcgtctttcaagagtttacagatggcagcttcacacagcctctctatcggggcgagcttaacgaacatttgggactccttggtccctatatccgagccgaagtggaggacaacattatggttacctttaggaatcaagcctctcgcccctacagcttctactcctccctcatcagttatgaggaggatcagagacaaggcgctgaaccacggaagaactttgtgaaaccgaatgagacgaagacctacttctggaaagtacagcaccacatggcccccacaaaagacgaattcgattgcaaagcatgggcgtatttttcagacgttgacttggagaaagatgtacattcaggacttattggtcctttgttggtgtgtcacactaacactctcaatccagcccatggcaggcaggtgacagtccaggaattcgctcttttctttaccatctttgatgagaccaagtcctggtacttcacggaaaacatggagcgcaattgcagagccccctgtaacatacagatggaggaccctacctttaaggaaaattatcggttccacgcaatcaacggatacattatggatacactccctggccttgtgatggctcaggaccaacgaatcaggtggtacctcctcagcatgggttctaatgagaacatacactccattcacttttcaggacatgtgttcactgtccggaagagtgaagagtataagatggccctctacaatttgtatccaggcgtgtttgagaccgttgaaatgcttccctctaaagctggcatctggagagtagagtgcttgatcggagaacatcttcacgcaggtatgagcaccttgttcctcgtgtacagcaacaaatgtcagaatccacttggcatggccagtggacacattcgcgactttcagatcacagcatctggccagtatggacaatgggccccaaagttggctcgcctccattactccggtagcataaatgcgtggtccactaaagaacctttcagctggattaaggtcgatcttcttgcccccatgatcatccacggcattaagacacagggagcgaggcagaaattctcctccctctacatctcacagttcattattatgtatagtttggacggcaagaagtggcaaacttatagaggtaacagtactggaacagacatggtgttcttcggcaacgttgatagctctggcatcaaacacaacatctttaatcctcccataatagctcggtacatcagattgcatccgacccactacagcattaggagtacactccgaatggagcttatgggttgcgacttgaattcctgttcaatgccactcggaatggagtctaaagccatctctgatgcacagataaccgccagtagctactttacgaacatgtttgctacgtggtcaccctctaaggcaaggcttcatttgcaaggccggtctaatgcctggagacctcaggtgaacaacccgaaagaatggctccaggtggactttcagaagaccatgaaagtaacaggtgtcactactcagggagttaagtccttggatactagcatgtatgtgaaggagttccttatttcctcatcacaagatggccaccagtggaccctcttctttcagaatggtaaggtcaaagtgtttcagggcaatcaagacagcttcacacccgtggtgaacagtcttgatcctccactcttgacacgataccttcgaatccatccacagtcttgggagcaccagattgcattgcgcatggaagtacttggatgcgaggctcaggacctctac

SEQ ID NO: 1878 - protein, 1457 aa, synthetic construct
  REGION 1..1457: note = Variant of human B-domain deleted Factor VIII
MQIELSTCFFLCLLRFCFSATRRYYLGAVELSWDYMQSDLGELPVDARFPPRVPKSFPFNTSQVYKKTLFVEFTDHLFNIAKPRPPWMGLLGPTIQAEVYDTVVITLKNMASHPVSLHAVGVSYWKASEGAEYDDQTSQREKEDDKVFPGGSHTYVWQVLKENGPMASDPPCLTYSYLSHVDLVKDLNSGLIGALLVCREGSLAKEKTQTLAKFILLFAVFDEGKSWHSETKNSLMQDRDAASARAWPKMHTVNGYVNRTLPGLIGCHRKSVYWHVIGMGTTPEVHSIFLEGHTFLVRNHRQASLGISPITFLTAQTLLRDLGQFLLFCHIPSHQHDGMEAYVKVDSCPEEPQLRMKNNEEAEDYDDDLTDSEMDVVRFDDDNSPSIIQARSGAKKHPKTWVHYIAAEEEDWDYAPLVLAPDDRSYKSQYLNNGPQRIGRKYKKVRFMAYTDETFKTREAIQHESGILGPLLYGEVGDTLLIIFKNQASRPYNIYPHGITDVRPLYSRRLPKGVKHLKDFPILPGEIFKYKWTITVEDGPTKSDPRCLTRYYSSFVNWERDLASGLIGPLLICYKESVDQRGNQIMSDKRNVILFSVFDENRSWYLTENIQRFLPNPAGVQLEDPEFQASNIMHSINGYVFDSLQLSVCLHEVAYWYILSIGAQTDFLSVFFSGYTFKHKGVYEDTLTLFPFSGETVFMSMENPGLWILGCHNSDFRNRGMTALLKVSSCDWNTGDYYEDSYEDISAYFDSKNNAIEPRSFSQNPPVLKRHQREGTRTTLQSDQEEIDYDDTISVEMKKEDFDIYDEDENQSPRSFQKKTRHYFIAAVERLWDYGMSSSPHVLRNRAQSGSVPQFKKVVFQEFTDGSFTQPLYRGELNEHLGLLGPYIRAEVEDNIMVTFRNQASRPYSFYSSLISYEEDQRQGAEPRKNFVKPNETKTYFWKVQHHMAPTKDEFDCKAWAYFSDVDLEKDVHSGLIGPLLVCHTNTLNPAHGRQVTVQEFALFFTIFDETKSWYFTENMERNCRAPCNIQMEDPTFKENYRFHAINGYIMDTLPGLVMAQDQRIRWYLLSMGSNENIHSIHFSGHVFTVRKSEEYKMALYNLYPGVFETVEMLPSKAGIWRVECLIGEHLHAGMSTLFLVYSNKCQNPLGMASGHIRDFQITASGQYGQWAPKLARLHYSGSINAWSTKEPFSWIKVDLLAPMIIHGIKTQGARQKFSSLYISQFIIMYSLDGKKWQTYRGNSTGTDMVFFGNVDSSGIKHNIFNPPIIARYIRLHPTHYSIRSTLRMELMGCDLNSCSMPLGMESKAISDAQITASSYFTNMFATWSPSKARLHLQGRSNAWRPQVNNPKEWLQVDFQKTMKVTGVTTQGVKSLDTSMYVKEFLISSSQDGHQWTLFFQNGKVKVFQGNQDSFTPVVNSLDPPLLTRYLRIHPQSWEHQIALRMEVLGCEAQDLY

SEQ ID NO: 1879 - DNA, 4371 bp, synthetic construct
  misc_feature 1..4371: note = Variant of human B-domain deleted Factor VIII
  source 1..4371: mol_type = other DNA
atgcagattgaactgtctacctgcttcttcctctgtttgctgaggttctgctttagcgccactagacggtactaccttggcgctgtggagctgtcctgggactatatgcagagtgatttgggagagcttcccgtcgacgcacgatttcctcctcgcgttccaaagtcatttccctttaacacaagccaggtgtacaagaagacgctcttcgtcgaattcaccgatcacctgttcaatatcgccaaacccagaccaccatggatgggtcttttggggcctaccatacaagcggaggtgtatgacacagttgttatcactctcaagaacatggcttctcatccggtaagtcttcacgcagtgggcgtgtcctactggaaagcttcagaaggagccgagtatgatgatcagacatcccagagggagaaagaagacgacaaggtatttccaggtgggtctcatacctatgtgtggcaagtgctcaaagagaatggccctatggcaagcgatccgccgtgtttgacttacagctacctttcacacgttgacctcgtcaaggacctcaactccgggttgattggagccttgttggtatgcagggaaggatctcttgccaaagagaagacacagaccctggccaagtttatccttctctttgctgtgttcgatgagggcaaaagttggcatagcgaaacgaagaattccctcatgcaggatcgcgacgcagccagcgccagagcttggcccaagatgcacactgtgaacggatatgtcaataggacgcttcctggcttgattgggtgtcatcggaaaagtgtctactggcacgtgatcggaatggggacaacaccagaggtccactccatatttctcgaaggccataccttccttgttcgaaaccacagacaggcatccttggggatctctcccattacctttctcactgcccaaacgctccttcgtgacttgggtcagttccttctcttttgccatatcccgtcacaccagcatgatggtatggaagcttatgtgaaagtcgacagttgtcctgaggagccacagttgcgcatgaagaataatgaagaagccgaggattacgacgacgatctcaccgattctgagatggacgtggtgaggtttgatgacgacaactctccctccatcattcaagctcggagcggggcgaagaaacaccccaagacttgggtccactatatagcggcggaagaggaggattgggattacgctcctcttgtattggcaccagatgaccgctcatacaaaagccagtacctcaacaacggaccgcagagaattggccggaagtataagaaagtgcgatttatggcctatacagacgaaacctttaagacaagggaggccatccagcatgagagtgggattttgggacctcttctttacggcgaagttggtgataccctcctcatcatcttcaagaatcaagcttctcgcccctataacatttacccacacgggatcactgacgttaggcctttgtatagcagaagacttcccaaaggcgtgaagcatctcaaagacttccccattttgccaggcgagatctttaagtacaaatggaccattacagtggaagatggaccgactaaatcagaccctcgatgccttacgcggtactattcctccttcgtgaattgggagagagatttggcaagcggactcataggaccactcctcatctgttacaaggaatctgtagaccagaggggtaaccagattatgagtgataaacgcaatgtgatcctttttagcgtcttcgacgagaaccggtcctggtacttgaccgagaatatacaaaggttccttcccaaccccgcaggcgttcagttggaagaccctgagtttcaggccagcaatattatgcactcaatcaacggctatgtgtttgatagtctccagctttctgtttgcctccatgaagtagcctattggtacatcttgtcaattggtgctcaaacagacttcctctccgtcttcttctccggctacacctttaagcacaagggcgtgtatgaggacactctcacactctttccattttctggagaaaccgtgttcatgagcatggagaatccaggcctttggatcttgggttgctcgaacagtgattttcgcaatcggggaatgactgctctcctcaaagtcagcagctgtgattggaacacaggcgactattacgaagattcttacgaggacataagtgcctactttgactccaagaataacgccattgagcccagatcattctcccagaatcctcccgtgcttaaaaggcatcagcgcgaaggtaccagaactactcttcagtctgatcaagaggagattgactatgacgacaccattagcgtggaaatgaagaaggaggatttcgatatctatgacgaagatgagaaccagtctccgcggagctttcagaagaagacgcgacactacttcattgcagcagtcgaaaggctttgggactacggtatgtcatcatcccctcatgtgttgcgcaatagagctcagagtggaagtgttccacagttcaagaaagtcgtctttcaagagtttacagatggcagcttcacacagcctctctatcggggcgagcttaacgaacatttgggactccttggtccctatatccgagccgaagtggaggacaacattatggttacctttaggaatcaagcctctcgcccctacagcttctactcctccctcatcagttatgaggaggatcagagacaaggcgctgaaccacggaagaactttgtgaaaccgaatgagacgaagacctacttctggaaagtacagcaccacatggcccccacaaaagacgaattcgattgcaaagcatgggcgtatttttcagacgttgacttggagaaagatgtacattcaggacttattggtcctttgttggtgtgtcacactaacactctcaatccagcccatggcaggcaggtgacagtccaggaattcgctcttttctttaccatctttgatgagaccaagtcctggtacttcacggaaaacatggagcgcaattgcagagccccctgtaacatacagatggaggaccctacctttaaggaaaattatcggttccacgcaatcaacggatacattatggatacactccctggccttgtgatggctcaggaccaacgaatcaggtggtacctcctcagcatgggttctaatgagaacatacactccattcacttttcaggacatgtgttcactgtccggaagaaagaagagtataagatggccctctacaatttgtatccaggcgtgtttgagaccgttgaaatgcttccctctaaagctggcatctggagagtagagtgcttgatcggagaacatcttcacgcaggtatgagcaccttgttcctcgtgtacagcaacaaatgtcagaatccacttggcatggccagtggacacattcgcgactttcagatcacagcatctggccagtatggacaatgggccccaaagttggctcgcctccattactccggtagcataaatgcgtggtccactaaagaacctttcagctggattaaggtcgatcttcttgcccccatgatcatccacggcattaagacacagggagcgaggcagaaattctcctccctctacatctcacagttcattattatgtatagtttggacggcaagaagtggcaaacttatagaggtaacagtactggaacagacatggtgttcttcggcaacgttgatagctctggcatcaaacacaacatctttaatcctcccataatagctcggtacatcagattgcatccgacccactacagcattaggagtacactccgaatggagcttatgggttgcgacttgaattcctgttcaatgccactcggaatggagtctaaagccatctctgatgcacagataaccgccagtagctactttacgaacatgtttgctacgtggtcaccctctaaggcaaggcttcatttgcaaggccggtctaatgcctggagacctcaggtgaacaacccgaaagaatggctccaggtggactttcagaagaccatgaaagtaacaggtgtcactactcagggagttaagtccttggatactagcatgtatgtgaaggagttccttatttcctcatcacaagatggccaccagtggaccctcttctttcagaatggtaaggtcaaagtgtttcagggcaatcaagacagcttcacacccgtggtgaacagtcttgatcctccactcttgacacgataccttcgaatccatccacagtcttgggagcaccagattgcattgcgcatggaagtacttggatgcgaggctcaggacctctac

SEQ ID NO: 1880 - protein, 1457 aa, synthetic construct
  REGION 1..1457: note = Variant of human B-domain deleted Factor VIII
MQIELSTCFFLCLLRFCFSATRRYYLGAVELSWDYMQSDLGELPVDARFPPRVPKSFPFNTSQVYKKTLFVEFTDHLFNIAKPRPPWMGLLGPTIQAEVYDTVVITLKNMASHPVSLHAVGVSYWKASEGAEYDDQTSQREKEDDKVFPGGSHTYVWQVLKENGPMASDPPCLTYSYLSHVDLVKDLNSGLIGALLVCREGSLAKEKTQTLAKFILLFAVFDEGKSWHSETKNSLMQDRDAASARAWPKMHTVNGYVNRTLPGLIGCHRKSVYWHVIGMGTTPEVHSIFLEGHTFLVRNHRQASLGISPITFLTAQTLLRDLGQFLLFCHIPSHQHDGMEAYVKVDSCPEEPQLRMKNNEEAEDYDDDLTDSEMDVVRFDDDNSPSIIQARSGAKKHPKTWVHYIAAEEEDWDYAPLVLAPDDRSYKSQYLNNGPQRIGRKYKKVRFMAYTDETFKTREAIQHESGILGPLLYGEVGDTLLIIFKNQASRPYNIYPHGITDVRPLYSRRLPKGVKHLKDFPILPGEIFKYKWTITVEDGPTKSDPRCLTRYYSSFVNWERDLASGLIGPLLICYKESVDQRGNQIMSDKRNVILFSVFDENRSWYLTENIQRFLPNPAGVQLEDPEFQASNIMHSINGYVFDSLQLSVCLHEVAYWYILSIGAQTDFLSVFFSGYTFKHKGVYEDTLTLFPFSGETVFMSMENPGLWILGCSNSDFRNRGMTALLKVSSCDWNTGDYYEDSYEDISAYFDSKNNAIEPRSFSQNPPVLKRHQREGTRTTLQSDQEEIDYDDTISVEMKKEDFDIYDEDENQSPRSFQKKTRHYFIAAVERLWDYGMSSSPHVLRNRAQSGSVPQFKKVVFQEFTDGSFTQPLYRGELNEHLGLLGPYIRAEVEDNIMVTFRNQASRPYSFYSSLISYEEDQRQGAEPRKNFVKPNETKTYFWKVQHHMAPTKDEFDCKAWAYFSDVDLEKDVHSGLIGPLLVCHTNTLNPAHGRQVTVQEFALFFTIFDETKSWYFTENMERNCRAPCNIQMEDPTFKENYRFHAINGYIMDTLPGLVMAQDQRIRWYLLSMGSNENIHSIHFSGHVFTVRKKEEYKMALYNLYPGVFETVEMLPSKAGIWRVECLIGEHLHAGMSTLFLVYSNKCQNPLGMASGHIRDFQITASGQYGQWAPKLARLHYSGSINAWSTKEPFSWIKVDLLAPMIIHGIKTQGARQKFSSLYISQFIIMYSLDGKKWQTYRGNSTGTDMVFFGNVDSSGIKHNIFNPPIIARYIRLHPTHYSIRSTLRMELMGCDLNSCSMPLGMESKAISDAQITASSYFTNMFATWSPSKARLHLQGRSNAWRPQVNNPKEWLQVDFQKTMKVTGVTTQGVKSLDTSMYVKEFLISSSQDGHQWTLFFQNGKVKVFQGNQDSFTPVVNSLDPPLLTRYLRIHPQSWEHQIALRMEVLGCEAQDLY

SEQ ID NO: 1881 - DNA, 4371 bp, synthetic construct
  misc_feature 1..4371: note = Variant of human B-domain deleted Factor VIII
  source 1..4371: mol_type = other DNA
atgcagattgaactgtctacctgcttcttcctctgtttgctgaggttctgctttagcgccactagacggtactaccttggcgctgtggagctgtcctgggactatatgcagagtgatttgggagagcttcccgtcgacgcacgatttcctcctcgcgttccaaagtcatttccctttaacacaagccaggtgtacaagaagacgctcttcgtcgaattcaccgatcacctgttcaatatcgccaaacccagaccaccatggatgggtcttttggggcctaccatacaagcggaggtgtatgacacagttgttatcactctcaagaacatggcttctcatccggtaagtcttcacgcagtgggcgtgtcctactggaaagcttcagaaggagccgagtatgatgatcagacatcccagagggagaaagaagacgacaaggtatttccaggtgggtctcatacctatgtgtggcaagtgctcaaagagaatggccctatggcaagcgatccgccgtgtttgacttacagctacctttcacacgttgacctcgtcaaggacgggaactccgggttgattggagccttgttggtatgcagggaaggatctcttgccaaagagaagacacagaccctggccaagtttatccttctctttgctgtgttcgatgagggcaaaagttggcatagcgaaacgaagaattccctcatgcaggatcgcgacgcagccagcgccagagcttggcccaagatgcacactgtgaacggatatgtcaataggacgcttcctggcttgattgggtgtcatcggaaaagtgtctactggcacgtgatcggaatggggacaacaccagaggtccactccatatttctcgaaggccataccttccttgttcgaaaccacagacaggcatccttggggatctctcccattacctttctcactgcccaaacgctccttcgtgacttgggtcagttccttctcttttgccatatcccgtcacaccagcatgatggtatggaagcttatgtgaaagtcgacagttgtcctgaggagccacagttgcgcatgaagaataatgaagaagccgaggattacgacgacgatctcaccgattctgagatggacgtggtgaggtttgatgacgacaactctccctccatcattcaagctcggagcggggcgaagaaacaccccaagacttgggtccactatatagcggcggaagaggaggattgggattacgctcctcttgtattggcaccagatgaccgctcatacaaaagccagtacctcaacaacggaccgcagagaattggccggaagtataagaaagtgcgatttatggcctatacagacgaaacctttaagacaagggaggccatccagcatgagagtgggattttgggacctcttctttacggcgaagttggtgataccctcctcatcatcttcaagaatcaagcttctcgcccctataacatttacccacacgggatcactgacgttaggcctttgtatagcagaagacttcccaaaggcgtgaagcatctcaaagacttccccattttgccaggcgagatctttaagtacaaatggaccattacagtggaagatggaccgactaaatcagaccctcgatgccttacgcggtactattcctccttcgtgaattgggagagagatttggcaagcggactcataggaccactcctcatctgttacaaggaatctgtagaccagaggggtaaccagattatgagtgataaacgcaatgtgatcctttttagcgtcttcgacgagaaccggtcctggtacttgaccgagaatatacaaaggttccttcccaaccccgcaggcgttcagttggaagaccctgagtttcaggccagcaatattatgcactcaatcaacggctatgtgtttgatagtctccagctttctgtttgcctccatgaagtagcctattggtacatcttgtcaattggtgctcaaacagacttcctctccgtcttcttctccggctacacctttaagcacaagggcgtgtatgaggacactctcacactctttccattttctggagaaaccgtgttcatgagcatggagaatccaggcctttggatcttgggttgccacaacagtgattttcgcaatcggggaatgactgctctcctcaaagtcagcagctgtgattggaacacaggcgactattacgaagattcttacgaggacataagtgcctactttgactccaagaataacgccattgagcccagatcattctcccagaatcctcccgtgcttaaaaggcatcagcgcgaaggtaccagaactactcttcagtctgatcaagaggagattgactatgacgacaccattagcgtggaaatgaagaaggaggatttcgatatctatgacgaagatgagaaccagtctccgcggagctttcagaagaagacgcgacactacttcattgcagcagtcgaaaggctttgggactacggtatgtcatcatcccctcatgtgttgcgcaatagagctcagagtggaagtgttccacagttcaagaaagtcgtctttcaagagtttacagatggcagcttcacacagcctctctatcggggcgagcttaacgaacatttgggactccttggtccctatatccgagccgaagtggaggacaacattatggttacctttaggaatcaagcctctcgcccctacagcttctactcctccctcatcagttatgaggaggatcagagacaaggcgctgaaccacggaagaactttgtgaaaccgaatgagacgaagacctacttctggaaagtacagcaccacatggcccccacaaaagacgaattcgattgcaaagcatgggcgtatttttcagacgttgacttggagaaagatgtacattcaggacttattggtcctttgttggtgtgtcacactaacactctcaatccagcccatggcaggcaggtgacagtccaggaattcgctcttttctttaccatctttgatgagaccaagtcctggtacttcacggaaaacatggagcgcaattgcagagccccctgtaacatacagatggaggaccctacctttaaggaaaattatcggttccacgcaatcaacggatacattatggatacactccctggccttgtgatggctcaggaccaacgaatcaggtggtacctcctcagcatgggttctaatgagaacatacactccattcacttttcaggacatgtgttcactgtccggaagaaagaagagtataagatggccctctacaatttgtatccaggcgtgtttgagaccgttgaaatgcttccctctaaagctggcatctggagagtagagtgcttgatcggagaacatcttcacgcaggtatgagcaccttgttcctcgtgtacagcaacaaatgtcagaatccacttggcatggccagtggacacattcgcgactttcagatcacagcatctggccagtatggacaatgggccccaaagttggctcgcctccattactccggtagcataaatgcgtggtccactaaagaacctttcagctggattaaggtcgatcttcttgcccccatgatcatccacggcattaagacacagggagcgaggcagaaattctcctccctctacatctcacagttcattattatgtatagtttggacggcaagaagtggcaaacttatagaggtaacagtactggaacagacatggtgttcttcggcaacgttgatagctctggcatcaaacacaacatctttaatcctcccataatagctcggtacatcagattgcatccgacccactacagcattaggagtacactccgaatggagcttatgggttgcgacttgaattcctgttcaatgccactcggaatggagtctaaagccatctctgatgcacagataaccgccagtagctactttacgaacatgtttgctacgtggtcaccctctaaggcaaggcttcatttgcaaggccggtctaatgcctggagacctcaggtgaacaacccgaaagaatggctccaggtggactttcagaagaccatgaaagtaacaggtgtcactactcagggagttaagtccttggatactagcatgtatgtgaaggagttccttatttcctcatcacaagatggccaccagtggaccctcttctttcagaatggtaaggtcaaagtgtttcagggcaatcaagacagcttcacacccgtggtgaacagtcttgatcctccactcttgacacgataccttcgaatccatccacagtcttgggagcaccagattgcattgcgcatggaagtacttggatgcgaggctcaggacctctac

SEQ ID NO: 1882 - protein, 1457 aa, synthetic construct
  REGION 1..1457: note = Variant of human B-domain deleted Factor VIII
MQIELSTCFFLCLLRFCFSATRRYYLGAVELSWDYMQSDLGELPVDARFPPRVPKSFPFNTSQVYKKTLFVEFTDHLFNIAKPRPPWMGLLGPTIQAEVYDTVVITLKNMASHPVSLHAVGVSYWKASEGAEYDDQTSQREKEDDKVFPGGSHTYVWQVLKENGPMASDPPCLTYSYLSHVDLVKDGNSGLIGALLVCREGSLAKEKTQTLAKFILLFAVFDEGKSWHSETKNSLMQDRDAASARAWPKMHTVNGYVNRTLPGLIGCHRKSVYWHVIGMGTTPEVHSIFLEGHTFLVRNHRQASLGISPITFLTAQTLLRDLGQFLLFCHIPSHQHDGMEAYVKVDSCPEEPQLRMKNNEEAEDYDDDLTDSEMDVVRFDDDNSPSIIQARSGAKKHPKTWVHYIAAEEEDWDYAPLVLAPDDRSYKSQYLNNGPQRIGRKYKKVRFMAYTDETFKTREAIQHESGILGPLLYGEVGDTLLIIFKNQASRPYNIYPHGITDVRPLYSRRLPKGVKHLKDFPILPGEIFKYKWTITVEDGPTKSDPRCLTRYYSSFVNWERDLASGLIGPLLICYKESVDQRGNQIMSDKRNVILFSVFDENRSWYLTENIQRFLPNPAGVQLEDPEFQASNIMHSINGYVFDSLQLSVCLHEVAYWYILSIGAQTDFLSVFFSGYTFKHKGVYEDTLTLFPFSGETVFMSMENPGLWILGCHNSDFRNRGMTALLKVSSCDWNTGDYYEDSYEDISAYFDSKNNAIEPRSFSQNPPVLKRHQREGTRTTLQSDQEEIDYDDTISVEMKKEDFDIYDEDENQSPRSFQKKTRHYFIAAVERLWDYGMSSSPHVLRNRAQSGSVPQFKKVVFQEFTDGSFTQPLYRGELNEHLGLLGPYIRAEVEDNIMVTFRNQASRPYSFYSSLISYEEDQRQGAEPRKNFVKPNETKTYFWKVQHHMAPTKDEFDCKAWAYFSDVDLEKDVHSGLIGPLLVCHTNTLNPAHGRQVTVQEFALFFTIFDETKSWYFTENMERNCRAPCNIQMEDPTFKENYRFHAINGYIMDTLPGLVMAQDQRIRWYLLSMGSNENIHSIHFSGHVFTVRKKEEYKMALYNLYPGVFETVEMLPSKAGIWRVECLIGEHLHAGMSTLFLVYSNKCQNPLGMASGHIRDFQITASGQYGQWAPKLARLHYSGSINAWSTKEPFSWIKVDLLAPMIIHGIKTQGARQKFSSLYISQFIIMYSLDGKKWQTYRGNSTGTDMVFFGNVDSSGIKHNIFNPPIIARYIRLHPTHYSIRSTLRMELMGCDLNSCSMPLGMESKAISDAQITASSYFTNMFATWSPSKARLHLQGRSNAWRPQVNNPKEWLQVDFQKTMKVTGVTTQGVKSLDTSMYVKEFLISSSQDGHQWTLFFQNGKVKVFQGNQDSFTPVVNSLDPPLLTRYLRIHPQSWEHQIALRMEVLGCEAQDLY

SEQ ID NO: 1883 - DNA, 4371 bp, synthetic construct
  misc_feature 1..4371: note = Variant of human B-domain deleted Factor VIII
  source 1..4371: mol_type = other DNA
atgcagattgaactgtctacctgcttcttcctctgtttgctgaggttctgctttagcgccactagacggtactaccttggcgctgtggagctgtcctgggactatatgcagagtgatttgggagagcttcccgtcgacgcacgatttcctcctcgcgttccaaagtcatttccctttaacacaagccaggtgtacaagaagacgctcttcgtcgaattcaccgatcacctgttcaatatcgccaaacccagaccaccatggatgggtcttttggggcctaccatacaagcggaggtgtatgacacagttgttatcactctcaagaacatggcttctcatccggtaagtcttcacgcagtgggcgtgtcctactggaaagcttcagaaggagccccttatgatgatcagacatcccagagggagaaagaagacgacaaggtatttccaggtgggtctcatacctatgtgtggcaagtgctcaaagagaatggccctatggcaagcgatccgccgtgtttgacttacagctacctttcacacgttgacctcgtcaaggacctcaactccgggttgattggagccttgttggtatgcagggaaggatctcttgccaaagagaagacacagaccctggccaagtttatccttctctttgctgtgttcgatgagggcaaaagttggcatagcgaaacgaagaattccctcatgcaggatcgcgacgcagccagcgccagagcttggcccaagatgcacactgtgaacggatatgtcaataggacgcttcctggcttgattgggtgtcatcggaaaagtgtctactggcacgtgatcggaatggggacaacaccagaggtccactccatatttctcgaaggccataccttccttgttcgaaaccacagacaggcatccttggggatctctcccattacctttctcactgcccaaacgctccttcgtgacttgggtcagttccttctcttttgccatatcccgtcacaccagcatgatggtatggaagcttatgtgaaagtcgacagttgtcctgaggagccacagttgcgcatgaagaataatgaagaagccgaggattacgacgacgatctcaccgattctgagatggacgtggtgaggtttgatgacgacaactctccctccatcattcaagctcggagcggggcgaagaaacaccccaagacttgggtccactatatagcggcggaagaggaggattgggattacgctcctcttgtattggcaccagatgaccgctcatacaaaagccagtacctcaacaacggaccgcagagaattggccggaagtataagaaagtgcgatttatggcctatacagacgaaacctttaagacaagggaggccatccagcatgagagtgggattttgggacctcttctttacggcgaagttggtgataccctcctcatcatcttcaagaatcaagcttctcgcccctataacatttacccacacgggatcactgacgttaggcctttgtatagcagaagacttcccaaaggcgtgaagcatctcaaagacttccccattttgccaggcgagatctttaagtacaaatggaccattacagtggaagatggaccgactaaatcagaccctcgatgccttacgcggtactattcctccttcgtgaattgggagagagatttggcaagcggactcataggaccactcctcatctgttacaaggaatctgtagaccagaggggtaaccagattatgagtgataaacgcaatgtgatcctttttagcgtcttcgacgagaaccggtcctggtacttgaccgagaatatacaaaggttccttcccaaccccgcaggcgttcagttggaagaccctgagtttcaggccagcaatattatgcactcaatcaacggctatgtgtttgatagtctccagctttctgtttgcctccatgaagtagcctattggtacatcttgtcaattggtgctcaaacagacttcctctccgtcttcttctccggctacacctttaagcacaagggcgtgtatgaggacactctcacactctttccattttctggagaaaccgtgttcatgagcatggagaatccaggcctttggatcttgggttgccacaacagtgattttcgcaatcggggaatgactgctctcctcaaagtcagcagctgtgattggaacacaggcgactattacgaagattcttacgaggacataagtgcctactttgactccaagaataacgccattgagcccagatcattctcccagaatcctcccgtgcttaaaaggcatcagcgcgaaggtaccagaactactcttcagtctgatcaagaggagattgactatgacgacaccattagcgtggaaatgaagaaggaggatttcgatatctatgacgaagatgagaaccagtctccgcggagctttcagaagaagacgcgacactacttcattgcagcagtcgaaaggctttgggactacggtatgtcatcatcccctcatgtgttgcgcaatagagctcagagtggaagtgttccacagttcaagaaagtcgtctttcaagagtttacagatggcagcttcacacagcctctctatcggggcgagcttaacgaacatttgggactccttggtccctatatccgagccgaagtggaggacaacattatggttacctttaggaatcaagcctctcgcccctacagcttctactcctccctcatcagttatgaggaggatcagagacaaggcgctgaaccacggaagaactttgtgaaaccgaatgagacgaagacctacttctggaaagtacagcaccacatggcccccacaaaagacgaattcgattgcaaagcatgggcgtatttttcagacgttgacttggagaaagatgtacattcaggacttattggtcctttgttggtgtgtcacactaacactctcaatccagcccatggcaggcaggtgacagtccaggaattcgctcttttctttaccatctttgatgagaccaagtcctggtacttcacggaaaacatggagcgcaattgcagagccccctgtaacatacagatggaggaccctacctttaaggaaaattatcggttccacgcaatcaacggatacattatggatacactccctggccttgtgatggctcaggaccaacgaatcaggtggtacctcctcagcatgggttctaatgagaacatacactccattcacttttcaggacatgtgttcactgtccggaagaaagaagagtataagatggccctctacaatttgtatccaggcgtgtttgagaccgttgaaatgcttccctctaaagctggcatctggagagtagagtgcttgatcggagaacatcttcacgcaggtatgagcaccttgttcctcgtgtacagcaacaaatgtcagaatccacttggcatggccagtggacacattcgcgactttcagatcacagcatctggccagtatggacaatgggccccaaagttggctcgcctccattactccggtagcataaatgcgtggtccactaaagaacctttcagctggattaaggtcgatcttcttgcccccatgatcatccacggcattaagacacagggagcgaggcagaaattctcctccctctacatctcacagttcattattatgtatagtttggacggcaagaagtggcaaacttatagaggtaacagtactggaacagacatggtgttcttcggcaacgttgatagctctggcatcaaacacaacatctttaatcctcccataatagctcggtacatcagattgcatccgacccactacagcattaggagtacactccgaatggagcttatgggttgcgacttgaattcctgttcaatgccactcggaatggagtctaaagccatctctgatgcacagataaccgccagtagctactttacgaacatgtttgctacgtggtcaccctctaaggcaaggcttcatttgcaaggccggtctaatgcctggagacctcaggtgaacaacccgaaagaatggctccaggtggactttcagaagaccatgaaagtaacaggtgtcactactcagggagttaagtccttggatactagcatgtatgtgaaggagttccttatttcctcatcacaagatggccaccagtggaccctcttctttcagaatggtaaggtcaaagtgtttcagggcaatcaagacagcttcacacccgtggtgaacagtcttgatcctccactcttgacacgataccttcgaatccatccacagtcttgggagcaccagattgcattgcgcatggaagtacttggatgcgaggctcaggacctctac

SEQ ID NO: 1884 - protein, 1457 aa, synthetic construct
  REGION 1..1457: note = Variant of human B-domain deleted Factor VIII
MQIELSTCFFLCLLRFCFSATRRYYLGAVELSWDYMQSDLGELPVDARFPPRVPKSFPFNTSQVYKKTLFVEFTDHLFNIAKPRPPWMGLLGPTIQAEVYDTVVITLKNMASHPVSLHAVGVSYWKASEGAPYDDQTSQREKEDDKVFPGGSHTYVWQVLKENGPMASDPPCLTYSYLSHVDLVKDLNSGLIGALLVCREGSLAKEKTQTLAKFILLFAVFDEGKSWHSETKNSLMQDRDAASARAWPKMHTVNGYVNRTLPGLIGCHRKSVYWHVIGMGTTPEVHSIFLEGHTFLVRNHRQASLGISPITFLTAQTLLRDLGQFLLFCHIPSHQHDGMEAYVKVDSCPEEPQLRMKNNEEAEDYDDDLTDSEMDVVRFDDDNSPSIIQARSGAKKHPKTWVHYIAAEEEDWDYAPLVLAPDDRSYKSQYLNNGPQRIGRKYKKVRFMAYTDETFKTREAIQHESGILGPLLYGEVGDTLLIIFKNQASRPYNIYPHGITDVRPLYSRRLPKGVKHLKDFPILPGEIFKYKWTITVEDGPTKSDPRCLTRYYSSFVNWERDLASGLIGPLLICYKESVDQRGNQIMSDKRNVILFSVFDENRSWYLTENIQRFLPNPAGVQLEDPEFQASNIMHSINGYVFDSLQLSVCLHEVAYWYILSIGAQTDFLSVFFSGYTFKHKGVYEDTLTLFPFSGETVFMSMENPGLWILGCHNSDFRNRGMTALLKVSSCDWNTGDYYEDSYEDISAYFDSKNNAIEPRSFSQNPPVLKRHQREGTRTTLQSDQEEIDYDDTISVEMKKEDFDIYDEDENQSPRSFQKKTRHYFIAAVERLWDYGMSSSPHVLRNRAQSGSVPQFKKVVFQEFTDGSFTQPLYRGELNEHLGLLGPYIRAEVEDNIMVTFRNQASRPYSFYSSLISYEEDQRQGAEPRKNFVKPNETKTYFWKVQHHMAPTKDEFDCKAWAYFSDVDLEKDVHSGLIGPLLVCHTNTLNPAHGRQVTVQEFALFFTIFDETKSWYFTENMERNCRAPCNIQMEDPTFKENYRFHAINGYIMDTLPGLVMAQDQRIRWYLLSMGSNENIHSIHFSGHVFTVRKKEEYKMALYNLYPGVFETVEMLPSKAGIWRVECLIGEHLHAGMSTLFLVYSNKCQNPLGMASGHIRDFQITASGQYGQWAPKLARLHYSGSINAWSTKEPFSWIKVDLLAPMIIHGIKTQGARQKFSSLYISQFIIMYSLDGKKWQTYRGNSTGTDMVFFGNVDSSGIKHNIFNPPIIARYIRLHPTHYSIRSTLRMELMGCDLNSCSMPLGMESKAISDAQITASSYFTNMFATWSPSKARLHLQGRSNAWRPQVNNPKEWLQVDFQKTMKVTGVTTQGVKSLDTSMYVKEFLISSSQDGHQWTLFFQNGKVKVFQGNQDSFTPVVNSLDPPLLTRYLRIHPQSWEHQIALRMEVLGCEAQDLY

SEQ ID NO: 1885 - DNA, 4371 bp, synthetic construct
  misc_feature 1..4371: note = Variant of human B-domain deleted Factor VIII
  source 1..4371: mol_type = other DNA
atgcagattgaactgtctacctgcttcttcctctgtttgctgaggttctgctttagcgccactagacggtactaccttggcgctgtggagctgtcctgggactatatgcagagtgatttgggagagcttcccgtcgacgcacgatttcctcctcgcgttccaaagtcatttccctttaacacaagccaggtgtacaagaagacgctcttcgtcgaattcaccgatcacctgttcaatatcgccaaacccagaccaccatggatgggtcttttggggcctaccatacaagcggaggtgtatgacacagttgttatcactctcaagaacatggcttctcatccggtaagtcttcacgcagtgggcgtgtcctactggaaagcttcagaaggagccgagtatgatgatcagacatcccagagggagaaagaagacgacaaggtatttccaggtgggtctcatacctatgtgtggcaagtgctcaaagagaatggccctatggcaagcgatccgccgtgtttgacttacagctacctttcacacgttgacctcgtcaaggacctcaactccgggttgattggagccttgttggtatgcagggaaggatctcttgccaaagagaagacacagaccctggccaagtttatccttctctttgctgtgttcgatgagggcaaaagttggcatagcgaaacgaagaattccctcatgcaggatcgcgacgcagccagcgccagagcttggcccaagatgcacactgtgaacggatatgtcaataggacgcttcctggcttgattgggtgtcatcggaaaagtgtctactggcacgtgatcggaatggggacaacaccagaggtccactccatatttctcgaaggccataccttccttgttcgaaaccacagacaggcatccttggggatctctcccattacctttctcactgcccaaacgctccttcgtgacttgggtcagttccttctcttttgccatatcccgtcacaccagcatgatggtatggaagcttatgtgaaagtcgacagttgtcctgaggagccacagttgcgcatgaagaataatgaagaagccgaggattacgacgacgatctcaccgattctgagatggacgtggtgaggtttgatgacgacaactctccctccatcattcaagctcggagcggggcgaagaaacaccccaagacttgggtccactatatagcggcggaagaggaggattgggattacgctcctcttgtattggcaccagatgaccgctcatacaaaagccagtacctcaacaacggaccgcagagaattggccggaagtataagaaagtgcgatttatggcctatacagacgaaacctttaagacaagggaggccatccagcatgagagtgggattttgggacctcttctttacggcgaagttggtgataccctcctcatcatcttcaagaatcaagcttctcgcccctataacatttacccacacgggatcactgacgttaggcctttgtatagcagaagacttcccaaaggcgtgaagcatctcaaagacttccccattttgccaggcgagatctttaagtacaaatggaccattacagtggaagatggaccgactaaatcagaccctcgatgccttacgcggtactattcctccttcgtgaattgggagagagatttggcaagcggactcataggaccactcctcatctgttacaaggaatctgtagaccagaggggtaaccagattatgagtgataaacgcaatgtgatcctttttagcgtcttcgacgagaaccggtcctggtacttgaccgagaatatacaaaggttccttcccaaccccgcaggcgttcagttggaagaccctgagtttcaggccagcaatattatgcactcaatcaacggctatgtgtttgatagtctccagctttctgtttgcctccatgaagtagcctattggtacatcttgtcaattggtgctcaaacagacttcctctccgtcttcttctccggctacacctttaagcacaagggcgtgtatgaggacactctcacactctttccattttctggagaaaccgtgttcatgagcatggagaatccaggcctttggatcttgggttgccacaacagtgattttcgcaatcggggaatgactgctctcctcaaagtcagcagctgtgattggaacacaggcgactattacgaagattcttacgaggacataagtgcctactttgactccaagaataacgccattgagcccagatcattctcccagaatcctcccgtgcttaaaaggcatcagcgcgaaggtaccagaactactcttcagtctgatcaagaggagattgactatgacgacaccattagcgtggaaatgaagaaggaggatttcgatatctatgacgaagatgagaaccagattccgcggagctttcagaagaagacgcgacactacttcattgcagcagtcgaaaggctttgggactacggtatgtcatcatcccctcatgtgttgcgcaatagagctcagagtggaagtgttccacagttcaagaaagtcgtctttcaagagtttacagatggcagcttcacacagcctctctatcggggcgagcttaacgaacatttgggactccttggtccctatatccgagccgaagtggaggacaacattatggttacctttaggaatcaagcctctcgcccctacagcttctactcctccctcatcagttatgaggaggatcagagacaaggcgctgaaccacggaagaactttgtgaaaccgaatgagacgaagacctacttctggaaagtacagcaccacatggcccccacaaaagacgaattcgattgcaaagcatgggcgtatttttcagacgttgacttggagaaagatgtacattcaggacttattggtcctttgttggtgtgtcacactaacactctcaatccagcccatggcaggcaggtgacagtccaggaattcgctcttttctttaccatctttgatgagaccaagtcctggtacttcacggaaaacatggagcgcaattgcagagccccctgtaacatacagatggaggaccctacctttaaggaaaattatcggttccacgcaatcaacggatacattatggatacactccctggccttgtgatggctcaggaccaacgaatcaggtggtacctcctcagcatgggttctaatgagaacatacactccattcacttttcaggacatgtgttcactgtccggaagaaagaagagtataagatggccctctacaatttgtatccaggcgtgtttgagaccgttgaaatgcttccctctaaagctggcatctggagagtagagtgcttgatcggagaacatcttcacgcaggtatgagcaccttgttcctcgtgtacagcaacaaatgtcagaatccacttggcatggccagtggacacattcgcgactttcagatcacagcatctggccagtatggacaatgggccccaaagttggctcgcctccattactccggtagcataaatgcgtggtccactaaagaacctttcagctggattaaggtcgatcttcttgcccccatgatcatccacggcattaagacacagggagcgaggcagaaattctcctccctctacatctcacagttcattattatgtatagtttggacggcaagaagtggcaaacttatagaggtaacagtactggaacagacatggtgttcttcggcaacgttgatagctctggcatcaaacacaacatctttaatcctcccataatagctcggtacatcagattgcatccgacccactacagcattaggagtacactccgaatggagcttatgggttgcgacttgaattcctgttcaatgccactcggaatggagtctaaagccatctctgatgcacagataaccgccagtagctactttacgaacatgtttgctacgtggtcaccctctaaggcaaggcttcatttgcaaggccggtctaatgcctggagacctcaggtgaacaacccgaaagaatggctccaggtggactttcagaagaccatgaaagtaacaggtgtcactactcagggagttaagtccttggatactagcatgtatgtgaaggagttccttatttcctcatcacaagatggccaccagtggaccctcttctttcagaatggtaaggtcaaagtgtttcagggcaatcaagacagcttcacacccgtggtgaacagtcttgatcctccactcttgacacgataccttcgaatccatccacagtcttgggagcaccagattgcattgcgcatggaagtacttggatgcgaggctcaggacctctac

SEQ ID NO: 1886 - protein, 1457 aa, synthetic construct
  REGION 1..1457: note = Variant of human B-domain deleted Factor VIII
MQIELSTCFFLCLLRFCFSATRRYYLGAVELSWDYMQSDLGELPVDARFPPRVPKSFPFNTSQVYKKTLFVEFTDHLFNIAKPRPPWMGLLGPTIQAEVYDTVVITLKNMASHPVSLHAVGVSYWKASEGAEYDDQTSQREKEDDKVFPGGSHTYVWQVLKENGPMASDPPCLTYSYLSHVDLVKDLNSGLIGALLVCREGSLAKEKTQTLAKFILLFAVFDEGKSWHSETKNSLMQDRDAASARAWPKMHTVNGYVNRTLPGLIGCHRKSVYWHVIGMGTTPEVHSIFLEGHTFLVRNHRQASLGISPITFLTAQTLLRDLGQFLLFCHIPSHQHDGMEAYVKVDSCPEEPQLRMKNNEEAEDYDDDLTDSEMDVVRFDDDNSPSIIQARSGAKKHPKTWVHYIAAEEEDWDYAPLVLAPDDRSYKSQYLNNGPQRIGRKYKKVRFMAYTDETFKTREAIQHESGILGPLLYGEVGDTLLIIFKNQASRPYNIYPHGITDVRPLYSRRLPKGVKHLKDFPILPGEIFKYKWTITVEDGPTKSDPRCLTRYYSSFVNWERDLASGLIGPLLICYKESVDQRGNQIMSDKRNVILFSVFDENRSWYLTENIQRFLPNPAGVQLEDPEFQASNIMHSINGYVFDSLQLSVCLHEVAYWYILSIGAQTDFLSVFFSGYTFKHKGVYEDTLTLFPFSGETVFMSMENPGLWILGCHNSDFRNRGMTALLKVSSCDWNTGDYYEDSYEDISAYFDSKNNAIEPRSFSQNPPVLKRHQREGTRTTLQSDQEEIDYDDTISVEMKKEDFDIYDEDENQIPRSFQKKTRHYFIAAVERLWDYGMSSSPHVLRNRAQSGSVPQFKKVVFQEFTDGSFTQPLYRGELNEHLGLLGPYIRAEVEDNIMVTFRNQASRPYSFYSSLISYEEDQRQGAEPRKNFVKPNETKTYFWKVQHHMAPTKDEFDCKAWAYFSDVDLEKDVHSGLIGPLLVCHTNTLNPAHGRQVTVQEFALFFTIFDETKSWYFTENMERNCRAPCNIQMEDPTFKENYRFHAINGYIMDTLPGLVMAQDQRIRWYLLSMGSNENIHSIHFSGHVFTVRKKEEYKMALYNLYPGVFETVEMLPSKAGIWRVECLIGEHLHAGMSTLFLVYSNKCQNPLGMASGHIRDFQITASGQYGQWAPKLARLHYSGSINAWSTKEPFSWIKVDLLAPMIIHGIKTQGARQKFSSLYISQFIIMYSLDGKKWQTYRGNSTGTDMVFFGNVDSSGIKHNIFNPPIIARYIRLHPTHYSIRSTLRMELMGCDLNSCSMPLGMESKAISDAQITASSYFTNMFATWSPSKARLHLQGRSNAWRPQVNNPKEWLQVDFQKTMKVTGVTTQGVKSLDTSMYVKEFLISSSQDGHQWTLFFQNGKVKVFQGNQDSFTPVVNSLDPPLLTRYLRIHPQSWEHQIALRMEVLGCEAQDLY

SEQ ID NO: 1887 - DNA, 4371 bp, synthetic construct
  misc_feature 1..4371: note = Variant of human B-domain deleted Factor VIII
  source 1..4371: mol_type = other DNA
atgcagattgaactgtctacctgcttcttcctctgtttgctgaggttctgctttagcgccactagacggtactaccttggcgctgtggagctgtcctgggactatatgcagagtgatttgggagagcttcccgtcgacgcacgatttcctcctcgcgttccaaagtcatttccctttaacacaagccaggtgtacaagaagacgctcttcgtcgaattcaccgatcacctgttcaatatcgccaaacccagaccaccatggatgggtcttttggggcctaccatacaagcggaggtgtatgacacagttgttatcactctcaagaacatggcttctcatccggtaagtcttcacgcagtgggcgtgtcctactggaaagcttcagaaggagccgagtatgatgatcagacatcccagagggagaaagaagacgacaaggtatttccaggtgggtctcatacctatgtgtggcaagtgctcaaagagaatggccctatggcaagcgatccgccgtgtttgacttacagctacctttcacacgttgacctcgtcaaggacctcaactccgggttgattggagccttgttggtatgcagggaaggatctcttgccaaagagaagacacagaccctggccaagtttatccttctctttgctgtgttcgatgagggcaaaagttggcatagcgaaacgaagaattccctcatgcaggatcgcgacgcagccagcgccagagcttggcccaagatgcacactgtgaacggatatgtcaataggacgcttcctggcttgattgggtgtcatcggaaaagtgtctactggcacgtgatcggaatggggacaacaccagaggtccactccatatttctcgaaggccataccttccttgttcgaaaccacagacaggcatccttggggatctctcccattacctttctcactgcccaaacgctccttcgtgacttgggtcagttccttctcttttgccatatcccgtcacaccagcatgatggtatggaagcttatgtgaaagtcgacagttgtcctgaggagccacagttgcgcatgaagaataatgaagaagccgaggattacgacgacgatctcaccgattctgagatggacgtggtgaggtttgatgacgacaactctccctccatcattcaagctcggagcggggcgaagaaacaccccaagacttgggtccactatatagcggcggaagaggaggattgggattacgctcctcttgtattggcaccagatgaccgctcatacaaaagccagtacctcaacaacggaccgcagagaattggccggaagtataagaaagtgcgatttatggcctatacagacgaaacctttaagacaagggaggccatccagcatgagagtgggattttgggacctcttctttacggcgaagttggtgataccctcctcatcatcttcaagaatcaagcttctcgcccctataacatttacccacacgggatcactgacgttaggcctttgtatagcagaagacttcccaaaggcgtgaagcatctcaaagacttccccattttgccaggcgagatctttaagtacaaatggaccattacagtggaagatggaccgactaaatcagaccctcgatgccttacgcggtactattcctccttcgtgaattgggagagagatttggcaagcggactcataggaccactcctcatctgttacaaggaatctgtagaccagaggggtaaccagattatgagtgataaacgcaatgtgatcctttttagcgtcttcgacgagaaccggtcctggtacttgaccgagaatatacaaaggttccttcccaaccccgcaggcgttcagttggaagaccctgagtttcaggccagcaatattatgcactcaatcaacggctatgtgtttgatagtctccagctttctgtttgcctccatgaagtagcctattggtacatcttgtcaattggtgctcaaacagacttcctctccgtcttcttctccggctacacctttaagcacaagggcgtgtatgaggacactctcacactctttccattttctggagaaaccgtgttcatgagcatggagaatccaggcctttggatcttgggttgccacaacagtgattttcgcaatcggggaatgactgctctcctcaaagtcagcagctgtgattggaacacaggcgactattacgaagattcttacgaggacataagtgcctactttgactccaagaataacgccattgagcccagatcattctcccagaatcctcccgtgcttaaaaggcatcagcgcgaaggtaccagaactactcttcagtctgatcaagaggagattgactatgacgacaccattagcgtggaaatgaagaaggaggatttcgatatctatgacgaagatgagaaccagtctccgcggagctttcagaagaagacgcgacactacttcattgcagcagtcgaaaggctttgggactacggtatgtcatcatcccctcatgtgttgcgcaatagagctcagagtggaagtgttccacagttcaagaaagtcgtctttcaagagtttacagatggcagcttcacacagcctctctatcggggcgagcttaacgaacatttgggactccttggtccctatatccgagccgaagtggaggacaacattatggttacctttaggaatcaagcctctcgcccctacagcttctactcctccctcatcagttatgaggaggatcagagacaaggcgctgaaccacggaagaactttgtgaaaccgaatgagacgaagacctacttctggaaagtacagcaccacatggcccccacaaaagacgaattcgattgcaaagcatgggcgtatttttcagacgttgacttggagaaagatgtacattcaggacttattggtcctttgttggtgtgtcacactaacactctcaatccagcccatggcaggcaggtgacagtccaggaattcgctcttttctttaccatctttgatgagaccaagtcctggtacttcacggaaaacatggagcgcaattgcagagccccctgtaacatacagatggaggaccctacctttaaggaaaattatcggttccacgcaatcaacggatacattatggatacactccctggccttgtgatggctcaggaccaacgaatcaggtggtacctcctcagcatgggttctaatgagaacatacacggtattcacttttcaggacatgtgttcactgtccggaagaaagaagagtataagatggccctctacaatttgtatccaggcgtgtttgagaccgttgaaatgcttccctctaaagctggcatctggagagtagagtgcttgatcggagaacatcttcacgcaggtatgagcaccttgttcctcgtgtacagcaacaaatgtcagaatccacttggcatggccagtggacacattcgcgactttcagatcacagcatctggccagtatggacaatgggccccaaagttggctcgcctccattactccggtagcataaatgcgtggtccactaaagaacctttcagctggattaaggtcgatcttcttgcccccatgatcatccacggcattaagacacagggagcgaggcagaaattctcctccctctacatctcacagttcattattatgtatagtttggacggcaagaagtggcaaacttatagaggtaacagtactggaacagacatggtgttcttcggcaacgttgatagctctggcatcaaacacaacatctttaatcctcccataatagctcggtacatcagattgcatccgacccactacagcattaggagtacactccgaatggagcttatgggttgcgacttgaattcctgttcaatgccactcggaatggagtctaaagccatctctgatgcacagataaccgccagtagctactttacgaacatgtttgctacgtggtcaccctctaaggcaaggcttcatttgcaaggccggtctaatgcctggagacctcaggtgaacaacccgaaagaatggctccaggtggactttcagaagaccatgaaagtaacaggtgtcactactcagggagttaagtccttggatactagcatgtatgtgaaggagttccttatttcctcatcacaagatggccaccagtggaccctcttctttcagaatggtaaggtcaaagtgtttcagggcaatcaagacagcttcacacccgtggtgaacagtcttgatcctccactcttgacacgataccttcgaatccatccacagtcttgggagcaccagattgcattgcgcatggaagtacttggatgcgaggctcaggacctctac

SEQ ID NO: 1888 - protein, 1457 aa, synthetic construct
  REGION 1..1457: note = Variant of human B-domain deleted Factor VIII
MQIELSTCFFLCLLRFCFSATRRYYLGAVELSWDYMQSDLGELPVDARFPPRVPKSFPFNTSQVYKKTLFVEFTDHLFNIAKPRPPWMGLLGPTIQAEVYDTVVITLKNMASHPVSLHAVGVSYWKASEGAEYDDQTSQREKEDDKVFPGGSHTYVWQVLKENGPMASDPPCLTYSYLSHVDLVKDLNSGLIGALLVCREGSLAKEKTQTLAKFILLFAVFDEGKSWHSETKNSLMQDRDAASARAWPKMHTVNGYVNRTLPGLIGCHRKSVYWHVIGMGTTPEVHSIFLEGHTFLVRNHRQASLGISPITFLTAQTLLRDLGQFLLFCHIPSHQHDGMEAYVKVDSCPEEPQLRMKNNEEAEDYDDDLTDSEMDVVRFDDDNSPSIIQARSGAKKHPKTWVHYIAAEEEDWDYAPLVLAPDDRSYKSQYLNNGPQRIGRKYKKVRFMAYTDETFKTREAIQHESGILGPLLYGEVGDTLLIIFKNQASRPYNIYPHGITDVRPLYSRRLPKGVKHLKDFPILPGEIFKYKWTITVEDGPTKSDPRCLTRYYSSFVNWERDLASGLIGPLLICYKESVDQRGNQIMSDKRNVILFSVFDENRSWYLTENIQRFLPNPAGVQLEDPEFQASNIMHSINGYVFDSLQLSVCLHEVAYWYILSIGAQTDFLSVFFSGYTFKHKGVYEDTLTLFPFSGETVFMSMENPGLWILGCHNSDFRNRGMTALLKVSSCDWNTGDYYEDSYEDISAYFDSKNNAIEPRSFSQNPPVLKRHQREGTRTTLQSDQEEIDYDDTISVEMKKEDFDIYDEDENQSPRSFQKKTRHYFIAAVERLWDYGMSSSPHVLRNRAQSGSVPQFKKVVFQEFTDGSFTQPLYRGELNEHLGLLGPYIRAEVEDNIMVTFRNQASRPYSFYSSLISYEEDQRQGAEPRKNFVKPNETKTYFWKVQHHMAPTKDEFDCKAWAYFSDVDLEKDVHSGLIGPLLVCHTNTLNPAHGRQVTVQEFALFFTIFDETKSWYFTENMERNCRAPCNIQMEDPTFKENYRFHAINGYIMDTLPGLVMAQDQRIRWYLLSMGSNENIHGIHFSGHVFTVRKKEEYKMALYNLYPGVFETVEMLPSKAGIWRVECLIGEHLHAGMSTLFLVYSNKCQNPLGMASGHIRDFQITASGQYGQWAPKLARLHYSGSINAWSTKEPFSWIKVDLLAPMIIHGIKTQGARQKFSSLYISQFIIMYSLDGKKWQTYRGNSTGTDMVFFGNVDSSGIKHNIFNPPIIARYIRLHPTHYSIRSTLRMELMGCDLNSCSMPLGMESKAISDAQITASSYFTNMFATWSPSKARLHLQGRSNAWRPQVNNPKEWLQVDFQKTMKVTGVTTQGVKSLDTSMYVKEFLISSSQDGHQWTLFFQNGKVKVFQGNQDSFTPVVNSLDPPLLTRYLRIHPQSWEHQIALRMEVLGCEAQDLY

SEQ ID NO: 1889 - DNA, 4371 bp, synthetic construct
  misc_feature 1..4371: note = Variant of human B-domain deleted Factor VIII
  source 1..4371: mol_type = other DNA
atgcagattgaactgtctacctgcttcttcctctgtttgctgaggttctgctttagcgccactagacggtactaccttggcgctgtggagctgtcctgggactatatgcagagtgatttgggagagcttcccgtcgacgcacgatttcctcctcgcgttccaaagtcatttccctttaacacaagccaggtgtacaagaagacgctcttcgtcgaattcaccgatcacctgttcaatatcgccaaacccagaccaccatggatgggtcttttggggcctaccatacaagcggaggtgtatgacacagttgttatcactctcaagaacatggcttctcatccggtaagtcttcacgcagtgggcgtgtcctactggaaagcttcagaaggagccgagtatgatgatcagacatcccagagggagaaagaagacgacaaggtatttccaggtgggtctcatacctatgtgtggcaagtgctcaaagagaatggccctatggcaagcgatccgccgtgtttgacttacagctacctttcacacgttgacctcgtcaaggacctcaactccgggttgattggagccttgttggtatgcagggaaggatctcttgccaaagagaagacacagaccctggccaagtttatccttctctttgctgtgttcgatgagggcaaaagttggcatagcgaaacgaagaattccctcatgcaggatcgcgacgcagccagcgccagagcttggcccaagatgcacactgtgaacggatatgtcaataggacgcttcctggcttgattgggtgtcatcggaaaagtgtctactggcacgtgatcggaatggggacaacaccagaggtccactccatatttctcgaaggccataccttccttgttcgaaaccacagacaggcatccttggggatctctcccattacctttctcactgcccaaacgctccttcgtgacttgggtcagttccttctcttttgccatatcccgtcacaccagcatgatggtatggaagcttatgtgaaagtcgacagttgtcctgaggagccacagttgcgcatgaagaataatgaagaagccgaggattacgacgacgatctcaccgattctgagatggacgtggtgaggtttgatgacgacaactctccctccatcattcaagctcggagcggggcgaagaaacaccccaagacttgggtccactatatagcggcggaagaggaggattgggattacgctcctcttgtattggcaccagatgaccgctcatacaaaagccagtacctcaacaacggaccgcagagaattggccggaagtataagaaagtgcgatttatggcctatacagacgaaacctttaagacaagggaggccatccagcatgagagtgggattttgggacctcttctttacggcgaagttggtgataccctcctcatcatcttcaagaatcaagcttctcgcccctataacatttacccacacgggatcactgacgttaggcctttgtatagcagaagacttcccaaaggcgtgaagcatctcaaagacttccccattttgccaggcgagatctttaagtacaaatggaccattacagtggaagatggaccgactaaatcagaccctcgatgccttacgcggtactattcctccttcgtgaattgggagagagatttggcaagcggactcataggaccactcctcatctgttacaaggaatctgtagaccagaggggtaaccagattatgagtgataaacgcaatgtgatcctttttagcgtcttcgacgagaaccggtcctggtacttgaccgagaatatacaaaggttccttcccaaccccgcaggcgttcagttggaagaccctgagtttcaggccagcaatattatgcactcaatcaacggctatgtgtttgatagtctccagctttctgtttgcctccatgaagtagcctattggtacatcttgtcaattggtgctcaaacagacttcctctccgtcttcttctccggctacacctttaagcacaagggcgtgtatgaggacactctcacactctttccattttctggagaaaccgtgttcatgagcatggagaatccaggcctttggatcttgggttgccacaacagtgattttcgcaatcggggaatgactgctctcctcaaagtcagcagctgtgattggaacacaggcgactattacgaagattcttacgaggacataagtgcctactttgactccaagaataacgccattgagcccagatcattctcccagaatcctcccgtgcttaaaaggcatcagcgcgaaggtaccagaactactcttcagtctgatcaagaggagattgactatgacgacaccattagcgtggaaatgaagaagtgtgatttcgatatctatgacgaagatgagaaccagtctccgcggagctttcagaagaagacgcgacactacttcattgcagcagtcgaaaggctttgggactacggtatgtcatcatcccctcatgtgttgcgcaatagagctcagagtggaagtgttccacagttcaagaaagtcgtctttcaagagtttacagatggcagcttcacacagcctctctatcggggcgagcttaacgaacatttgggactccttggtccctatatccgagccgaagtggaggacaacattatggttacctttaggaatcaagcctctcgcccctacagcttctactcctccctcatcagttatgaggaggatcagagacaaggcgctgaaccacggaagaactttgtgaaaccgaatgagacgaagacctacttctggaaagtacagcaccacatggcccccacaaaagacgaattcgattgcaaagcatgggcgtatttttcagacgttgacttggagaaagatgtacattcaggacttattggtcctttgttggtgtgtcacactaacactctcaatccagcccatggcaggcaggtgacagtccaggaattcgctcttttctttaccatctttgatgagaccaagtcctggtacttcacggaaaacatggagcgcaattgcagagccccctgtaacatacagatggaggaccctacctttaaggaaaattatcggttccacgcaatcaacggatacattatggatacactccctggccttgtgatggctcaggaccaacgaatcaggtggtacctcctcagcatgggttctaatgagaacatacactccattcacttttcaggacatgtgttcactgtccggaagaaagaagagtataagatggccctctacaatttgtatccaggcgtgtttgagaccgttgaaatgcttccctctaaagctggcatctggagagtagagtgcttgatcggagaacatcttcacgcaggtatgagcaccttgttcctcgtgtacagcaacaaatgtcagaatccacttggcatggccagtggacacattcgcgactttcagatcacagcatctggccagtatggacaatgggccccaaagttggctcgcctccattactccggtagcataaatgcgtggtccactaaagaacctttcagctggattaaggtcgatcttcttgcccccatgatcatccacggcattaagacacagggagcgaggcagaaattctcctccctctacatctcacagttcattattatgtatagtttggacggcaagaagtggcaaacttatagaggtaacagtactggaacagacatggtgttcttcggcaacgttgatagctctggcatcaaacacaacatctttaatcctcccataatagctcggtacatcagattgcatccgacccactacagcattaggagtacactccgaatggagcttatgggttgcgacttgaattcctgttcaatgccactcggaatggagtctaaagccatctctgatgcacagataaccgccagtagctactttacgaacatgtttgctacgtggtcaccctctaaggcaaggcttcatttgcaaggccggtctaatgcctggagacctcaggtgaacaacccgaaagaatggctccaggtggactttcagaagaccatgaaagtaacaggtgtcactactcagggagttaagtccttggatactagcatgtatgtgaaggagttccttatttcctcatcacaagatggccaccagtggaccctcttctttcagaatggtaaggtcaaagtgtttcagggcaatcaagacagcttcacacccgtggtgaacagtcttgatcctccactcttgacacgataccttcgaatccatccacagtcttgggagcaccagattgcattgcgcatggaagtacttggatgcgaggctcaggacctctac

SEQ ID NO: 1890 - protein, 1457 aa, synthetic construct
  REGION 1..1457: note = Variant of human B-domain deleted Factor VIII
MQIELSTCFFLCLLRFCFSATRRYYLGAVELSWDYMQSDLGELPVDARFPPRVPKSFPFNTSQVYKKTLFVEFTDHLFNIAKPRPPWMGLLGPTIQAEVYDTVVITLKNMASHPVSLHAVGVSYWKASEGAEYDDQTSQREKEDDKVFPGGSHTYVWQVLKENGPMASDPPCLTYSYLSHVDLVKDLNSGLIGALLVCREGSLAKEKTQTLAKFILLFAVFDEGKSWHSETKNSLMQDRDAASARAWPKMHTVNGYVNRTLPGLIGCHRKSVYWHVIGMGTTPEVHSIFLEGHTFLVRNHRQASLGISPITFLTAQTLLRDLGQFLLFCHIPSHQHDGMEAYVKVDSCPEEPQLRMKNNEEAEDYDDDLTDSEMDVVRFDDDNSPSIIQARSGAKKHPKTWVHYIAAEEEDWDYAPLVLAPDDRSYKSQYLNNGPQRIGRKYKKVRFMAYTDETFKTREAIQHESGILGPLLYGEVGDTLLIIFKNQASRPYNIYPHGITDVRPLYSRRLPKGVKHLKDFPILPGEIFKYKWTITVEDGPTKSDPRCLTRYYSSFVNWERDLASGLIGPLLICYKESVDQRGNQIMSDKRNVILFSVFDENRSWYLTENIQRFLPNPAGVQLEDPEFQASNIMHSINGYVFDSLQLSVCLHEVAYWYILSIGAQTDFLSVFFSGYTFKHKGVYEDTLTLFPFSGETVFMSMENPGLWILGCHNSDFRNRGMTALLKVSSCDWNTGDYYEDSYEDISAYFDSKNNAIEPRSFSQNPPVLKRHQREGTRTTLQSDQEEIDYDDTISVEMKKCDFDIYDEDENQSPRSFQKKTRHYFIAAVERLWDYGMSSSPHVLRNRAQSGSVPQFKKVVFQEFTDGSFTQPLYRGELNEHLGLLGPYIRAEVEDNIMVTFRNQASRPYSFYSSLISYEEDQRQGAEPRKNFVKPNETKTYFWKVQHHMAPTKDEFDCKAWAYFSDVDLEKDVHSGLIGPLLVCHTNTLNPAHGRQVTVQEFALFFTIFDETKSWYFTENMERNCRAPCNIQMEDPTFKENYRFHAINGYIMDTLPGLVMAQDQRIRWYLLSMGSNENIHSIHFSGHVFTVRKKEEYKMALYNLYPGVFETVEMLPSKAGIWRVECLIGEHLHAGMSTLFLVYSNKCQNPLGMASGHIRDFQITASGQYGQWAPKLARLHYSGSINAWSTKEPFSWIKVDLLAPMIIHGIKTQGARQKFSSLYISQFIIMYSLDGKKWQTYRGNSTGTDMVFFGNVDSSGIKHNIFNPPIIARYIRLHPTHYSIRSTLRMELMGCDLNSCSMPLGMESKAISDAQITASSYFTNMFATWSPSKARLHLQGRSNAWRPQVNNPKEWLQVDFQKTMKVTGVTTQGVKSLDTSMYVKEFLISSSQDGHQWTLFFQNGKVKVFQGNQDSFTPVVNSLDPPLLTRYLRIHPQSWEHQIALRMEVLGCEAQDLY

SEQ ID NO: 1891 - DNA, 4371 bp, synthetic construct
  misc_feature 1..4371: note = Variant of human B-domain deleted Factor VIII
  source 1..4371: mol_type = other DNA
atgcagattgaactgtctacctgcttcttcctctgtttgctgaggttctgctttagcgccactagacggtactaccttggcgctgtggagctgtcctgggactatatgcagagtgatttgggagagcttcccgtcgacgcacgatttcctcctcgcgttccaaagtcatttccctttaacacaagccaggtgtacaagaagacgctcttcgtcgaattcaccgatcacctgttcaatatcgccaaacccagaccaccatggatgggtcttttggggcctaccatacaagcggaggtgtatgacacagttgttatcactctcaagaacatggcttctcatccggtaagtcttcacgcagtgggcgtgtcctactggaaagcttcagaaggagccgagtatgatgatcagacatcccagagggagaaagaagacgacaaggtatttccaggtgggtctcatacctatgtgtggcaagtgctcaaagagaatggccctatggcaagcgatccgccgtgtttgacttacagctacctttcacacgttgacctcgtcaaggacctcaactccgggttgattggagccttgttggtatgcagggaaggatctcttgccaaagagaagacacagaccctggccaagtttatccttctctttgctgtgttcgatgagggcaaaagttggcatagcgaaacgaagaattccctcatgcaggatcgcgacgcagccagcgccagagcttggcccaagatgcacactgtgaacggatatgtcaataggacgcttcctggcttgattgggtgtcatcggaaaagtgtctactggcacgtgatcggaatggggacaacaccagaggtccactccatatttctcgaaggccataccttccttgttcgaaaccacagacaggcatccttggggatctctcccattacctttctcactgcccaaacgctccttcgtgacttgggtcagttccttctcttttgccatatcccgtcacaccagcatgatggtatggaagcttatgtgaaagtcgacagttgtcctgaggagccacagttgcgcatgaagaataatgaagaagccgaggattacgacgacgatctcaccgattctgagatggacgtggtgaggtttgatgacgacaactctccctccatcattcaagctcggagcggggcgaagaaacaccccaagacttgggtccactatatagcggcggaagaggaggattgggattacgctcctcttgtattggcaccagatgaccgctcatacaaaagccagtacctcaacaacggaccgcagagaattggccggaagtataagaaagtgcgatttatggcctatacagacgaaacctttaagacaagggaggccatccagcatgagagtgggattttgggacctcttctttacggcgaagttggtgataccctcctcatcatcttcaagaatcaagcttctcgcccctataacatttacccacacgggatcactgacgttaggcctttgtatagcagaagacttcccaaaggcgtgaagcatctcaaagacttccccattttgccaggcgagatctttaagtacaaatggaccattacagtggaagatggaccgactaaatcagaccctcgatgccttacgcggtactattcctccttcgtgaattgggagagagatttggcaagcggactcataggaccactcctcatctgttacaaggaatctgtagaccagaggggtaaccagattatgagtgataaacgcaatgtgatcctttttagcgtcttcgacgagaaccggtcctggtacttgaccgagaatatacaaaggttccttcccaaccccgcaggcgttcagttggaagaccctgagtttcaggccagcaatatcatgcactcaatcaacggctatgtgtttgatagtctccagctttctgtttgcctccatgaagtagcctattggtacatcttgtcaattggtgctcaaacagacttcctctccgtcttcttctccggctacacctttaagcacaagggcgtgtatgaggacactctcacactctttccattttctggagaaaccgtgttcatgagcatggagaatccaggcctttggatcttgggttgccacaacagtgattttcgcaatcggggaatgactgctctcctcaaagtcagcagctgtgattggaacacaggcgactattacgaagattcttacgaggacataagtgcctactttgactccaagaataacgccattgagcccagatcattctcccagaatcctcccgtgcttaaaaggcatcagcgcgaaggtaccagaactactcttcagtctgatcaagaggagattgactatgacgacaccattagcgtggaaatgaagaaggaggatttcgatatctatgacgaagatgagaaccagtctccgcggagctttcagaagaagacgcgacactacttcattgcagcagtcgaaaggctttgggactacggtatgtcatcatcccctcatgtgttgcgcaatagagctcagagtggaagtgttccacagttcaagaaagtcgtctttcaagagtttacagatggcagcttcacacagcctctctatcggggcgagcttaacgaacatttgggactccttggtccctatatccgagccgaagtggaggacaacattatggttacctttaggaatcaagcctctcgcccctacagcttctactcctccctcatcagttatgaggaggatcagagacaaggcgctgaaccacggaagaactttgtgaaaccgaatgagacgaagacctacttctggaaagtacagcaccacatggcccccacaaaagacgaattcgattgcaaagcatgggcgtatttttcagacgttgacttggagaaagatgtacattcaggacttattggtcctttgttggtgtgtcacactaacactctcaatccagcccatggcaggcaggtgacagtccaggaattcgctcttttctttaccatctttgatgagaccaagtcctggtacttcacggaaaacatggagcgcaattgcagagccccctgtaacatacagatggaggaccctacctttaaggaaaattatcggttccacgcaatcaacggatacattatggatacactccctggccttgtgatggctcaggaccaacgaatcaggtggtacctcctcagcatgggttctaatgagaacatacactccattcacttttcaggacatgtgttcactgtccggaagaaagaagagtataagatggccctcggtaatttgtatccaggcgtgtttgagaccgttgaaatgcttccctctaaagctggcatctggagagtagagtgcttgatcggagaacatcttcacgcaggtatgagcaccttgttcctcgtgtacagcaacaaatgtcagaatccacttggcatggccagtggacacattcgcgactttcagatcacagcatctggccagtatggacaatgggccccaaagttggctcgcctccattactccggtagcataaatgcgtggtccactaaagaacctttcagctggattaaggtcgatcttcttgcccccatgatcatccacggcattaagacacagggagcgaggcagaaattctcctccctctacatctcacagttcattattatgtatagtttggacggcaagaagtggcaaacttatagaggtaacagtactggaacagacatggtgttcttcggcaacgttgatagctctggcatcaaacacaacatctttaatcctcccataatagctcggtacatcagattgcatccgacccactacagcattaggagtacactccgaatggagcttatgggttgcgacttgaattcctgttcaatgccactcggaatggagtctaaagccatctctgatgcacagataaccgccagtagctactttacgaacatgtttgctacgtggtcaccctctaaggcaaggcttcatttgcaaggccggtctaatgcctggagacctcaggtgaacaacccgaaagaatggctccaggtggactttcagaagaccatgaaagtaacaggtgtcactactcagggagttaagtccttggatactagcatgtatgtgaaggagttccttatttcctcatcacaagatggccaccagtggaccctcttctttcagaatggtaaggtcaaagtgtttcagggcaatcaagacagcttcacacccgtggtgaacagtcttgatcctccactcttgacacgataccttcgaatccatccacagtcttgggagcaccagattgcattgcgcatggaagtacttggatgcgaggctcaggacctctac

SEQ ID NO: 1892 - protein, 1457 aa, synthetic construct
  REGION 1..1457: note = Variant of human B-domain deleted Factor VIII
MQIELSTCFFLCLLRFCFSATRRYYLGAVELSWDYMQSDLGELPVDARFPPRVPKSFPFNTSQVYKKTLFVEFTDHLFNIAKPRPPWMGLLGPTIQAEVYDTVVITLKNMASHPVSLHAVGVSYWKASEGAEYDDQTSQREKEDDKVFPGGSHTYVWQVLKENGPMASDPPCLTYSYLSHVDLVKDLNSGLIGALLVCREGSLAKEKTQTLAKFILLFAVFDEGKSWHSETKNSLMQDRDAASARAWPKMHTVNGYVNRTLPGLIGCHRKSVYWHVIGMGTTPEVHSIFLEGHTFLVRNHRQASLGISPITFLTAQTLLRDLGQFLLFCHIPSHQHDGMEAYVKVDSCPEEPQLRMKNNEEAEDYDDDLTDSEMDVVRFDDDNSPSIIQARSGAKKHPKTWVHYIAAEEEDWDYAPLVLAPDDRSYKSQYLNNGPQRIGRKYKKVRFMAYTDETFKTREAIQHESGILGPLLYGEVGDTLLIIFKNQASRPYNIYPHGITDVRPLYSRRLPKGVKHLKDFPILPGEIFKYKWTITVEDGPTKSDPRCLTRYYSSFVNWERDLASGLIGPLLICYKESVDQRGNQIMSDKRNVILFSVFDENRSWYLTENIQRFLPNPAGVQLEDPEFQASNIMHSINGYVFDSLQLSVCLHEVAYWYILSIGAQTDFLSVFFSGYTFKHKGVYEDTLTLFPFSGETVFMSMENPGLWILGCHNSDFRNRGMTALLKVSSCDWNTGDYYEDSYEDISAYFDSKNNAIEPRSFSQNPPVLKRHQREGTRTTLQSDQEEIDYDDTISVEMKKEDFDIYDEDENQSPRSFQKKTRHYFIAAVERLWDYGMSSSPHVLRNRAQSGSVPQFKKVVFQEFTDGSFTQPLYRGELNEHLGLLGPYIRAEVEDNIMVTFRNQASRPYSFYSSLISYEEDQRQGAEPRKNFVKPNETKTYFWKVQHHMAPTKDEFDCKAWAYFSDVDLEKDVHSGLIGPLLVCHTNTLNPAHGRQVTVQEFALFFTIFDETKSWYFTENMERNCRAPCNIQMEDPTFKENYRFHAINGYIMDTLPGLVMAQDQRIRWYLLSMGSNENIHSIHFSGHVFTVRKKEEYKMALGNLYPGVFETVEMLPSKAGIWRVECLIGEHLHAGMSTLFLVYSNKCQNPLGMASGHIRDFQITASGQYGQWAPKLARLHYSGSINAWSTKEPFSWIKVDLLAPMIIHGIKTQGARQKFSSLYISQFIIMYSLDGKKWQTYRGNSTGTDMVFFGNVDSSGIKHNIFNPPIIARYIRLHPTHYSIRSTLRMELMGCDLNSCSMPLGMESKAISDAQITASSYFTNMFATWSPSKARLHLQGRSNAWRPQVNNPKEWLQVDFQKTMKVTGVTTQGVKSLDTSMYVKEFLISSSQDGHQWTLFFQNGKVKVFQGNQDSFTPVVNSLDPPLLTRYLRIHPQSWEHQIALRMEVLGCEAQDLY

SEQ ID NO: 1893 - DNA, 4371 bp, synthetic construct
  misc_feature 1..4371: note = Variant of human B-domain deleted Factor VIII
  source 1..4371: mol_type = other DNA
atgcagattgaactgtctacctgcttcttcctctgtttgctgaggttctgctttagcgccactagacggtactaccttggcgctgtggagctgtcctgggactatatgcagagtgatttgggagagcttcccgtcgacgcacgatttcctcctcgcgttccaaagtcatttccctttaacacaagccaggtgtacaagaagacgctcttcgtcgaattcaccgatcacctgttcaatatcgccaaacccagaccaccatggatgggtcttttggggcctaccatacaagcggaggtgtatgacacagttgttatcactctcaagaacatggcttctcatccggtaagtcttcacgcagtgggcgtgtcctactggaaagcttcagaaggagccgagtatgatgatcagacatcccagagggagaaagaagacgacaaggtatttccaggtgggtctcatacctatgtgtggcaagtgctcaaagagaatggccctatggcaagcgatccgccgtgtttgacttacagctacctttcacacgttgacctcgtcaaggacctcaactccgggttgattggagccttgttggtatgcagggaaggatctcttgccaaagagaagacacagaccctggccaagtttatccttctctttgctgtgttcgatgagggcaaaagttggcatagcgaaacgaagaattccctcatgcaggatcgcgacgcagccagcgccagagcttggcccaagatgcacactgtgaacggatatgtcaataggacgcttcctggcttgattgggtgtcatcggaaaagtgtctactggcacgtgatcggaatggggacaacaccagaggtccactccatatttctcgaaggccataccttccttgttcgaaaccacagacaggcatccttggggatctctcccattacctttctcactgcccaaacgctccttcgtgacttgggtcagttccttctcttttgccatatcccgtcacaccagcatgatggtatggaagcttatgtgaaagtcgacagttgtcctgaggagccacagttgcgcatgaagaataatgaagaagccgaggattacgacgacgatctcaccgattctgagatggacgtggtgaggtttgatgacgacaactctccctccatcattcaagctcggagcggggcgaagaaacaccccaagacttgggtccactatatagcggcggaagaggaggattgggattacgctcctcttgtattggcaccagatgaccgctcatacaaaagccagtacctcaacaacggaccgcagagaattggccggaagtataagaaagtgcgatttatggcctatacagacgaaacctttaagacaagggaggccatccagcatgagagtgggattttgggacctcttctttacggcgaagttggtgataccctcctcatcatcttcaagaatcaagcttctcgcccctataacatttacccacacgggatcactgacgttaggcctttgtatagcagaagacttcccaaaggcgtgaagcatctcaaagacttccccattttgccaggcgagatctttaagtacaaatggaccattacagtggaagatggaccgactaaatcagaccctcgatgccttacgcggtactattcctccttcgtgaattgggagagagatttggcaagcggactcataggaccactcctcatctgttacaaggaatctgtagaccagaggggtaaccagattatgagtgataaacgcaatgtgatcctttttagcgtcttcgacgagaaccggtcctggtacttgaccgagaatatacaaaggttccttcccaaccccgcaggcgttcagttggaagaccctgagtttcaggccagcaatattatgcactcaatcaacggctatgtgtttgatagtctccagctttctgtttgcctccatgaagtagcctattggtacatcttgtcaattggtgctcaaacagacttcctctccgtcttcttctccggctacacctttaagcacaagggcgtgtatgaggacactctcacactctttccattttctggagaaaccgtgttcatgagcatggagaatccaggcctttggatcttgggttgccacaacagtgattttcgcaatcggggaatgactgctctcctcaaagtcagcagctgtgattggaacacaggcgactattacgaagattcttacgaggacataagtgcctactttgactccaagaataacgccattgagcccagatcattctcccagaatcctcccgtgcttaaaaggcatcagcgcgaaggtaccagaactactcttcagtctgatcaagaggagattgactatgacgacaccattagcgtggaaatgaagaaggaggatttcgatatctatgacgaaaaggagaaccagtctccgcggagctttcagaagaagacgcgacactacttcattgcagcagtcgaaaggctttgggactacggtatgtcatcatcccctcatgtgttgcgcaatagagctcagagtggaagtgttccacagttcaagaaagtcgtctttcaagagtttacagatggcagcttcacacagcctctctatcggggcgagcttaacgaacatttgggactccttggtccctatatccgagccgaagtggaggacaacattatggttacctttaggaatcaagcctctcgcccctacagcttctactcctccctcatcagttatgaggaggatcagagacaaggcgctgaaccacggaagaactttgtgaaaccgaatgagacgaagacctacttctggaaagtacagcaccacatggcccccacaaaagacgaattcgattgcaaagcatgggcgtatttttcagacgttgacttggagaaagatgtacattcaggacttattggtcctttgttggtgtgtcacactaacactctcaatccagcccatggcaggcaggtgacagtccaggaattcgctcttttctttaccatctttgatgagaccaagtcctggtacttcacggaaaacatggagcgcaattgcagagccccctgtaacatacagatggaggaccctacctttaaggaaaattatcggttccacgcaatcaacggatacattatggatacactccctggccttgtgatggctcaggaccaacgaatcaggtggtacctcctcagcatgggttctaatgagaacatacactccattcacttttcaggacatgtgttcactgtccggaagaaagaagagtataagatggccctctacaatttgtatccaggcgtgtttgagaccgttgaaatgcttccctctaaagctggcatctggagagtagagtgcttgatcggagaacatcttcacgcaggtatgagcaccttgttcctcgtgtacagcaacaaatgtcagaatccacttggcatggccagtggacacattcgcgactttcagatcacagcatctggccagtatggacaatgggccccaaagttggctcgcctccattactccggtagcataaatgcgtggtccactaaagaacctttcagctggattaaggtcgatcttcttgcccccatgatcatccacggcattaagacacagggagcgaggcagaaattctcctccctctacatctcacagttcattattatgtatagtttggacggcaagaagtggcaaacttatagaggtaacagtactggaacagacatggtgttcttcggcaacgttgatagctctggcatcaaacacaacatctttaatcctcccataatagctcggtacatcagattgcatccgacccactacagcattaggagtacactccgaatggagcttatgggttgcgacttgaattcctgttcaatgccactcggaatggagtctaaagccatctctgatgcacagataaccgccagtagctactttacgaacatgtttgctacgtggtcaccctctaaggcaaggcttcatttgcaaggccggtctaatgcctggagacctcaggtgaacaacccgaaagaatggctccaggtggactttcagaagaccatgaaagtaacaggtgtcactactcagggagttaagtccttggatactagcatgtatgtgaaggagttccttatttcctcatcacaagatggccaccagtggaccctcttctttcagaatggtaaggtcaaagtgtttcagggcaatcaagacagcttcacacccgtggtgaacagtcttgatcctccactcttgacacgataccttcgaatccatccacagtcttgggagcaccagattgcattgcgcatggaagtacttggatgcgaggctcaggacctctac

SEQ ID NO: 1894 - protein, 1457 aa, synthetic construct
  REGION 1..1457: note = Variant of human B-domain deleted Factor VIII
MQIELSTCFFLCLLRFCFSATRRYYLGAVELSWDYMQSDLGELPVDARFPPRVPKSFPFNTSQVYKKTLFVEFTDHLFNIAKPRPPWMGLLGPTIQAEVYDTVVITLKNMASHPVSLHAVGVSYWKASEGAEYDDQTSQREKEDDKVFPGGSHTYVWQVLKENGPMASDPPCLTYSYLSHVDLVKDLNSGLIGALLVCREGSLAKEKTQTLAKFILLFAVFDEGKSWHSETKNSLMQDRDAASARAWPKMHTVNGYVNRTLPGLIGCHRKSVYWHVIGMGTTPEVHSIFLEGHTFLVRNHRQASLGISPITFLTAQTLLRDLGQFLLFCHIPSHQHDGMEAYVKVDSCPEEPQLRMKNNEEAEDYDDDLTDSEMDVVRFDDDNSPSIIQARSGAKKHPKTWVHYIAAEEEDWDYAPLVLAPDDRSYKSQYLNNGPQRIGRKYKKVRFMAYTDETFKTREAIQHESGILGPLLYGEVGDTLLIIFKNQASRPYNIYPHGITDVRPLYSRRLPKGVKHLKDFPILPGEIFKYKWTITVEDGPTKSDPRCLTRYYSSFVNWERDLASGLIGPLLICYKESVDQRGNQIMSDKRNVILFSVFDENRSWYLTENIQRFLPNPAGVQLEDPEFQASNIMHSINGYVFDSLQLSVCLHEVAYWYILSIGAQTDFLSVFFSGYTFKHKGVYEDTLTLFPFSGETVFMSMENPGLWILGCHNSDFRNRGMTALLKVSSCDWNTGDYYEDSYEDISAYFDSKNNAIEPRSFSQNPPVLKRHQREGTRTTLQSDQEEIDYDDTISVEMKKEDFDIYDEKENQSPRSFQKKTRHYFIAAVERLWDYGMSSSPHVLRNRAQSGSVPQFKKVVFQEFTDGSFTQPLYRGELNEHLGLLGPYIRAEVEDNIMVTFRNQASRPYSFYSSLISYEEDQRQGAEPRKNFVKPNETKTYFWKVQHHMAPTKDEFDCKAWAYFSDVDLEKDVHSGLIGPLLVCHTNTLNPAHGRQVTVQEFALFFTIFDETKSWYFTENMERNCRAPCNIQMEDPTFKENYRFHAINGYIMDTLPGLVMAQDQRIRWYLLSMGSNENIHSIHFSGHVFTVRKKEEYKMALYNLYPGVFETVEMLPSKAGIWRVECLIGEHLHAGMSTLFLVYSNKCQNPLGMASGHIRDFQITASGQYGQWAPKLARLHYSGSINAWSTKEPFSWIKVDLLAPMIIHGIKTQGARQKFSSLYISQFIIMYSLDGKKWQTYRGNSTGTDMVFFGNVDSSGIKHNIFNPPIIARYIRLHPTHYSIRSTLRMELMGCDLNSCSMPLGMESKAISDAQITASSYFTNMFATWSPSKARLHLQGRSNAWRPQVNNPKEWLQVDFQKTMKVTGVTTQGVKSLDTSMYVKEFLISSSQDGHQWTLFFQNGKVKVFQGNQDSFTPVVNSLDPPLLTRYLRIHPQSWEHQIALRMEVLGCEAQDLY

SEQ ID NO: 1895 - DNA, 4371 bp, synthetic construct
  misc_feature 1..4371: note = Variant of human B-domain deleted Factor VIII
  source 1..4371: mol_type = other DNA
atgcagattgaactgtctacctgcttcttcctctgtttgctgaggttctgctttagcgccactagacggtactaccttggcgctgtggagctgtcctgggactatatgcagagtgatttgggagagcttcccgtcgacgcacgatttcctcctcgcgttccaaagtcatttccctttaacacaagccaggtgtacaagaagacgctcttcgtcgaattcaccgatcacctgttcaatatcgccaaacccagaccaccatggatgggtcttttggggcctaccatacaagcggaggtgtatgacacagttgttatcactctcaagaacatggcttctcatccggtaagtcttcacgcagtgggcgtgtcctactggaaagcttcagaaggagccgagtatgatgatcagacatcccagagggagaaagaagacgacaaggtatttccaggtgggtctcatacctatgtgtggcaagtgctcaaagagaatggccctatggcaagcgatccgccgtgtttgacttacagctacctttcacacgttgacctcgtcaaggacctcaactccgggttgattggagccttgttggtatgcagggaaggatctcttgccaaagagaagacacagaccctggccaagtttatccttctctttgctgtgttcgatgagggcaaaagttggcatagcgaaacgaagaattccctcatgcaggatcgcgacgcagccagcgccagagcttggcccaagatgcacactgtgaacggatatgtcaataggacgcttcctggcttgattgggtgtcatcggaaaagtgtctactggcacgtgatcggaatggggacaacaccagaggtccactccatatttctcgaaggccataccttccttgttcgaaaccacagacaggcatccttggggatctctcccattacctttctcactgcccaaacgctccttcgtgacttgggtcagttccttctcttttgccatatcccgtcacaccagcatgatggtatggaagcttatgtgaaagtcgacagttgtcctgaggagccacagttgcgcatgaagaataatgaagaagccgaggattacgacgacgatctcaccgattctgagatggacgtggtgaggtttgatgacgacaactctccctccatcattcaagctcggagcggggcgaagaaacaccccaagacttgggtccactatatagcggcggaagaggaggattgggattacgctcctcttgtattggcaccagatgaccgctcatacaaaagccagtacctcaacaacggaccgcagagaattggccggaagtataagaaagtgcgatttatggcctatacagacgaaacctttaagacaagggaggccatccagcatgagagtgggattttgggacctcttctttacggcgaagttggtgataccctcctcatcatcttcaagaatcaagcttctcgcccctataacatttacccacacgggatcactgacgttaggcctttgtatagcagaagacttcccaaaggcgtgaagcatctcaaagacttccccattttgccaggcgagatctttaagtacaaatggaccattacagtggaagatggaccgactaaatcagaccctcgatgccttacgcggtactattcctccttcgtgaattgggagagagatttggcaagcggactcataggaccactcctcatctgttacaaggaatctgtagaccagaggggtaaccagattatgagtgataaacgcaatgtgatcctttttagcgtcttcgacgagaaccggtcctggtacttgaccgagaatatacaaaggttccttcccaaccccgcaggcgttcagttggaagaccctgagtttcaggccagcaatattatgcactcaatcaacggctatgtgtttgatagtctccagctttctgtttgcctccatgaagtagcctattggtacatcttgtcaattggtgctcaaacagacttcctctccgtcttcttctccggctacacctttaagcacaagggcgtgtatgaggacactctcacactctttccattttctggagaaaccgtgttcatgagcatggagaatccaggcctttggatcttgggttgccacaacagtgattttcgcaatcggggaatgactgctctcctcaaagtcagcagctgtgattggaacacaggcgactattacgaagattcttacgaggacataagtgcctactttgactccaagaataacgccattgagcccagatcattctcccagaatcctcccgtgcttaaaaggcatcagcgcgaaggtaccagaactactcttcagtctgatcaagaggagattgactatgacgacaccattagcgtggaaatgaagaaggaggatttcgatatctatgacgaaagtgagaaccagtctccgcggagctttcagaagaagacgcgacactacttcattgcagcagtcgaaaggctttgggactacggtatgtcatcatcccctcatgtgttgcgcaatagagctcagagtggaagtgttccacagttcaagaaagtcgtctttcaagagtttacagatggcagcttcacacagcctctctatcggggcgagcttaacgaacatttgggactccttggtccctatatccgagccgaagtggaggacaacattatggttacctttaggaatcaagcctctcgcccctacagcttctactcctccctcatcagttatgaggaggatcagagacaaggcgctgaaccacggaagaactttgtgaaaccgaatgagacgaagacctacttctggaaagtacagcaccacatggcccccacaaaagacgaattcgattgcaaagcatgggcgtatttttcagacgttgacttggagaaagatgtacattcaggacttattggtcctttgttggtgtgtcacactaacactctcaatccagcccatggcaggcaggtgacagtccaggaattcgctcttttctttaccatctttgatgagaccaagtcctggtacttcacggaaaacatggagcgcaattgcagagccccctgtaacatacagatggaggaccctacctttaaggaaaattatcggttccacgcaatcaacggatacattatggatacactccctggccttgtgatggctcaggaccaacgaatcaggtggtacctcctcagcatgggttctaatgagaacatacactccattcacttttcaggacatgtgttcactgtccggaagaaagaagagtataagatggccctctacaatttgtatccaggcgtgtttgagaccgttgaaatgcttccctctaaagctggcatctggagagtagagtgcttgatcggagaacatcttcacgcaggtatgagcaccttgttcctcgtgtacagcaacaaatgtcagaatccacttggcatggccagtggacacattcgcgactttcagatcacagcatctggccagtatggacaatgggccccaaagttggctcgcctccattactccggtagcataaatgcgtggtccactaaagaacctttcagctggattaaggtcgatcttcttgcccccatgatcatccacggcattaagacacagggagcgaggcagaaattctcctccctctacatctcacagttcattattatgtatagtttggacggcaagaagtggcaaacttatagaggtaacagtactggaacagacatggtgttcttcggcaacgttgatagctctggcatcaaacacaacatctttaatcctcccataatagctcggtacatcagattgcatccgacccactacagcattaggagtacactccgaatggagcttatgggttgcgacttgaattcctgttcaatgccactcggaatggagtctaaagccatctctgatgcacagataaccgccagtagctactttacgaacatgtttgctacgtggtcaccctctaaggcaaggcttcatttgcaaggccggtctaatgcctggagacctcaggtgaacaacccgaaagaatggctccaggtggactttcagaagaccatgaaagtaacaggtgtcactactcagggagttaagtccttggatactagcatgtatgtgaaggagttccttatttcctcatcacaagatggccaccagtggaccctcttctttcagaatggtaaggtcaaagtgtttcagggcaatcaagacagcttcacacccgtggtgaacagtcttgatcctccactcttgacacgataccttcgaatccatccacagtcttgggagcaccagattgcattgcgcatggaagtacttggatgcgaggctcaggacctctac

SEQ ID NO: 1896 - protein, 1457 aa, synthetic construct
  REGION 1..1457: note = Variant of human B-domain deleted Factor VIII
MQIELSTCFFLCLLRFCFSATRRYYLGAVELSWDYMQSDLGELPVDARFPPRVPKSFPFNTSQVYKKTLFVEFTDHLFNIAKPRPPWMGLLGPTIQAEVYDTVVITLKNMASHPVSLHAVGVSYWKASEGAEYDDQTSQREKEDDKVFPGGSHTYVWQVLKENGPMASDPPCLTYSYLSHVDLVKDLNSGLIGALLVCREGSLAKEKTQTLAKFILLFAVFDEGKSWHSETKNSLMQDRDAASARAWPKMHTVNGYVNRTLPGLIGCHRKSVYWHVIGMGTTPEVHSIFLEGHTFLVRNHRQASLGISPITFLTAQTLLRDLGQFLLFCHIPSHQHDGMEAYVKVDSCPEEPQLRMKNNEEAEDYDDDLTDSEMDVVRFDDDNSPSIIQARSGAKKHPKTWVHYIAAEEEDWDYAPLVLAPDDRSYKSQYLNNGPQRIGRKYKKVRFMAYTDETFKTREAIQHESGILGPLLYGEVGDTLLIIFKNQASRPYNIYPHGITDVRPLYSRRLPKGVKHLKDFPILPGEIFKYKWTITVEDGPTKSDPRCLTRYYSSFVNWERDLASGLIGPLLICYKESVDQRGNQIMSDKRNVILFSVFDENRSWYLTENIQRFLPNPAGVQLEDPEFQASNIMHSINGYVFDSLQLSVCLHEVAYWYILSIGAQTDFLSVFFSGYTFKHKGVYEDTLTLFPFSGETVFMSMENPGLWILGCHNSDFRNRGMTALLKVSSCDWNTGDYYEDSYEDISAYFDSKNNAIEPRSFSQNPPVLKRHQREGTRTTLQSDQEEIDYDDTISVEMKKEDFDIYDESENQSPRSFQKKTRHYFIAAVERLWDYGMSSSPHVLRNRAQSGSVPQFKKVVFQEFTDGSFTQPLYRGELNEHLGLLGPYIRAEVEDNIMVTFRNQASRPYSFYSSLISYEEDQRQGAEPRKNFVKPNETKTYFWKVQHHMAPTKDEFDCKAWAYFSDVDLEKDVHSGLIGPLLVCHTNTLNPAHGRQVTVQEFALFFTIFDETKSWYFTENMERNCRAPCNIQMEDPTFKENYRFHAINGYIMDTLPGLVMAQDQRIRWYLLSMGSNENIHSIHFSGHVFTVRKKEEYKMALYNLYPGVFETVEMLPSKAGIWRVECLIGEHLHAGMSTLFLVYSNKCQNPLGMASGHIRDFQITASGQYGQWAPKLARLHYSGSINAWSTKEPFSWIKVDLLAPMIIHGIKTQGARQKFSSLYISQFIIMYSLDGKKWQTYRGNSTGTDMVFFGNVDSSGIKHNIFNPPIIARYIRLHPTHYSIRSTLRMELMGCDLNSCSMPLGMESKAISDAQITASSYFTNMFATWSPSKARLHLQGRSNAWRPQVNNPKEWLQVDFQKTMKVTGVTTQGVKSLDTSMYVKEFLISSSQDGHQWTLFFQNGKVKVFQGNQDSFTPVVNSLDPPLLTRYLRIHPQSWEHQIALRMEVLGCEAQDLY

SEQ ID NO: 1897 - DNA, 4371 bp, synthetic construct
  misc_feature 1..4371: note = Variant of human B-domain deleted Factor VIII
  source 1..4371: mol_type = other DNA
atgcagattgaactgtctacctgcttcttcctctgtttgctgaggttctgctttagcgccactagacggtactaccttggcgctgtggagctgtcctgggactatatgcagagtgatttgggagagcttcccgtcgacgcacgatttcctcctcgcgttccaaagtcatttccctttaacacaagccaggtgtacaagaagacgctcttcgtcgaattcaccgatcacctgttcaatatcgccaaacccagaccaccatggatgggtcttttggggcctaccatacaagcggaggtgtatgacacagttgttatcactctcaagaacatggcttctcatccggtaagtcttcacgcagtgggcgtgtcctactggaaagcttcagaaggagccgagtatgatgatcagacatcccagagggagaaagaagacgacaaggtatttccaggtgggtctcatacctatgtgtggcaagtgctcaaagagaatggccctatggcaagcgatccgccgtgtttgacttacagctacctttcacacgttgacctcgtcaaggacctcaactccgggttgattggagccttgttggtatgcagggaaggatctcttgccaaagagaagacacagaccctggccaagtttatccttctctttgctgtgttcgatgagggcaaaagttggcatagcgaaacgaagaattccctcatgcaggatcgcgacgcagccagcgccagagcttggcccaagatgcacactgtgaacggatatgtcaataggacgcttcctggcttgattgggtgtcatcggaaaagtgtctactggcacgtgatcggaatggggacaacaccagaggtccactccatatttctcgaaggccataccttccttgttcgaaaccacagacaggcatccttggggatctctcccattacctttctcactgcccaaacgctccttcgtgacttgggtcagttccttctcttttgccatatcccgtcacaccagcatgatggtatggaagcttatgtgaaagtcgacagttgtcctgaggagccacagttgcgcatgaagaataatgaagaagccgaggattacgacgacgatctcaccgattctgagatggacgtggtgaggtttgatgacgacaactctccctccatcattcaagctcggagcggggcgaagaaacaccccaagacttgggtccactatatagcggcggaagaggaggattgggattacgctcctcttgtattggcaccagatgaccgctcatacaaaagccagtacctcaacaacggaccgcagagaattggccggaagtataagaaagtgcgatttatggcctatacagacgaaacctttaagacaagggaggccatccagcatgagagtgggattttgggacctcttctttacggcgaagttggtgataccctcctcatcatcttcaagaatcaagcttctcgcccctataacatttacccacacgggatcactgacgttaggcctttgtatagcagaagacttcccaaaggcgtgaagcatctcaaagacttccccattttgccaggcgagatctttaagtacaaatggaccattacagtggaagatggaccgactaaatcagaccctcgatgccttacgcggtactattcctccttcgtgaattgggagagagatttggcaagcggactcataggaccactcctcatctgttacaaggaatctgtagaccagaggggtaaccagattatgagtgataaacgcaatgtgatcctttttagcgtcttcgacgagaaccggtcctggtacttgaccgagaatatacaaaggttccttcccaaccccgcaggcgttcagttggaagaccctgagtttcaggccagcaatattatgcactcaatcaacggctatgtgtttgatagtctccagctttctgtttgcctccatgaagtagcctattggtacatcttgtcaattggtgctcaaacagacttcctctccgtcttcttctccggctacacctttaagcacaagggcgtgtatgaggacactctcacactctttccattttctggagaaaccgtgttcatgagcatggagaatccaggcctttggatcttgggttgccacaacagtgattttcgcaatcggggaatgactgctctcctcaaagtcagcagctgtgattggaacacaggcgactattacgaagattcttacgaggacataagtgcctactttgactccaagaataacgccattgagcccagatcattctcccagaatcctcccgtgcttaaaaggcatcagcgcgaaggtaccagaactactcttcagtctgatcaagaggagattgactatgcggacaccattagcgtggaaatgaagaaggaggatttcgatatctatgacgaagatgagaaccagtctccgcggagctttcagaagaagacgcgacactacttcattgcagcagtcgaaaggctttgggactacggtatgtcatcatcccctcatgtgttgcgcaatagagctcagagtggaagtgttccacagttcaagaaagtcgtctttcaagagtttacagatggcagcttcacacagcctctctatcggggcgagcttaacgaacatttgggactccttggtccctatatccgagccgaagtggaggacaacattatggttacctttaggaatcaagcctctcgcccctacagcttctactcctccctcatcagttatgaggaggatcagagacaaggcgctgaaccacggaagaactttgtgaaaccgaatgagacgaagacctacttctggaaagtacagcaccacatggcccccacaaaagacgaattcgattgcaaagcatgggcgtatttttcagacgttgacttggagaaagatgtacattcaggacttattggtcctttgttggtgtgtcacactaacactctcaatccagcccatggcaggcaggtgacagtccaggaattcgctcttttctttaccatctttgatgagaccaagtcctggtacttcacggaaaacatggagcgcaattgcagagccccctgtaacatacagatggaggaccctacctttaaggaaaattatcggttccacgcaatcaacggatacattatggatacactccctggccttgtgatggctcaggaccaacgaatcaggtggtacctcctcagcatgggttctaatgagaacatacactccattcacttttcaggacatgtgttcactgtccggaagaaagaagagtataagatggccctctacaatttgtatccaggcgtgtttgagaccgttgaaatgcttccctctaaagctggcatctggagagtagagtgcttgatcggagaacatcttcacgcaggtatgagcaccttgttcctcgtgtacagcaacaaatgtcagaatccacttggcatggccagtggacacattcgcgactttcagatcacagcatctggccagtatggacaatgggccccaaagttggctcgcctccattactccggtagcataaatgcgtggtccactaaagaacctttcagctggattaaggtcgatcttcttgcccccatgatcatccacggcattaagacacagggagcgaggcagaaattctcctccctctacatctcacagttcattattatgtatagtttggacggcaagaagtggcaaacttatagaggtaacagtactggaacagacatggtgttcttcggcaacgttgatagctctggcatcaaacacaacatctttaatcctcccataatagctcggtacatcagattgcatccgacccactacagcattaggagtacactccgaatggagcttatgggttgcgacttgaattcctgttcaatgccactcggaatggagtctaaagccatctctgatgcacagataaccgccagtagctactttacgaacatgtttgctacgtggtcaccctctaaggcaaggcttcatttgcaaggccggtctaatgcctggagacctcaggtgaacaacccgaaagaatggctccaggtggactttcagaagaccatgaaagtaacaggtgtcactactcagggagttaagtccttggatactagcatgtatgtgaaggagttccttatttcctcatcacaagatggccaccagtggaccctcttctttcagaatggtaaggtcaaagtgtttcagggcaatcaagacagcttcacacccgtggtgaacagtcttgatcctccactcttgacacgataccttcgaatccatccacagtcttgggagcaccagattgcattgcgcatggaagtacttggatgcgaggctcaggacctctac

SEQ ID NO: 1898 - protein, 1457 aa, synthetic construct
  REGION 1..1457: note = Variant of human B-domain deleted Factor VIII
MQIELSTCFFLCLLRFCFSATRRYYLGAVELSWDYMQSDLGELPVDARFPPRVPKSFPFNTSQVYKKTLFVEFTDHLFNIAKPRPPWMGLLGPTIQAEVYDTVVITLKNMASHPVSLHAVGVSYWKASEGAEYDDQTSQREKEDDKVFPGGSHTYVWQVLKENGPMASDPPCLTYSYLSHVDLVKDLNSGLIGALLVCREGSLAKEKTQTLAKFILLFAVFDEGKSWHSETKNSLMQDRDAASARAWPKMHTVNGYVNRTLPGLIGCHRKSVYWHVIGMGTTPEVHSIFLEGHTFLVRNHRQASLGISPITFLTAQTLLRDLGQFLLFCHIPSHQHDGMEAYVKVDSCPEEPQLRMKNNEEAEDYDDDLTDSEMDVVRFDDDNSPSIIQARSGAKKHPKTWVHYIAAEEEDWDYAPLVLAPDDRSYKSQYLNNGPQRIGRKYKKVRFMAYTDETFKTREAIQHESGILGPLLYGEVGDTLLIIFKNQASRPYNIYPHGITDVRPLYSRRLPKGVKHLKDFPILPGEIFKYKWTITVEDGPTKSDPRCLTRYYSSFVNWERDLASGLIGPLLICYKESVDQRGNQIMSDKRNVILFSVFDENRSWYLTENIQRFLPNPAGVQLEDPEFQASNIMHSINGYVFDSLQLSVCLHEVAYWYILSIGAQTDFLSVFFSGYTFKHKGVYEDTLTLFPFSGETVFMSMENPGLWILGCHNSDFRNRGMTALLKVSSCDWNTGDYYEDSYEDISAYFDSKNNAIEPRSFSQNPPVLKRHQREGTRTTLQSDQEEIDYADTISVEMKKEDFDIYDEDENQSPRSFQKKTRHYFIAAVERLWDYGMSSSPHVLRNRAQSGSVPQFKKVVFQEFTDGSFTQPLYRGELNEHLGLLGPYIRAEVEDNIMVTFRNQASRPYSFYSSLISYEEDQRQGAEPRKNFVKPNETKTYFWKVQHHMAPTKDEFDCKAWAYFSDVDLEKDVHSGLIGPLLVCHTNTLNPAHGRQVTVQEFALFFTIFDETKSWYFTENMERNCRAPCNIQMEDPTFKENYRFHAINGYIMDTLPGLVMAQDQRIRWYLLSMGSNENIHSIHFSGHVFTVRKKEEYKMALYNLYPGVFETVEMLPSKAGIWRVECLIGEHLHAGMSTLFLVYSNKCQNPLGMASGHIRDFQITASGQYGQWAPKLARLHYSGSINAWSTKEPFSWIKVDLLAPMIIHGIKTQGARQKFSSLYISQFIIMYSLDGKKWQTYRGNSTGTDMVFFGNVDSSGIKHNIFNPPIIARYIRLHPTHYSIRSTLRMELMGCDLNSCSMPLGMESKAISDAQITASSYFTNMFATWSPSKARLHLQGRSNAWRPQVNNPKEWLQVDFQKTMKVTGVTTQGVKSLDTSMYVKEFLISSSQDGHQWTLFFQNGKVKVFQGNQDSFTPVVNSLDPPLLTRYLRIHPQSWEHQIALRMEVLGCEAQDLY

SEQ ID NO: 1899 - DNA, 4371 bp, synthetic construct
  misc_feature 1..4371: note = Variant of human B-domain deleted Factor VIII
  source 1..4371: mol_type = other DNA
atgcagattgaactgtctacctgcttcttcctctgtttgctgaggttctgctttagcgccactagacggtactaccttggcgctgtggagctgtcctgggactatatgcagagtgatttgggagagcttcccgtcgacgcacgatttcctcctcgcgttccaaagtcatttccctttaacacaagccaggtgtacaagaagacgctcttcgtcgaattcaccgatcacctgttcaatatcgccaaacccagaccaccatggatgggtcttttggggcctaccatacaagcggaggtgtatgacacagttgttatcactctcaagaacatggcttctcatccggtaagtcttcacgcagtgggcgtgtcctactggaaagcttcagaaggagccgagtatgatgatcagacatcccagagggagaaagaagacgacaaggtatttccaggtgggtctcatacctatgtgtggcaagtgctcaaagagaatggccctatggcaagcgatccgccgtgtttgacttacagctacctttcacacgttgacctcgtcaaggacctcaactccgggttgattggagccttgttggtatgcagggaaggatctcttgccaaagagaagacacagaccctggccaagtttatccttctctttgctgtgttcgatgagggcaaaagttggcatagcgaaacgaagaattccctcatgcaggatcgcgacgcagccagcgccagagcttggcccaagatgcacactgtgaacggatatgtcaataggacgcttcctggcttgattgggtgtcatcggaaaagtgtctactggcacgtgatcggaatggggacaacaccagaggtccactccatatttctcgaaggccataccttccttgttcgaaaccacagacaggcatccttggggatctctcccattacctttctcactgcccaaacgctccttcgtgacttgggtcagttccttctcttttgccatatcccgtcacaccagcatgatggtatggaagcttatgtgaaagtcgacagttgtcctgaggagccacagttgcgcatgaagaataatgaagaagccgaggattacgacgacgatctcaccgattctgagatggacgtggtgaggtttgatgacgacaactctccctccatcattcaagctcggagcggggcgaagaaacaccccaagacttgggtccactatatagcggcggaagaggaggattgggattacgctcctcttgtattggcaccagatgaccgctcatacaaaagccagtacctcaacaacggaccgcagagaattggccggaagtataagaaagtgcgatttatggcctatacagacgaaacctttaagacaagggaggccatccagcatgagagtgggattttgggacctcttctttacggcgaagttggtgataccctcctcatcatcttcaagaatcaagcttctcgcccctataacatttacccacacgggatcactgacgttaggcctttgtatagcagaagacttcccaaaggcgtgaagcatctcaaagacttccccattttgccaggcgagatctttaagtacaaatggaccattacagtggaagatggaccgactaaatcagaccctcgatgccttacgcggtactattcctccttcgtgaattgggagagagatttggcaagcggactcataggaccactcctcatctgttacaaggaatctgtagaccagaggggtaaccagattatgagtgataaacgcaatgtgatcctttttagcgtcttcgacgagaaccggtcctggtacttgaccgagaatatacaaaggttccttcccaaccccgcaggcgttcagttggaagaccctgagtttcaggccagcaatattatgcactcaatcaacggctatgtgtttgatagtctccagctttctgtttgcctccatgaagtagcctattggtacatcttgtcaattggtgctcaaacagacttcctctccgtcttcttctccggctacacctttaagcacaagggcgtgtatgaggacactctcacactctttccattttctggagaaaccgtgttcatgagcatggagaatccaggcctttggatcttgggttgccacaacagtgattttcgcaatcggggaatgactgctctcctcaaagtcagcagctgtgattggaacacaggcgactattacgaagattcttacgaggacataagtgcctactttgactccaagaataacgccattgagcccagatcattctcccagaatcctcccgtgcttaaaaggcatcagcgcgaaggtaccagaactactcttcagtctgatcaagaggagattgactatgacgacaccattagcgtggaaatgaagaaggttgatttcgatatctatgacgaagatgagaaccagtctccgcggagctttcagaagaagacgcgacactacttcattgcagcagtcgaaaggctttgggactacggtatgtcatcatcccctcatgtgttgcgcaatagagctcagagtggaagtgttccacagttcaagaaagtcgtctttcaagagtttacagatggcagcttcacacagcctctctatcggggcgagcttaacgaacatttgggactccttggtccctatatccgagccgaagtggaggacaacattatggttacctttaggaatcaagcctctcgcccctacagcttctactcctccctcatcagttatgaggaggatcagagacaaggcgctgaaccacggaagaactttgtgaaaccgaatgagacgaagacctacttctggaaagtacagcaccacatggcccccacaaaagacgaattcgattgcaaagcatgggcgtatttttcagacgttgacttggagaaagatgtacattcaggacttattggtcctttgttggtgtgtcacactaacactctcaatccagcccatggcaggcaggtgacagtccaggaattcgctcttttctttaccatctttgatgagaccaagtcctggtacttcacggaaaacatggagcgcaattgcagagccccctgtaacatacagatggaggaccctacctttaaggaaaattatcggttccacgcaatcaacggatacattatggatacactccctggccttgtgatggctcaggaccaacgaatcaggtggtacctcctcagcatgggttctaatgagaacatacactccattcacttttcaggacatgtgttcactgtccggaagaaagaagagtataagatggccctctacaatttgtatccaggcgtgtttgagaccgttgaaatgcttccctctaaagctggcatctggagagtagagtgcttgatcggagaacatcttcacgcaggtatgagcaccttgttcctcgtgtacagcaacaaatgtcagaatccacttggcatggccagtggacacattcgcgactttcagatcacagcatctggccagtatggacaatgggccccaaagttggctcgcctccattactccggtagcataaatgcgtggtccactaaagaacctttcagctggattaaggtcgatcttcttgcccccatgatcatccacggcattaagacacagggagcgaggcagaaattctcctccctctacatctcacagttcattattatgtatagtttggacggcaagaagtggcaaacttatagaggtaacagtactggaacagacatggtgttcttcggcaacgttgatagctctggcatcaaacacaacatctttaatcctcccataatagctcggtacatcagattgcatccgacccactacagcattaggagtacactccgaatggagcttatgggttgcgacttgaattcctgttcaatgccactcggaatggagtctaaagccatctctgatgcacagataaccgccagtagctactttacgaacatgtttgctacgtggtcaccctctaaggcaaggcttcatttgcaaggccggtctaatgcctggagacctcaggtgaacaacccgaaagaatggctccaggtggactttcagaagaccatgaaagtaacaggtgtcactactcagggagttaagtccttggatactagcatgtatgtgaaggagttccttatttcctcatcacaagatggccaccagtggaccctcttctttcagaatggtaaggtcaaagtgtttcagggcaatcaagacagcttcacacccgtggtgaacagtcttgatcctccactcttgacacgataccttcgaatccatccacagtcttgggagcaccagattgcattgcgcatggaagtacttggatgcgaggctcaggacctctac

SEQ ID NO: 1900 - protein, 1457 aa, synthetic construct
  REGION 1..1457: note = Variant of human B-domain deleted Factor VIII
MQIELSTCFFLCLLRFCFSATRRYYLGAVELSWDYMQSDLGELPVDARFPPRVPKSFPFNTSQVYKKTLFVEFTDHLFNIAKPRPPWMGLLGPTIQAEVYDTVVITLKNMASHPVSLHAVGVSYWKASEGAEYDDQTSQREKEDDKVFPGGSHTYVWQVLKENGPMASDPPCLTYSYLSHVDLVKDLNSGLIGALLVCREGSLAKEKTQTLAKFILLFAVFDEGKSWHSETKNSLMQDRDAASARAWPKMHTVNGYVNRTLPGLIGCHRKSVYWHVIGMGTTPEVHSIFLEGHTFLVRNHRQASLGISPITFLTAQTLLRDLGQFLLFCHIPSHQHDGMEAYVKVDSCPEEPQLRMKNNEEAEDYDDDLTDSEMDVVRFDDDNSPSIIQARSGAKKHPKTWVHYIAAEEEDWDYAPLVLAPDDRSYKSQYLNNGPQRIGRKYKKVRFMAYTDETFKTREAIQHESGILGPLLYGEVGDTLLIIFKNQASRPYNIYPHGITDVRPLYSRRLPKGVKHLKDFPILPGEIFKYKWTITVEDGPTKSDPRCLTRYYSSFVNWERDLASGLIGPLLICYKESVDQRGNQIMSDKRNVILFSVFDENRSWYLTENIQRFLPNPAGVQLEDPEFQASNIMHSINGYVFDSLQLSVCLHEVAYWYILSIGAQTDFLSVFFSGYTFKHKGVYEDTLTLFPFSGETVFMSMENPGLWILGCHNSDFRNRGMTALLKVSSCDWNTGDYYEDSYEDISAYFDSKNNAIEPRSFSQNPPVLKRHQREGTRTTLQSDQEEIDYDDTISVEMKKVDFDIYDEDENQSPRSFQKKTRHYFIAAVERLWDYGMSSSPHVLRNRAQSGSVPQFKKVVFQEFTDGSFTQPLYRGELNEHLGLLGPYIRAEVEDNIMVTFRNQASRPYSFYSSLISYEEDQRQGAEPRKNFVKPNETKTYFWKVQHHMAPTKDEFDCKAWAYFSDVDLEKDVHSGLIGPLLVCHTNTLNPAHGRQVTVQEFALFFTIFDETKSWYFTENMERNCRAPCNIQMEDPTFKENYRFHAINGYIMDTLPGLVMAQDQRIRWYLLSMGSNENIHSIHFSGHVFTVRKKEEYKMALYNLYPGVFETVEMLPSKAGIWRVECLIGEHLHAGMSTLFLVYSNKCQNPLGMASGHIRDFQITASGQYGQWAPKLARLHYSGSINAWSTKEPFSWIKVDLLAPMIIHGIKTQGARQKFSSLYISQFIIMYSLDGKKWQTYRGNSTGTDMVFFGNVDSSGIKHNIFNPPIIARYIRLHPTHYSIRSTLRMELMGCDLNSCSMPLGMESKAISDAQITASSYFTNMFATWSPSKARLHLQGRSNAWRPQVNNPKEWLQVDFQKTMKVTGVTTQGVKSLDTSMYVKEFLISSSQDGHQWTLFFQNGKVKVFQGNQDSFTPVVNSLDPPLLTRYLRIHPQSWEHQIALRMEVLGCEAQDLY

SEQ ID NO: 1901 - DNA, 4371 bp, synthetic construct
  misc_feature 1..4371: note = Variant of human B-domain deleted Factor VIII
  source 1..4371: mol_type = other DNA
atgcagattgaactgtctacctgcttcttcctctgtttgctgaggttctgctttagcgccactagacggtactaccttggcgctgtggagctgtcctgggactatatgcagagtgatttgggagagcttcccgtcgacgcacgatttcctcctcgcgttccaaagtcatttccctttaacacaagccaggtgtacaagaagacgctcttcgtcgaattcaccgatcacctgttcaatatcgccaaacccagaccaccatggatgggtcttttggggcctaccatacaagcggaggtgtatgacacagttgttatcactctcaagaacatggcttctcatccggtaagtcttcacgcagtgggcgtgtcctactggaaagcttcagaaggagccgagtatgatgatcagacatcccagagggagaaagaagacgacaaggtatttccaggtgggtctcatacctatgtgtggcaagtgctcaaagagaatggccctatggcaagcgatccgccgtgtttgacttacagctacctttcacacgttgacctcgtcaaggacctcaactccgggttgattggagccttgttggtatgcagggaaggatctcttgccaaagagaagacacagaccctggccaagtttatccttctctttgctgtgttcgatgagggcaaaagttggcatagcgaaacgaagaattccctcatgcaggatcgcgacgcagccagcgccagagcttggcccaagatgcacactgtgaacggatatgtcaataggacgcttcctggcttgattgggtgtcatcggaaaagtgtctactggcacgtgatcggaatggggacaacaccagaggtccactccatatttctcgaaggccataccttccttgttcgaaaccacagacaggcatccttggggatctctcccattacctttctcactgcccaaacgctccttcgtgacttgggtcagttccttctcttttgccatatcccgtcacaccagcatgatggtatggaagcttatgtgaaagtcgacagttgtcctgaggagccacagttgcgcatgaagaataatgaagaagccgaggattacgacgacgatctcaccgattctgagatggacgtggtgaggtttgatgacgacaactctccctccatcattcaagctcggagcggggcgaagaaacaccccaagacttgggtccactatatagcggcggaagaggaggattgggattacgctcctcttgtattggcaccagatgaccgctcatacaaaagccagtacctcaacaacggaccgcagagaattggccggaagtataagaaagtgcgatttatggcctatacagacgaaacctttaagacaagggaggccatccagcatgagagtgggattttgggacctcttctttacggcgaagttggtgataccctcctcatcatcttcaagaatcaagcttctcgcccctataacatttacccacacgggatcactgacgttaggcctttgtatagcagaagacttcccaaaggcgtgaagcatctcaaagacttccccattttgccaggcgagatctttaagtacaaatggaccattacagtggaagatggaccgactaaatcagaccctcgatgccttacgcggtactattcctccttcgtgaattgggagagagatttggcaagcggactcataggaccactcctcatctgttacaaggaatctgtagaccagaggggtaaccagattatgagtgataaacgcaatgtgatcctttttagcgtcttcgacgagaaccggtcctggtacttgaccgagaatatacaaaggttccttcccaaccccgcaggcgttcagttggaagaccctgagtttcaggccagcaatattatgcactcaatcaacggctatgtgtttgatagtctccagctttctgtttgcctccatgaagtagcctattggtacatcttgtcaattggtgctcaaacagacttcctctccgtcttcttctccggctacacctttaagcaccttggcgtgtatgaggacactctcacactctttccattttctggagaaaccgtgttcatgagcatggagaatccaggcctttggatcttgggttgccacaacagtgattttcgcaatcggggaatgactgctctcctcaaagtcagcagctgtgattggaacacaggcgactattacgaagattcttacgaggacataagtgcctactttgactccaagaataacgccattgagcccagatcattctcccagaatcctcccgtgcttaaaaggcatcagcgcgaaggtaccagaactactcttcagtctgatcaagaggagattgactatgacgacaccattagcgtggaaatgaagaaggaggatttcgatatctatgacgaagatgagaaccagtctccgcggagctttcagaagaagacgcgacactacttcattgcagcagtcgaaaggctttgggactacggtatgtcatcatcccctcatgtgttgcgcaatagagctcagagtggaagtgttccacagttcaagaaagtcgtctttcaagagtttacagatggcagcttcacacagcctctctatcggggcgagcttaacgaacatttgggactccttggtccctatatccgagccgaagtggaggacaacattatggttacctttaggaatcaagcctctcgcccctacagcttctactcctccctcatcagttatgaggaggatcagagacaaggcgctgaaccacggaagaactttgtgaaaccgaatgagacgaagacctacttctggaaagtacagcaccacatggcccccacaaaagacgaattcgattgcaaagcatgggcgtatttttcagacgttgacttggagaaagatgtacattcaggacttattggtcctttgttggtgtgtcacactaacactctcaatccagcccatggcaggcaggtgacagtccaggaattcgctcttttctttaccatctttgatgagaccaagtcctggtacttcacggaaaacatggagcgcaattgcagagccccctgtaacatacagatggaggaccctacctttaaggaaaattatcggttccacgcaatcaacggatacattatggatacactccctggccttgtgatggctcaggaccaacgaatcaggtggtacctcctcagcatgggttctaatgagaacatacactccattcacttttcaggacatgtgttcactgtccggaagaaagaagagtataagatggccctctacaatttgtatccaggcgtgtttgagaccgttgaaatgcttccctctaaagctggcatctggagagtagagtgcttgatcggagaacatcttcacgcaggtatgagcaccttgttcctcgtgtacagcaacaaatgtcagaatccacttggcatggccagtggacacattcgcgactttcagatcacagcatctggccagtatggacaatgggccccaaagttggctcgcctccattactccggtagcataaatgcgtggtccactaaagaacctttcagctggattaaggtcgatcttcttgcccccatgatcatccacggcattaagacacagggagcgaggcagaaattctcctccctctacatctcacagttcattattatgtatagtttggacggcaagaagtggcaaacttatagaggtaacagtactggaacagacatggtgttcttcggcaacgttgatagctctggcatcaaacacaacatctttaatcctcccataatagctcggtacatcagattgcatccgacccactacagcattaggagtacactccgaatggagcttatgggttgcgacttgaattcctgttcaatgccactcggaatggagtctaaagccatctctgatgcacagataaccgccagtagctactttacgaacatgtttgctacgtggtcaccctctaaggcaaggcttcatttgcaaggccggtctaatgcctggagacctcaggtgaacaacccgaaagaatggctccaggtggactttcagaagaccatgaaagtaacaggtgtcactactcagggagttaagtccttggatactagcatgtatgtgaaggagttccttatttcctcatcacaagatggccaccagtggaccctcttctttcagaatggtaaggtcaaagtgtttcagggcaatcaagacagcttcacacccgtggtgaacagtcttgatcctccactcttgacacgataccttcgaatccatccacagtcttgggagcaccagattgcattgcgcatggaagtacttggatgcgaggctcaggacctctac

SEQ ID NO: 1902 - protein, 1457 aa, synthetic construct
  REGION 1..1457: note = Variant of human B-domain deleted Factor VIII
MQIELSTCFFLCLLRFCFSATRRYYLGAVELSWDYMQSDLGELPVDARFPPRVPKSFPFNTSQVYKKTLFVEFTDHLFNIAKPRPPWMGLLGPTIQAEVYDTVVITLKNMASHPVSLHAVGVSYWKASEGAEYDDQTSQREKEDDKVFPGGSHTYVWQVLKENGPMASDPPCLTYSYLSHVDLVKDLNSGLIGALLVCREGSLAKEKTQTLAKFILLFAVFDEGKSWHSETKNSLMQDRDAASARAWPKMHTVNGYVNRTLPGLIGCHRKSVYWHVIGMGTTPEVHSIFLEGHTFLVRNHRQASLGISPITFLTAQTLLRDLGQFLLFCHIPSHQHDGMEAYVKVDSCPEEPQLRMKNNEEAEDYDDDLTDSEMDVVRFDDDNSPSIIQARSGAKKHPKTWVHYIAAEEEDWDYAPLVLAPDDRSYKSQYLNNGPQRIGRKYKKVRFMAYTDETFKTREAIQHESGILGPLLYGEVGDTLLIIFKNQASRPYNIYPHGITDVRPLYSRRLPKGVKHLKDFPILPGEIFKYKWTITVEDGPTKSDPRCLTRYYSSFVNWERDLASGLIGPLLICYKESVDQRGNQIMSDKRNVILFSVFDENRSWYLTENIQRFLPNPAGVQLEDPEFQASNIMHSINGYVFDSLQLSVCLHEVAYWYILSIGAQTDFLSVFFSGYTFKHLGVYEDTLTLFPFSGETVFMSMENPGLWILGCHNSDFRNRGMTALLKVSSCDWNTGDYYEDSYEDISAYFDSKNNAIEPRSFSQNPPVLKRHQREGTRTTLQSDQEEIDYDDTISVEMKKEDFDIYDEDENQSPRSFQKKTRHYFIAAVERLWDYGMSSSPHVLRNRAQSGSVPQFKKVVFQEFTDGSFTQPLYRGELNEHLGLLGPYIRAEVEDNIMVTFRNQASRPYSFYSSLISYEEDQRQGAEPRKNFVKPNETKTYFWKVQHHMAPTKDEFDCKAWAYFSDVDLEKDVHSGLIGPLLVCHTNTLNPAHGRQVTVQEFALFFTIFDETKSWYFTENMERNCRAPCNIQMEDPTFKENYRFHAINGYIMDTLPGLVMAQDQRIRWYLLSMGSNENIHSIHFSGHVFTVRKKEEYKMALYNLYPGVFETVEMLPSKAGIWRVECLIGEHLHAGMSTLFLVYSNKCQNPLGMASGHIRDFQITASGQYGQWAPKLARLHYSGSINAWSTKEPFSWIKVDLLAPMIIHGIKTQGARQKFSSLYISQFIIMYSLDGKKWQTYRGNSTGTDMVFFGNVDSSGIKHNIFNPPIIARYIRLHPTHYSIRSTLRMELMGCDLNSCSMPLGMESKAISDAQITASSYFTNMFATWSPSKARLHLQGRSNAWRPQVNNPKEWLQVDFQKTMKVTGVTTQGVKSLDTSMYVKEFLISSSQDGHQWTLFFQNGKVKVFQGNQDSFTPVVNSLDPPLLTRYLRIHPQSWEHQIALRMEVLGCEAQDLY

SEQ ID NO: 1903 - DNA, 4371 bp, synthetic construct
  misc_feature 1..4371: note = Variant of human B-domain deleted Factor VIII
  source 1..4371: mol_type = other DNA
atgcagattgaactgtctacctgcttcttcctctgtttgctgaggttctgctttagcgccactagacggtactaccttggcgctgtggagctgtcctgggactatatgcagagtgatttgggagagcttcccgtcgacgcacgatttcctcctcgcgttccaaagtcatttccctttaacacaagccaggtgtacaagaagacgctcttcgtcgaattcaccgatcacctgttcaatatcgccaaacccagaccaccatggatgggtcttttggggcctaccatacaagcggaggtgtatgacacagttgttatcactctcaagaacatggcttctcatccggtaagtcttcacgcagtgggcgtgtcctactggaaagcttcagaaggagccgagtatgatgatcagacatcccagagggagaaagaagacgacaaggtatttccaggtgggtctcatacctatgtgtggcaagtgctcaaagagaatggccctatgcgtagcgatccgccgtgtttgacttacagctacctttcacacgttgacctcgtcaaggacctcaactccgggttgattggagccttgttggtatgcagggaaggatctcttgccaaagagaagacacagaccctggccaagtttatccttctctttgctgtgttcgatgagggcaaaagttggcatagcgaaacgaagaattccctcatgcaggatcgcgacgcagccagcgccagagcttggcccaagatgcacactgtgaacggatatgtcaataggacgcttcctggcttgattgggtgtcatcggaaaagtgtctactggcacgtgatcggaatggggacaacaccagaggtccactccatatttctcgaaggccataccttccttgttcgaaaccacagacaggcatccttggggatctctcccattacctttctcactgcccaaacgctccttcgtgacttgggtcagttccttctcttttgccatatcccgtcacaccagcatgatggtatggaagcttatgtgaaagtcgacagttgtcctgaggagccacagttgcgcatgaagaataatgaagaagccgaggattacgacgacgatctcaccgattctgagatggacgtggtgaggtttgatgacgacaactctccctccatcattcaagctcggagcggggcgaagaaacaccccaagacttgggtccactatatagcggcggaagaggaggattgggattacgctcctcttgtattggcaccagatgaccgctcatacaaaagccagtacctcaacaacggaccgcagagaattggccggaagtataagaaagtgcgatttatggcctatacagacgaaacctttaagacaagggaggccatccagcatgagagtgggattttgggacctcttctttacggcgaagttggtgataccctcctcatcatcttcaagaatcaagcttctcgcccctataacatttacccacacgggatcactgacgttaggcctttgtatagcagaagacttcccaaaggcgtgaagcatctcaaagacttccccattttgccaggcgagatctttaagtacaaatggaccattacagtggaagatggaccgactaaatcagaccctcgatgccttacgcggtactattcctccttcgtgaattgggagagagatttggcaagcggactcataggaccactcctcatctgttacaaggaatctgtagaccagaggggtaaccagattatgagtgataaacgcaatgtgatcctttttagcgtcttcgacgagaaccggtcctggtacttgaccgagaatatacaaaggttccttcccaaccccgcaggcgttcagttggaagaccctgagtttcaggccagcaatattatgcactcaatcaacggctatgtgtttgatagtctccagctttctgtttgcctccatgaagtagcctattggtacatcttgtcaattggtgctcaaacagacttcctctccgtcttcttctccggctacacctttaagcacaagggcgtgtatgaggacactctcacactctttccattttctggagaaaccgtgttcatgagcatggagaatccaggcctttggatcttgggttgccacaacagtgattttcgcaatcggggaatgactgctctcctcaaagtcagcagctgtgattggaacacaggcgactattacgaagattcttacgaggacataagtgcctactttgactccaagaataacgccattgagcccagatcattctcccagaatcctcccgtgcttaaaaggcatcagcgcgaaggtaccagaactactcttcagtctgatcaagaggagattgactatgacgacaccattagcgtggaaatgaagaaggaggatttcgatatctatgacgaagatgagaaccagtctccgcggagctttcagaagaagacgcgacactacttcattgcagcagtcgaaaggctttgggactacggtatgtcatcatcccctcatgtgttgcgcaatagagctcagagtggaagtgttccacagttcaagaaagtcgtctttcaagagtttacagatggcagcttcacacagcctctctatcggggcgagcttaacgaacatttgggactccttggtccctatatccgagccgaagtggaggacaacattatggttacctttaggaatcaagcctctcgcccctacagcttctactcctccctcatcagttatgaggaggatcagagacaaggcgctgaaccacggaagaactttgtgaaaccgaatgagacgaagacctacttctggaaagtacagcaccacatggcccccacaaaagacgaattcgattgcaaagcatgggcgtatttttcagacgttgacttggagaaagatgtacattcaggacttattggtcctttgttggtgtgtcacactaacactctcaatccagcccatggcaggcaggtgacagtccaggaattcgctcttttctttaccatctttgatgagaccaagtcctggtacttcacggaaaacatggagcgcaattgcagagccccctgtaacatacagatggaggaccctacctttaaggaaaattatcggttccacgcaatcaacggatacattatggatacactccctggccttgtgatggctcaggaccaacgaatcaggtggtacctcctcagcatgggttctaatgagaacatacactccattcacttttcaggacatgtgttcactgtccggaagaaagaagagtataagatggccctctacaatttgtatccaggcgtgtttgagaccgttgaaatgcttccctctaaagctggcatctggagagtagagtgcttgatcggagaacatcttcacgcaggtatgagcaccttgttcctcgtgtacagcaacaaatgtcagaatccacttggcatggccagtggacacattcgcgactttcagatcacagcatctggccagtatggacaatgggccccaaagttggctcgcctccattactccggtagcataaatgcgtggtccactaaagaacctttcagctggattaaggtcgatcttcttgcccccatgatcatccacggcattaagacacagggagcgaggcagaaattctcctccctctacatctcacagttcattattatgtatagtttggacggcaagaagtggcaaacttatagaggtaacagtactggaacagacatggtgttcttcggcaacgttgatagctctggcatcaaacacaacatctttaatcctcccataatagctcggtacatcagattgcatccgacccactacagcattaggagtacactccgaatggagcttatgggttgcgacttgaattcctgttcaatgccactcggaatggagtctaaagccatctctgatgcacagataaccgccagtagctactttacgaacatgtttgctacgtggtcaccctctaaggcaaggcttcatttgcaaggccggtctaatgcctggagacctcaggtgaacaacccgaaagaatggctccaggtggactttcagaagaccatgaaagtaacaggtgtcactactcagggagttaagtccttggatactagcatgtatgtgaaggagttccttatttcctcatcacaagatggccaccagtggaccctcttctttcagaatggtaaggtcaaagtgtttcagggcaatcaagacagcttcacacccgtggtgaacagtcttgatcctccactcttgacacgataccttcgaatccatccacagtcttgggagcaccagattgcattgcgcatggaagtacttggatgcgaggctcaggacctctac

SEQ ID NO: 1904 - protein, 1457 aa, synthetic construct
  REGION 1..1457: note = Variant of human B-domain deleted Factor VIII
MQIELSTCFFLCLLRFCFSATRRYYLGAVELSWDYMQSDLGELPVDARFPPRVPKSFPFNTSQVYKKTLFVEFTDHLFNIAKPRPPWMGLLGPTIQAEVYDTVVITLKNMASHPVSLHAVGVSYWKASEGAEYDDQTSQREKEDDKVFPGGSHTYVWQVLKENGPMRSDPPCLTYSYLSHVDLVKDLNSGLIGALLVCREGSLAKEKTQTLAKFILLFAVFDEGKSWHSETKNSLMQDRDAASARAWPKMHTVNGYVNRTLPGLIGCHRKSVYWHVIGMGTTPEVHSIFLEGHTFLVRNHRQASLGISPITFLTAQTLLRDLGQFLLFCHIPSHQHDGMEAYVKVDSCPEEPQLRMKNNEEAEDYDDDLTDSEMDVVRFDDDNSPSIIQARSGAKKHPKTWVHYIAAEEEDWDYAPLVLAPDDRSYKSQYLNNGPQRIGRKYKKVRFMAYTDETFKTREAIQHESGILGPLLYGEVGDTLLIIFKNQASRPYNIYPHGITDVRPLYSRRLPKGVKHLKDFPILPGEIFKYKWTITVEDGPTKSDPRCLTRYYSSFVNWERDLASGLIGPLLICYKESVDQRGNQIMSDKRNVILFSVFDENRSWYLTENIQRFLPNPAGVQLEDPEFQASNIMHSINGYVFDSLQLSVCLHEVAYWYILSIGAQTDFLSVFFSGYTFKHKGVYEDTLTLFPFSGETVFMSMENPGLWILGCHNSDFRNRGMTALLKVSSCDWNTGDYYEDSYEDISAYFDSKNNAIEPRSFSQNPPVLKRHQREGTRTTLQSDQEEIDYDDTISVEMKKEDFDIYDEDENQSPRSFQKKTRHYFIAAVERLWDYGMSSSPHVLRNRAQSGSVPQFKKVVFQEFTDGSFTQPLYRGELNEHLGLLGPYIRAEVEDNIMVTFRNQASRPYSFYSSLISYEEDQRQGAEPRKNFVKPNETKTYFWKVQHHMAPTKDEFDCKAWAYFSDVDLEKDVHSGLIGPLLVCHTNTLNPAHGRQVTVQEFALFFTIFDETKSWYFTENMERNCRAPCNIQMEDPTFKENYRFHAINGYIMDTLPGLVMAQDQRIRWYLLSMGSNENIHSIHFSGHVFTVRKKEEYKMALYNLYPGVFETVEMLPSKAGIWRVECLIGEHLHAGMSTLFLVYSNKCQNPLGMASGHIRDFQITASGQYGQWAPKLARLHYSGSINAWSTKEPFSWIKVDLLAPMIIHGIKTQGARQKFSSLYISQFIIMYSLDGKKWQTYRGNSTGTDMVFFGNVDSSGIKHNIFNPPIIARYIRLHPTHYSIRSTLRMELMGCDLNSCSMPLGMESKAISDAQITASSYFTNMFATWSPSKARLHLQGRSNAWRPQVNNPKEWLQVDFQKTMKVTGVTTQGVKSLDTSMYVKEFLISSSQDGHQWTLFFQNGKVKVFQGNQDSFTPVVNSLDPPLLTRYLRIHPQSWEHQIALRMEVLGCEAQDLY

SEQ ID NO: 1905 - DNA, 4371 bp, synthetic construct
  misc_feature 1..4371: note = Variant of human B-domain deleted Factor VIII
  source 1..4371: mol_type = other DNA
atgcagattgaactgtctacctgcttcttcctctgtttgctgaggttctgctttagcgccactagacggtactaccttggcgctgtggagctgtcctgggactatatgcagagtgatttgggagagcttcccgtcgacgcacgatttcctcctcgcgttccaaagtcatttccctttaacacaagccaggtgtacaagaagacgctcttcgtcgaattcaccgatcacctgttcaatatcgccaaacccagaccaccatggatgggtcttttggggcctaccatacaagcggaggtgtatgacacagttgttatcactctcaagaacatggcttctcatccggtaagtcttcacgcagtgggcgtgtcctactggaaagcttcagaaggagccgagtatgatgatcagacatcccagagggagaaagaagacgacaaggtatttccaggtgggtctcatacctatgtgtggcaagtgctcaaagagaatggccctatggcaagcgatccgccgtgtttgacttacagctacctttcacacgttgacctcgtcaaggacctcaactccgggttgattggagccttgttggtatgcagggaaggatctcttgccaaagagaagacacagaccctggccaagtttatccttctctttgctgtgttcgatgagggcaaaagttggcatagcgaaacgaagaattccctcatgcaggatcgcgacgcagccagcgccagagcttggcccaagatgcacactgtgaacggatatgtcaataggacgcttcctggcttgattgggtgtcatcggaaaagtgtctactggcacgtgatcggaatggggacaacaccagaggtccactccatatttctcgaaggccataccttccttgttcgaaaccacagacaggcatccttggggatctctcccattacctttctcactgcccaaacgctccttcgtgacttgggtcagttccttctcttttgccatatcccgtcacaccagcatgatggtatggaagcttatgtgaaagtcgacagttgtcctgaggagccacagttgcgcatgaagaataatgaagaagccgaggattacgacgacgatctcaccgattctgagatggacgtggtgaggtttgatgacgacaactctccctccatcattcaagctcggagcggggcgaagaaacaccccaagacttgggtccactatatagcggcggaagaggaggattgggattacgctcctcttgtattggcaccagatgaccgctcatacaaaagccagtacctcaacaacggaccgcagagaattggccggaagtataagaaagtgcgatttatggcctatacagacgaaacctttaagacaagggaggccatccagcatgagagtgggattttgggacctcttctttacggcgaagttggtgataccctcctcatcatcttcaagaatcaagcttctcgcccctataacatttacccacacgggatcactgacgttaggcctttgtatagcagaagacttcccaaaggcgtgaagcatctcaaagacttccccattttgccaggcgagatctttaagtacaaatggaccattacagtggaagatggaccgactaaatcagaccctcgatgccttacgcggtactattcctccttcgtgaattgggagagagatttggcaagcggactcataggaccactcctcatctgttacaaggaatctgtagaccagaggggtaaccagattatgagtgataaacgcaatgtgatcctttttagcgtcttcgacgagaaccggtcctggtacttgaccgagaatatacaaaggttccttcccaaccccgcaggcgttcagttggaagaccctgagtttcaggccagcaatattatgcactcaatcaacggctatgtgtttgatagtctccagctttctgtttgcctccatgaagtagcctattggtacatcttgtcaattggtgctcaaacagacttcctctccgtcttcttctccggctacacctttaagcacaagggcgtgtatgaggacactctcacactctttccattttctggagaaaccgtgttcatgagcatggagaatccaggcctttggatcttgggttgccacaacagtgattttcgcaatcggggaatgactgctctcctcaaagtcagcagctgtgattggaacacaggcgactattacgaagattcttacgaggacataagtgcctactttgactccgagaataacgccattgagcccagatcattctcccagaatcctcccgtgcttaaaaggcatcagcgcgaaggtaccagaactactcttcagtctgatcaagaggagattgactatgacgacaccattagcgtggaaatgaagaaggaggatttcgatatctatgacgaagatgagaaccagtctccgcggagctttcagaagaagacgcgacactacttcattgcagcagtcgaaaggctttgggactacggtatgtcatcatcccctcatgtgttgcgcaatagagctcagagtggaagtgttccacagttcaagaaagtcgtctttcaagagtttacagatggcagcttcacacagcctctctatcggggcgagcttaacgaacatttgggactccttggtccctatatccgagccgaagtggaggacaacattatggttacctttaggaatcaagcctctcgcccctacagcttctactcctccctcatcagttatgaggaggatcagagacaaggcgctgaaccacggaagaactttgtgaaaccgaatgagacgaagacctacttctggaaagtacagcaccacatggcccccacaaaagacgaattcgattgcaaagcatgggcgtatttttcagacgttgacttggagaaagatgtacattcaggacttattggtcctttgttggtgtgtcacactaacactctcaatccagcccatggcaggcaggtgacagtccaggaattcgctcttttctttaccatctttgatgagaccaagtcctggtacttcacggaaaacatggagcgcaattgcagagccccctgtaacatacagatggaggaccctacctttaaggaaaattatcggttccacgcaatcaacggatacattatggatacactccctggccttgtgatggctcaggaccaacgaatcaggtggtacctcctcagcatgggttctaatgagaacatacactccattcacttttcaggacatgtgttcactgtccggaagaaagaagagtataagatggccctctacaatttgtatccaggcgtgtttgagaccgttgaaatgcttccctctaaagctggcatctggagagtagagtgcttgatcggagaacatcttcacgcaggtatgagcaccttgttcctcgtgtacagcaacaaatgtcagaatccacttggcatggccagtggacacattcgcgactttcagatcacagcatctggccagtatggacaatgggccccaaagttggctcgcctccattactccggtagcataaatgcgtggtccactaaagaacctttcagctggattaaggtcgatcttcttgcccccatgatcatccacggcattaagacacagggagcgaggcagaaattctcctccctctacatctcacagttcattattatgtatagtttggacggcaagaagtggcaaacttatagaggtaacagtactggaacagacatggtgttcttcggcaacgttgatagctctggcatcaaacacaacatctttaatcctcccataatagctcggtacatcagattgcatccgacccactacagcattaggagtacactccgaatggagcttatgggttgcgacttgaattcctgttcaatgccactcggaatggagtctaaagccatctctgatgcacagataaccgccagtagctactttacgaacatgtttgctacgtggtcaccctctaaggcaaggcttcatttgcaaggccggtctaatgcctggagacctcaggtgaacaacccgaaagaatggctccaggtggactttcagaagaccatgaaagtaacaggtgtcactactcagggagttaagtccttggatactagcatgtatgtgaaggagttccttatttcctcatcacaagatggccaccagtggaccctcttctttcagaatggtaaggtcaaagtgtttcagggcaatcaagacagcttcacacccgtggtgaacagtcttgatcctccactcttgacacgataccttcgaatccatccacagtcttgggagcaccagattgcattgcgcatggaagtacttggatgcgaggctcaggacctctac

SEQ ID NO: 1906 - protein, 1457 aa, synthetic construct
  REGION 1..1457: note = Variant of human B-domain deleted Factor VIII
MQIELSTCFFLCLLRFCFSATRRYYLGAVELSWDYMQSDLGELPVDARFPPRVPKSFPFNTSQVYKKTLFVEFTDHLFNIAKPRPPWMGLLGPTIQAEVYDTVVITLKNMASHPVSLHAVGVSYWKASEGAEYDDQTSQREKEDDKVFPGGSHTYVWQVLKENGPMASDPPCLTYSYLSHVDLVKDLNSGLIGALLVCREGSLAKEKTQTLAKFILLFAVFDEGKSWHSETKNSLMQDRDAASARAWPKMHTVNGYVNRTLPGLIGCHRKSVYWHVIGMGTTPEVHSIFLEGHTFLVRNHRQASLGISPITFLTAQTLLRDLGQFLLFCHIPSHQHDGMEAYVKVDSCPEEPQLRMKNNEEAEDYDDDLTDSEMDVVRFDDDNSPSIIQARSGAKKHPKTWVHYIAAEEEDWDYAPLVLAPDDRSYKSQYLNNGPQRIGRKYKKVRFMAYTDETFKTREAIQHESGILGPLLYGEVGDTLLIIFKNQASRPYNIYPHGITDVRPLYSRRLPKGVKHLKDFPILPGEIFKYKWTITVEDGPTKSDPRCLTRYYSSFVNWERDLASGLIGPLLICYKESVDQRGNQIMSDKRNVILFSVFDENRSWYLTENIQRFLPNPAGVQLEDPEFQASNIMHSINGYVFDSLQLSVCLHEVAYWYILSIGAQTDFLSVFFSGYTFKHKGVYEDTLTLFPFSGETVFMSMENPGLWILGCHNSDFRNRGMTALLKVSSCDWNTGDYYEDSYEDISAYFDSENNAIEPRSFSQNPPVLKRHQREGTRTTLQSDQEEIDYDDTISVEMKKEDFDIYDEDENQSPRSFQKKTRHYFIAAVERLWDYGMSSSPHVLRNRAQSGSVPQFKKVVFQEFTDGSFTQPLYRGELNEHLGLLGPYIRAEVEDNIMVTFRNQASRPYSFYSSLISYEEDQRQGAEPRKNFVKPNETKTYFWKVQHHMAPTKDEFDCKAWAYFSDVDLEKDVHSGLIGPLLVCHTNTLNPAHGRQVTVQEFALFFTIFDETKSWYFTENMERNCRAPCNIQMEDPTFKENYRFHAINGYIMDTLPGLVMAQDQRIRWYLLSMGSNENIHSIHFSGHVFTVRKKEEYKMALYNLYPGVFETVEMLPSKAGIWRVECLIGEHLHAGMSTLFLVYSNKCQNPLGMASGHIRDFQITASGQYGQWAPKLARLHYSGSINAWSTKEPFSWIKVDLLAPMIIHGIKTQGARQKFSSLYISQFIIMYSLDGKKWQTYRGNSTGTDMVFFGNVDSSGIKHNIFNPPIIARYIRLHPTHYSIRSTLRMELMGCDLNSCSMPLGMESKAISDAQITASSYFTNMFATWSPSKARLHLQGRSNAWRPQVNNPKEWLQVDFQKTMKVTGVTTQGVKSLDTSMYVKEFLISSSQDGHQWTLFFQNGKVKVFQGNQDSFTPVVNSLDPPLLTRYLRIHPQSWEHQIALRMEVLGCEAQDLY

SEQ ID NO: 1907 - DNA, 4371 bp, synthetic construct
  misc_feature 1..4371: note = Variant of human B-domain deleted Factor VIII
  source 1..4371: mol_type = other DNA
atgcagattgaactgtctacctgcttcttcctctgtttgctgaggttctgctttagcgccactagacggtactaccttggcgctgtggagctgtcctgggactatatgcagagtgatttgggagagcttcccgtcgacgcacgatttcctcctcgcgttccaaagtcatttccctttaacacaagccaggtgtacaagaagacgctcttcgtcgaattcaccgatcacctgttcaatatcgccaaacccagaccaccatggatgggtcttttggggcctaccatacaagcggaggtgtatgacacagttgttatcactctcaagaacatggcttctcatccggtaagtcttcacgcagtgggcgtgtcctactggaaagcttcagaaggagccgagtatgatgatcagacatcccagagggagaaagaagacgacaaggtatttccaggtgggtctcatacctatgtgtggcaagtgctcaaagagaatggccctatggcaagcgatccgccgtgtttgacttacagctacctttcacacgttgacctcgtcaaggacctcaactccgggttgattggagccttgttggtatgcagggaaggatctcttgccaaagagaagacacagaccctggccaagtttatccttctctttgctgtgttcgatgagggcaaaagttggcatagcgaaacgaagaattccctcatgcaggatcgcgacgcagccagcgccagagcttggcccaagatgcacactgtgaacggatatgtcaataggacgcttcctggcttgattgggtgtcatcggaaaagtgtctactggcacgtgatcggaatggggacaacaccagaggtccactccatatttctcgaaggccataccttccttgttcgaaaccacagacaggcatccttggggatctctcccattacctttctcactgcccaaacgctccttcgtgacttgggtcagttccttctcttttgccatatcccgtcacaccagcatgatggtatggaagcttatgtgaaagtcgacagttgtcctgaggagccacagttgcgcatgaagaataatgaagaagccgaggattacgacgacgatctcaccgattctgagatggacgtggtgaggtttgatgacgacaactctccctccatcattcaagctcggagcggggcgaagaaacaccccaagacttgggtccactatatagcggcggaagaggaggattgggattacgctcctcttgtattggcaccagatgaccgctcatacaaaagccagtacctcaacaacggaccgcagagaattggccggaagtataagaaagtgcgatttatggcctatacagacgaaacctttaagacaagggaggccatccagcatgagagtgggattttgggacctcttctttacggcgaagttggtgataccctcctcatcatcttcaagaatcaagcttctcgcccctataacatttacccacacgggatcactgacgttaggcctttgtatagcagaagacttcccaaaggcgtgaagcatctcaaagacttccccattttgccaggcgagatctttaagtacaaatggaccattacagtggaagatggaccgactaaatcagaccctcgatgccttacgcggtactattcctccttcgtgaattgggagagagatttggcaagcggactcataggaccactcctcatctgttacaaggaatctgtagaccagaggggtaaccagattatgagtgataaacgcaatgtgatcctttttagcgtcttcgacgagaaccggtcctggtacttgaccgagaatatacaaaggttccttcccaaccccgcaggcgttcagttggaagaccctgagtttcaggccagcaatattatgcactcaatcaacggctatgtgtttgatagtctccagctttctgtttgcctccatgaagtagcctattggtacatcttgtcaattggtgctcaaacagacttcctctccgtcttcttctccggctacacctttaagcacaagggcgtgtatgaggacactctcacactctttccattttctggagaaaccgtgttcatgagcatggagaatccaggcctttggatcttgggttgccacaacagtgattttcgcaatcggggaatgactgctctcctcaaagtcagcagctgtgattggaacacaggcgactattacgaagattcttacgaggacataagtgcctactttgactccaagaataacgccattgagcccagatcattctcccagaatcctcccgtgcttaaaaggcatcagcgcgaaggtaccagaactactcttcagtctgatcaagaggagattgactatgacgacaccattagcgtggaaatgaagaaggaggatttcgatatctatgacgaagatgagaaccagtctccgcggagctttcagaagaagacgcgacactacttcattgcagcagtcgaaaggctttgggactacggtatgtcatcatcccctcatgtgttgcgcaatagagctcagagtggaagtgttccacagttcaagaaagtcgtctttcaagagtttacagatggcagcttcacacagcctctctatcggggcgagcttaacgaacatttgggactccttggtccctatatccgagccgaagtggaggacaacattatggttacctttaggaatcaagcctctcgcccctacagcttctactcctccctcatcagttatgaggaggatcagagacaaggcgctgaaccacggaagaactttgtgaaaccgaatgagacgaagacctacttctggaaagtacagcaccacatggcccccacaaaagacgaattcgattgcaaagcatgggcgtatttttcagacgttgacttggagaaagatgtacattcaggacttattggtcctttgttggtgtgtcacactaacactctcaatccagcccatggcaggcaggtgacagtccaggaattcgctcttttctttaccatctttgatgagaccaagtcctggtacttcacggaaaacatggagcgcaattgcagagccccctgtaacatacagatggaggaccctacctttaaggaaaattatcggttccacgcaatcaacggatacattatggatacactccctggccttgtgatggctcaggaccaacgaatcaggtggtacctcctcagcatgggttctaatgagaacatacactccattcacttttcaggacatgtgttcactgtccggaagaatgaagagtataagatggccctctacaatttgtatccaggcgtgtttgagaccgttgaaatgcttccctctaaagctggcatctggagagtagagtgcttgatcggagaacatcttcacgcaggtatgagcaccttgttcctcgtgtacagcaacaaatgtcagaatccacttggcatggccagtggacacattcgcgactttcagatcacagcatctggccagtatggacaatgggccccaaagttggctcgcctccattactccggtagcataaatgcgtggtccactaaagaacctttcagctggattaaggtcgatcttcttgcccccatgatcatccacggcattaagacacagggagcgaggcagaaattctcctccctctacatctcacagttcattattatgtatagtttggacggcaagaagtggcaaacttatagaggtaacagtactggaacagacatggtgttcttcggcaacgttgatagctctggcatcaaacacaacatctttaatcctcccataatagctcggtacatcagattgcatccgacccactacagcattaggagtacactccgaatggagcttatgggttgcgacttgaattcctgttcaatgccactcggaatggagtctaaagccatctctgatgcacagataaccgccagtagctactttacgaacatgtttgctacgtggtcaccctctaaggcaaggcttcatttgcaaggccggtctaatgcctggagacctcaggtgaacaacccgaaagaatggctccaggtggactttcagaagaccatgaaagtaacaggtgtcactactcagggagttaagtccttggatactagcatgtatgtgaaggagttccttatttcctcatcacaagatggccaccagtggaccctcttctttcagaatggtaaggtcaaagtgtttcagggcaatcaagacagcttcacacccgtggtgaacagtcttgatcctccactcttgacacgataccttcgaatccatccacagtcttgggagcaccagattgcattgcgcatggaagtacttggatgcgaggctcaggacctctac

SEQ ID NO: 1908 - protein, 1457 aa, synthetic construct
  REGION 1..1457: note = Variant of human B-domain deleted Factor VIII
MQIELSTCFFLCLLRFCFSATRRYYLGAVELSWDYMQSDLGELPVDARFPPRVPKSFPFNTSQVYKKTLFVEFTDHLFNIAKPRPPWMGLLGPTIQAEVYDTVVITLKNMASHPVSLHAVGVSYWKASEGAEYDDQTSQREKEDDKVFPGGSHTYVWQVLKENGPMASDPPCLTYSYLSHVDLVKDLNSGLIGALLVCREGSLAKEKTQTLAKFILLFAVFDEGKSWHSETKNSLMQDRDAASARAWPKMHTVNGYVNRTLPGLIGCHRKSVYWHVIGMGTTPEVHSIFLEGHTFLVRNHRQASLGISPITFLTAQTLLRDLGQFLLFCHIPSHQHDGMEAYVKVDSCPEEPQLRMKNNEEAEDYDDDLTDSEMDVVRFDDDNSPSIIQARSGAKKHPKTWVHYIAAEEEDWDYAPLVLAPDDRSYKSQYLNNGPQRIGRKYKKVRFMAYTDETFKTREAIQHESGILGPLLYGEVGDTLLIIFKNQASRPYNIYPHGITDVRPLYSRRLPKGVKHLKDFPILPGEIFKYKWTITVEDGPTKSDPRCLTRYYSSFVNWERDLASGLIGPLLICYKESVDQRGNQIMSDKRNVILFSVFDENRSWYLTENIQRFLPNPAGVQLEDPEFQASNIMHSINGYVFDSLQLSVCLHEVAYWYILSIGAQTDFLSVFFSGYTFKHKGVYEDTLTLFPFSGETVFMSMENPGLWILGCHNSDFRNRGMTALLKVSSCDWNTGDYYEDSYEDISAYFDSKNNAIEPRSFSQNPPVLKRHQREGTRTTLQSDQEEIDYDDTISVEMKKEDFDIYDEDENQSPRSFQKKTRHYFIAAVERLWDYGMSSSPHVLRNRAQSGSVPQFKKVVFQEFTDGSFTQPLYRGELNEHLGLLGPYIRAEVEDNIMVTFRNQASRPYSFYSSLISYEEDQRQGAEPRKNFVKPNETKTYFWKVQHHMAPTKDEFDCKAWAYFSDVDLEKDVHSGLIGPLLVCHTNTLNPAHGRQVTVQEFALFFTIFDETKSWYFTENMERNCRAPCNIQMEDPTFKENYRFHAINGYIMDTLPGLVMAQDQRIRWYLLSMGSNENIHSIHFSGHVFTVRKNEEYKMALYNLYPGVFETVEMLPSKAGIWRVECLIGEHLHAGMSTLFLVYSNKCQNPLGMASGHIRDFQITASGQYGQWAPKLARLHYSGSINAWSTKEPFSWIKVDLLAPMIIHGIKTQGARQKFSSLYISQFIIMYSLDGKKWQTYRGNSTGTDMVFFGNVDSSGIKHNIFNPPIIARYIRLHPTHYSIRSTLRMELMGCDLNSCSMPLGMESKAISDAQITASSYFTNMFATWSPSKARLHLQGRSNAWRPQVNNPKEWLQVDFQKTMKVTGVTTQGVKSLDTSMYVKEFLISSSQDGHQWTLFFQNGKVKVFQGNQDSFTPVVNSLDPPLLTRYLRIHPQSWEHQIALRMEVLGCEAQDLY

SEQ ID NO: 1909 - DNA, 4371 bp, synthetic construct
  misc_feature 1..4371: note = Variant of human B-domain deleted Factor VIII
  source 1..4371: mol_type = other DNA
atgcagattgaactgtctacctgcttcttcctctgtttgctgaggttctgctttagcgccactagacggtactaccttggcgctgtggagctgtcctgggactatatgcagagtgatttgggagagcttcccgtcgacgcacgatttcctcctcgcgttccaaagtcatttccctttaacacaagccaggtgtacaagaagacgctcttcgtcgaattcaccgatcacctgttcaatatcgccaaacccagaccaccatggatgggtcttttggggcctaccatacaagcggaggtgtatgacacagttgttatcactctcaagaacatggcttctcatccggtaagtcttcacggggtgggcgtgtcctactggaaagcttcagaaggagccgagtatgatgatcagacatcccagagggagaaagaagacgacaaggtatttccaggtgggtctcatacctatgtgtggcaagtgctcaaagagaatggccctatggcaagcgatccgccgtgtttgacttacagctacctttcacacgttgacctcgtcaaggacctcaactccgggttgattggagccttgttggtatgcagggaaggatctcttgccaaagagaagacacagaccctggccaagtttatccttctctttgctgtgttcgatgagggcaaaagttggcatagcgaaacgaagaattccctcatgcaggatcgcgacgcagccagcgccagagcttggcccaagatgcacactgtgaacggatatgtcaataggacgcttcctggcttgattgggtgtcatcggaaaagtgtctactggcacgtgatcggaatggggacaacaccagaggtccactccatatttctcgaaggccataccttccttgttcgaaaccacagacaggcatccttggggatctctcccattacctttctcactgcccaaacgctccttcgtgacttgggtcagttccttctcttttgccatatcccgtcacaccagcatgatggtatggaagcttatgtgaaagtcgacagttgtcctgaggagccacagttgcgcatgaagaataatgaagaagccgaggattacgacgacgatctcaccgattctgagatggacgtggtgaggtttgatgacgacaactctccctccatcattcaagctcggagcggggcgaagaaacaccccaagacttgggtccactatatagcggcggaagaggaggattgggattacgctcctcttgtattggcaccagatgaccgctcatacaaaagccagtacctcaacaacggaccgcagagaattggccggaagtataagaaagtgcgatttatggcctatacagacgaaacctttaagacaagggaggccatccagcatgagagtgggattttgggacctcttctttacggcgaagttggtgataccctcctcatcatcttcaagaatcaagcttctcgcccctataacatttacccacacgggatcactgacgttaggcctttgtatagcagaagacttcccaaaggcgtgaagcatctcaaagacttccccattttgccaggcgagatctttaagtacaaatggaccattacagtggaagatggaccgactaaatcagaccctcgatgccttacgcggtactattcctccttcgtgaattgggagagagatttggcaagcggactcataggaccactcctcatctgttacaaggaatctgtagaccagaggggtaaccagattatgagtgataaacgcaatgtgatcctttttagcgtcttcgacgagaaccggtcctggtacttgaccgagaatatacaaaggttccttcccaaccccgcaggcgttcagttggaagaccctgagtttcaggccagcaatattatgcactcaatcaacggctatgtgtttgatagtctccagctttctgtttgcctccatgaagtagcctattggtacatcttgtcaattggtgctcaaacagacttcctctccgtcttcttctccggctacacctttaagcacaagggcgtgtatgaggacactctcacactctttccattttctggagaaaccgtgttcatgagcatggagaatccaggcctttggatcttgggttgccacaacagtgattttcgcaatcggggaatgactgctctcctcaaagtcagcagctgtgattggaacacaggcgactattacgaagattcttacgaggacataagtgcctactttgactccaagaataacgccattgagcccagatcattctcccagaatcctcccgtgcttaaaaggcatcagcgcgaaggtaccagaactactcttcagtctgatcaagaggagattgactatgacgacaccattagcgtggaaatgaagaaggaggatttcgatatctatgacgaagatgagaaccagtctccgcggagctttcagaagaagacgcgacactacttcattgcagcagtcgaaaggctttgggactacggtatgtcatcatcccctcatgtgttgcgcaatagagctcagagtggaagtgttccacagttcaagaaagtcgtctttcaagagtttacagatggcagcttcacacagcctctctatcggggcgagcttaacgaacatttgggactccttggtccctatatccgagccgaagtggaggacaacattatggttacctttaggaatcaagcctctcgcccctacagcttctactcctccctcatcagttatgaggaggatcagagacaaggcgctgaaccacggaagaactttgtgaaaccgaatgagacgaagacctacttctggaaagtacagcaccacatggcccccacaaaagacgaattcgattgcaaagcatgggcgtatttttcagacgttgacttggagaaagatgtacattcaggacttattggtcctttgttggtgtgtcacactaacactctcaatccagcccatggcaggcaggtgacagtccaggaattcgctcttttctttaccatctttgatgagaccaagtcctggtacttcacggaaaacatggagcgcaattgcagagccccctgtaacatacagatggaggaccctacctttaaggaaaattatcggttccacgcaatcaacggatacattatggatacactccctggccttgtgatggctcaggaccaacgaatcaggtggtacctcctcagcatgggttctaatgagaacatacactccattcacttttcaggacatgtgttcactgtccggaagaaagaagagtataagatggccctctacaatttgtatccaggcgtgtttgagaccgttgaaatgcttccctctaaagctggcatctggagagtagagtgcttgatcggagaacatcttcacgcaggtatgagcaccttgttcctcgtgtacagcaacaaatgtcagaatccacttggcatggccagtggacacattcgcgactttcagatcacagcatctggccagtatggacaatgggccccaaagttggctcgcctccattactccggtagcataaatgcgtggtccactaaagaacctttcagctggattaaggtcgatcttcttgcccccatgatcatccacggcattaagacacagggagcgaggcagaaattctcctccctctacatctcacagttcattattatgtatagtttggacggcaagaagtggcaaacttatagaggtaacagtactggaacagacatggtgttcttcggcaacgttgatagctctggcatcaaacacaacatctttaatcctcccataatagctcggtacatcagattgcatccgacccactacagcattaggagtacactccgaatggagcttatgggttgcgacttgaattcctgttcaatgccactcggaatggagtctaaagccatctctgatgcacagataaccgccagtagctactttacgaacatgtttgctacgtggtcaccctctaaggcaaggcttcatttgcaaggccggtctaatgcctggagacctcaggtgaacaacccgaaagaatggctccaggtggactttcagaagaccatgaaagtaacaggtgtcactactcagggagttaagtccttggatactagcatgtatgtgaaggagttccttatttcctcatcacaagatggccaccagtggaccctcttctttcagaatggtaaggtcaaagtgtttcagggcaatcaagacagcttcacacccgtggtgaacagtcttgatcctccactcttgacacgataccttcgaatccatccacagtcttgggagcaccagattgcattgcgcatggaagtacttggatgcgaggctcaggacctctac

SEQ ID NO: 1910 - protein, 1457 aa, synthetic construct
  REGION 1..1457: note = Variant of human B-domain deleted Factor VIII
MQIELSTCFFLCLLRFCFSATRRYYLGAVELSWDYMQSDLGELPVDARFPPRVPKSFPFNTSQVYKKTLFVEFTDHLFNIAKPRPPWMGLLGPTIQAEVYDTVVITLKNMASHPVSLHGVGVSYWKASEGAEYDDQTSQREKEDDKVFPGGSHTYVWQVLKENGPMASDPPCLTYSYLSHVDLVKDLNSGLIGALLVCREGSLAKEKTQTLAKFILLFAVFDEGKSWHSETKNSLMQDRDAASARAWPKMHTVNGYVNRTLPGLIGCHRKSVYWHVIGMGTTPEVHSIFLEGHTFLVRNHRQASLGISPITFLTAQTLLRDLGQFLLFCHIPSHQHDGMEAYVKVDSCPEEPQLRMKNNEEAEDYDDDLTDSEMDVVRFDDDNSPSIIQARSGAKKHPKTWVHYIAAEEEDWDYAPLVLAPDDRSYKSQYLNNGPQRIGRKYKKVRFMAYTDETFKTREAIQHESGILGPLLYGEVGDTLLIIFKNQASRPYNIYPHGITDVRPLYSRRLPKGVKHLKDFPILPGEIFKYKWTITVEDGPTKSDPRCLTRYYSSFVNWERDLASGLIGPLLICYKESVDQRGNQIMSDKRNVILFSVFDENRSWYLTENIQRFLPNPAGVQLEDPEFQASNIMHSINGYVFDSLQLSVCLHEVAYWYILSIGAQTDFLSVFFSGYTFKHKGVYEDTLTLFPFSGETVFMSMENPGLWILGCHNSDFRNRGMTALLKVSSCDWNTGDYYEDSYEDISAYFDSKNNAIEPRSFSQNPPVLKRHQREGTRTTLQSDQEEIDYDDTISVEMKKEDFDIYDEDENQSPRSFQKKTRHYFIAAVERLWDYGMSSSPHVLRNRAQSGSVPQFKKVVFQEFTDGSFTQPLYRGELNEHLGLLGPYIRAEVEDNIMVTFRNQASRPYSFYSSLISYEEDQRQGAEPRKNFVKPNETKTYFWKVQHHMAPTKDEFDCKAWAYFSDVDLEKDVHSGLIGPLLVCHTNTLNPAHGRQVTVQEFALFFTIFDETKSWYFTENMERNCRAPCNIQMEDPTFKENYRFHAINGYIMDTLPGLVMAQDQRIRWYLLSMGSNENIHSIHFSGHVFTVRKKEEYKMALYNLYPGVFETVEMLPSKAGIWRVECLIGEHLHAGMSTLFLVYSNKCQNPLGMASGHIRDFQITASGQYGQWAPKLARLHYSGSINAWSTKEPFSWIKVDLLAPMIIHGIKTQGARQKFSSLYISQFIIMYSLDGKKWQTYRGNSTGTDMVFFGNVDSSGIKHNIFNPPIIARYIRLHPTHYSIRSTLRMELMGCDLNSCSMPLGMESKAISDAQITASSYFTNMFATWSPSKARLHLQGRSNAWRPQVNNPKEWLQVDFQKTMKVTGVTTQGVKSLDTSMYVKEFLISSSQDGHQWTLFFQNGKVKVFQGNQDSFTPVVNSLDPPLLTRYLRIHPQSWEHQIALRMEVLGCEAQDLY

SEQ ID NO: 1911 - DNA, 4371 bp, synthetic construct
  misc_feature 1..4371: note = Variant of human B-domain deleted Factor VIII
  source 1..4371: mol_type = other DNA
atgcagattgaactgtctacctgcttcttcctctgtttgctgaggttctgctttagcgccactagacggtactaccttggcgctgtggagctgtcctgggactatatgcagagtgatttgggagagcttcccgtcgacgcacgatttcctcctcgcgttccaaagtcatttccctttaacacaagccaggtgtacaagaagacgctcttcgtcgaattcaccgatcacctgttcaatatcgccaaacccagaccaccatggatgggtcttttggggcctaccatacaagcggaggtgtatgacacagttgttatcactctcaagaacatggcttctcatccggtaagtcttcacgcagtgggcgtgtcctactggaaagcttcagaaggagccgagtatgatgatcagacatcccagagggagaaagaagacgacaaggtatttccaggtgggtctcatacctatgtgtggcaagtgctcaaagagaatggccctatggcaagcgatccgccgtgtttgacttacagctacctttcacacgttgacctcgtcaaggacctcaactccgggttgattggagccttgttggtatgcagggaaggatctcttgccaaagagaagacacagaccctggccaagtttatccttctctttgctgtgttcgatgagggcaaaagttggcatagcgaaacgaagaattccctcatgcaggatcgcgacgcagccagcgccagagcttggcccaagatgcacactgtgaacggatatgtcaataggacgcttcctggcttgattgggtgtcatcggaaaagtgtctactggcacgtgatcggaatggggacaacaccagaggtccactccatatttctcgaaggccataccttccttgttcgaaaccacagacaggcatccttggggatctctcccattacctttctcactgcccaaacgctccttcgtgacttgggtcagttccttctcttttgccatatcccgtcacaccagcatgatggtatggaagcttatgtgaaagtcgacagttgtcctgaggagccacagttgcgcatgaagaataatgaagaagccgaggattacgacgacgatctcaccgattctgagatggacgtggtgaggtttgatgacgacaactctccctccatcattcaagctcggagcggggcgaagaaacaccccaagacttgggtccactatatagcggcggaagaggaggattgggattacgctcctcttgtattggcaccagatgaccgctcatacaaaagccagtacctcaacaacggaccgcagagaattggccggaagtataagaaagtgcgatttatggcctatacagacgaaacctttaagacaagggaggccatccagcatgagagtgggattttgggacctcttctttacggcgaagttggtgataccctcctcatcatcttcaagaatcaagcttctcgcccctataacatttacccacacgggatcactgacgttaggcctttgtatagcagaagacttcccaaaggcgtgaagcatctcaaagacttccccattttgccaggcgagatctttaagtacaaatggaccattacagtggaagatggaccgactaaatcagaccctcgatgccttacgcggtactattcctccttcgtgaattgggagagagatttggcaagcggactcataggaccactcctcatctgttacaaggaatctgtagaccagaggggtaaccagattatgagtgataaacgcaatgtgatcctttttagcgtcttcgacgagaaccggtcctggtacttgaccgagaatatacaaaggttccttcccaaccccgcaggcgttcagttggaagaccctgagtttcaggccagcaatattatgcactcaatcaacggctatgtgtttgatagtctccagctttctgtttgcctccatgaagtagcctattggtacatcttgtcaattggtgctcaaacagacttcctctccgtcttcttctccggctacacctttaagcacaagggcgtgtatgaggacactctcacactctttccattttctggagaaaccgtgttcatgagcatggagaatccaggcctttggatcttgggttgccacaacagtgattttcgcaatcggggaatgactgctctcctcaaagtcagcagctgtgattggaacacaggcgactattacggggattcttacgaggacataagtgcctactttgactccaagaataacgccattgagcccagatcattctcccagaatcctcccgtgcttaaaaggcatcagcgcgaaggtaccagaactactcttcagtctgatcaagaggagattgactatgacgacaccattagcgtggaaatgaagaaggaggatttcgatatctatgacgaagatgagaaccagtctccgcggagctttcagaagaagacgcgacactacttcattgcagcagtcgaaaggctttgggactacggtatgtcatcatcccctcatgtgttgcgcaatagagctcagagtggaagtgttccacagttcaagaaagtcgtctttcaagagtttacagatggcagcttcacacagcctctctatcggggcgagcttaacgaacatttgggactccttggtccctatatccgagccgaagtggaggacaacattatggttacctttaggaatcaagcctctcgcccctacagcttctactcctccctcatcagttatgaggaggatcagagacaaggcgctgaaccacggaagaactttgtgaaaccgaatgagacgaagacctacttctggaaagtacagcaccacatggcccccacaaaagacgaattcgattgcaaagcatgggcgtatttttcagacgttgacttggagaaagatgtacattcaggacttattggtcctttgttggtgtgtcacactaacactctcaatccagcccatggcaggcaggtgacagtccaggaattcgctcttttctttaccatctttgatgagaccaagtcctggtacttcacggaaaacatggagcgcaattgcagagccccctgtaacatacagatggaggaccctacctttaaggaaaattatcggttccacgcaatcaacggatacattatggatacactccctggccttgtgatggctcaggaccaacgaatcaggtggtacctcctcagcatgggttctaatgagaacatacactccattcacttttcaggacatgtgttcactgtccggaagaaagaagagtataagatggccctctacaatttgtatccaggcgtgtttgagaccgttgaaatgcttccctctaaagctggcatctggagagtagagtgcttgatcggagaacatcttcacgcaggtatgagcaccttgttcctcgtgtacagcaacaaatgtcagaatccacttggcatggccagtggacacattcgcgactttcagatcacagcatctggccagtatggacaatgggccccaaagttggctcgcctccattactccggtagcataaatgcgtggtccactaaagaacctttcagctggattaaggtcgatcttcttgcccccatgatcatccacggcattaagacacagggagcgaggcagaaattctcctccctctacatctcacagttcattattatgtatagtttggacggcaagaagtggcaaacttatagaggtaacagtactggaacagacatggtgttcttcggcaacgttgatagctctggcatcaaacacaacatctttaatcctcccataatagctcggtacatcagattgcatccgacccactacagcattaggagtacactccgaatggagcttatgggttgcgacttgaattcctgttcaatgccactcggaatggagtctaaagccatctctgatgcacagataaccgccagtagctactttacgaacatgtttgctacgtggtcaccctctaaggcaaggcttcatttgcaaggccggtctaatgcctggagacctcaggtgaacaacccgaaagaatggctccaggtggactttcagaagaccatgaaagtaacaggtgtcactactcagggagttaagtccttggatactagcatgtatgtgaaggagttccttatttcctcatcacaagatggccaccagtggaccctcttctttcagaatggtaaggtcaaagtgtttcagggcaatcaagacagcttcacacccgtggtgaacagtcttgatcctccactcttgacacgataccttcgaatccatccacagtcttgggagcaccagattgcattgcgcatggaagtacttggatgcgaggctcaggacctctac

SEQ ID NO: 1912 - protein, 1457 aa, synthetic construct
  REGION 1..1457: note = Variant of human B-domain deleted Factor VIII
MQIELSTCFFLCLLRFCFSATRRYYLGAVELSWDYMQSDLGELPVDARFPPRVPKSFPFNTSQVYKKTLFVEFTDHLFNIAKPRPPWMGLLGPTIQAEVYDTVVITLKNMASHPVSLHAVGVSYWKASEGAEYDDQTSQREKEDDKVFPGGSHTYVWQVLKENGPMASDPPCLTYSYLSHVDLVKDLNSGLIGALLVCREGSLAKEKTQTLAKFILLFAVFDEGKSWHSETKNSLMQDRDAASARAWPKMHTVNGYVNRTLPGLIGCHRKSVYWHVIGMGTTPEVHSIFLEGHTFLVRNHRQASLGISPITFLTAQTLLRDLGQFLLFCHIPSHQHDGMEAYVKVDSCPEEPQLRMKNNEEAEDYDDDLTDSEMDVVRFDDDNSPSIIQARSGAKKHPKTWVHYIAAEEEDWDYAPLVLAPDDRSYKSQYLNNGPQRIGRKYKKVRFMAYTDETFKTREAIQHESGILGPLLYGEVGDTLLIIFKNQASRPYNIYPHGITDVRPLYSRRLPKGVKHLKDFPILPGEIFKYKWTITVEDGPTKSDPRCLTRYYSSFVNWERDLASGLIGPLLICYKESVDQRGNQIMSDKRNVILFSVFDENRSWYLTENIQRFLPNPAGVQLEDPEFQASNIMHSINGYVFDSLQLSVCLHEVAYWYILSIGAQTDFLSVFFSGYTFKHKGVYEDTLTLFPFSGETVFMSMENPGLWILGCHNSDFRNRGMTALLKVSSCDWNTGDYYGDSYEDISAYFDSKNNAIEPRSFSQNPPVLKRHQREGTRTTLQSDQEEIDYDDTISVEMKKEDFDIYDEDENQSPRSFQKKTRHYFIAAVERLWDYGMSSSPHVLRNRAQSGSVPQFKKVVFQEFTDGSFTQPLYRGELNEHLGLLGPYIRAEVEDNIMVTFRNQASRPYSFYSSLISYEEDQRQGAEPRKNFVKPNETKTYFWKVQHHMAPTKDEFDCKAWAYFSDVDLEKDVHSGLIGPLLVCHTNTLNPAHGRQVTVQEFALFFTIFDETKSWYFTENMERNCRAPCNIQMEDPTFKENYRFHAINGYIMDTLPGLVMAQDQRIRWYLLSMGSNENIHSIHFSGHVFTVRKKEEYKMALYNLYPGVFETVEMLPSKAGIWRVECLIGEHLHAGMSTLFLVYSNKCQNPLGMASGHIRDFQITASGQYGQWAPKLARLHYSGSINAWSTKEPFSWIKVDLLAPMIIHGIKTQGARQKFSSLYISQFIIMYSLDGKKWQTYRGNSTGTDMVFFGNVDSSGIKHNIFNPPIIARYIRLHPTHYSIRSTLRMELMGCDLNSCSMPLGMESKAISDAQITASSYFTNMFATWSPSKARLHLQGRSNAWRPQVNNPKEWLQVDFQKTMKVTGVTTQGVKSLDTSMYVKEFLISSSQDGHQWTLFFQNGKVKVFQGNQDSFTPVVNSLDPPLLTRYLRIHPQSWEHQIALRMEVLGCEAQDLY

SEQ ID NO: 1913 - DNA, 4371 bp, synthetic construct
  misc_feature 1..4371: note = Variant of human B-domain deleted Factor VIII
  source 1..4371: mol_type = other DNA
atgcagattgaactgtctacctgcttcttcctctgtttgctgaggttctgctttagcgccactagacggtactaccttggcgctgtggagctgtcctgggactatatgcagagtgatttgggagagcttcccgtcgacgcacgatttcctcctcgcgttccaaagtcatttccctttaacacaagccaggtgtacaagaagacgctcttcgtcgaattcaccgatcacctgttcaatatcgccaaacccagaccaccatggatgggtcttttggggcctaccatacaagcggaggtgtatgacacagttgttatcactctcaagaacatggcttctcatccggtaagtcttcacgcagtgggcgtgtcctactggaaagcttcagaaggagccgagtatgatgatcagacatcccagagggagaaagaagacgacaaggtatttccaggtgggtctcatacctatgtgtggcaagtgctcaaagagaatggccctatggcaagcgatccgccgtgtttgacttacagctacctttcacacgttgacctcgtcaaggacctcaactccgggttgattggagccttgttggtatgcagggaaggatctcttgccaaagagaagacacagaccctggccaagtttatccttctctttgctgtgttcgatgagggcaaaagttggcatagcgaaacgaagaattccctcatgcaggatcgcgacgcagccagcgccagagcttggcccaagatgcacactgtgaacggatatgtcaataggacgcttcctggcttgattgggtgtcatcggaaaagtgtctactggcacgtgatcggaatggggacaacaccagaggtccactccatatttctcgaaggccataccttccttgttcgaaaccacagacaggcatccttggggatctctcccattacctttctcactgcccaaacgctccttcgtgacttgggtcagttccttctcttttgccatatcccgtcacaccagcatgatggtatggaagcttatgtgaaagtcgacagttgtcctgaggagccacagttgcgcatgaagaataatgaagaagccgaggattacgacgacgatctcaccgattctgagatggacgtggtgaggtttgatgacgacaactctccctccatcattcaagctcggagcggggcgaagaaacaccccaagacttgggtccactatatagcggcggaagaggaggattgggattacgctcctcttgtattggcaccagatgaccgctcatacaaaagccagtacctcaacaacggaccgcagagaattggccggaagtataagaaagtgcgatttatggcctatacagacgaaacctttaagacaagggaggccatccagcatgagagtgggattttgggacctcttctttacggcgaagttggtgataccctcctcatcatcttcaagaatcaagcttctcgcccctataacatttacccacacgggatcactgacgttaggcctttgtatagcagaagacttcccaaaggcgtgaagcatctcaaagacttccccattttgccaggcgagatctttaagtacaaatggaccattacagtggaagatggaccgactaaatcagaccctcgatgccttacgcggtactattcctccttcgtgaattgggagagagatttggcaagcggactcataggaccactcctcatctgttacaaggaatctgtagaccagaggggtaaccagattatgagtgataaacgcaatgtgatcctttttagcgtcttcgacgagaaccggtcctggtacttgaccgagaatatacaaaggttccttcccaaccccgcaggcgttcagttggaagaccctgagtttcaggccagcaatattatgcactcaatcaacggctatgtgtttgatagtctccagctttctgtttgcctccatgaagtagcctattggtacatcttgtcaattggtgctcaaacagacttcctctccgtcttcttctccggctacacctttaagcacaagggcgtgtatgaggacactctcacactctttccattttctggagaaaccgtgttcatgagcatggagaatccaggcctttggatcttgggttgccacaacagtgattttcgcaatcggggaatgactgctctcctcaaagtcagcagctgtgattggaacacaggcgactattacgaagattcttacgaggacataagtgcctactttgactccaagaataacgccattgagcccagatcattctcccagaatcctcccgtgcttaaaaggcatcagcgcgaaggtaccagaactactcttcagtctgatcaagaggagattgactatgacgacaccattagcgtggaaatgaagaaggaggatttcgatatctatgacgaagatgagaaccagtctccgcggagctttcagaagaagacgcgacactacttcattgcagcagtcgaaaggctttgggactacggtatgtcatcatcccctcatgtgttgcgcaatagagctcagagtggaagtgttccacagttcaagaaagtcgtctttcaagagtttacagatggcagcttcacacagcctctctatcggggcgagcttaacgaacatttgggactccttggtccctatatccgagccgaagtggaggacaacattatggttacctttaggaatcaagcctctcgcccctacagcttctactcctccctcatcagttatgaggaggatcagagacaaggcgctgaaccacggaagaactttgtgaaaccgaatgagacgaagacctacttctggaaagtacagcaccacatggcccccacaaaagacgaattcgattgcaaagcatgggcgtatttttcagacgttgacttggagaaagatgtacattcaggacttattggtcctttgttggtgtgtcacactaacactctcaatccagcccatggcaggcaggtgacagtccaggaattcgctcttttctttaccatctttgatgagaccaagtcctggtacttcacggaaaacatggagcgcaattgcagagccccctgtaacatacagatggaggaccctacctttaaggaaaattatcggttccacgcaatcaacggatacattatggatacactccctggccttgtgatggctcaggaccaacgaatcaggtggtacctcctcagcatgggttctaatgagaacatacactccattcacttttcaggacatgtgttcactgtccggaagaaagaagagtataagatggccctctacaatttgtatccaggcgtgtttgagaccgttgaaatgcttccccggaaagctggcatctggagagtagagtgcttgatcggagaacatcttcacgcaggtatgagcaccttgttcctcgtgtacagcaacaaatgtcagaatccacttggcatggccagtggacacattcgcgactttcagatcacagcatctggccagtatggacaatgggccccaaagttggctcgcctccattactccggtagcataaatgcgtggtccactaaagaacctttcagctggattaaggtcgatcttcttgcccccatgatcatccacggcattaagacacagggagcgaggcagaaattctcctccctctacatctcacagttcattattatgtatagtttggacggcaagaagtggcaaacttatagaggtaacagtactggaacagacatggtgttcttcggcaacgttgatagctctggcatcaaacacaacatctttaatcctcccataatagctcggtacatcagattgcatccgacccactacagcattaggagtacactccgaatggagcttatgggttgcgacttgaattcctgttcaatgccactcggaatggagtctaaagccatctctgatgcacagataaccgccagtagctactttacgaacatgtttgctacgtggtcaccctctaaggcaaggcttcatttgcaaggccggtctaatgcctggagacctcaggtgaacaacccgaaagaatggctccaggtggactttcagaagaccatgaaagtaacaggtgtcactactcagggagttaagtccttggatactagcatgtatgtgaaggagttccttatttcctcatcacaagatggccaccagtggaccctcttctttcagaatggtaaggtcaaagtgtttcagggcaatcaagacagcttcacacccgtggtgaacagtcttgatcctccactcttgacacgataccttcgaatccatccacagtcttgggagcaccagattgcattgcgcatggaagtacttggatgcgaggctcaggacctctac

SEQ ID NO: 1914 - protein, 1457 aa, synthetic construct
  REGION 1..1457: note = Variant of human B-domain deleted Factor VIII
MQIELSTCFFLCLLRFCFSATRRYYLGAVELSWDYMQSDLGELPVDARFPPRVPKSFPFNTSQVYKKTLFVEFTDHLFNIAKPRPPWMGLLGPTIQAEVYDTVVITLKNMASHPVSLHAVGVSYWKASEGAEYDDQTSQREKEDDKVFPGGSHTYVWQVLKENGPMASDPPCLTYSYLSHVDLVKDLNSGLIGALLVCREGSLAKEKTQTLAKFILLFAVFDEGKSWHSETKNSLMQDRDAASARAWPKMHTVNGYVNRTLPGLIGCHRKSVYWHVIGMGTTPEVHSIFLEGHTFLVRNHRQASLGISPITFLTAQTLLRDLGQFLLFCHIPSHQHDGMEAYVKVDSCPEEPQLRMKNNEEAEDYDDDLTDSEMDVVRFDDDNSPSIIQARSGAKKHPKTWVHYIAAEEEDWDYAPLVLAPDDRSYKSQYLNNGPQRIGRKYKKVRFMAYTDETFKTREAIQHESGILGPLLYGEVGDTLLIIFKNQASRPYNIYPHGITDVRPLYSRRLPKGVKHLKDFPILPGEIFKYKWTITVEDGPTKSDPRCLTRYYSSFVNWERDLASGLIGPLLICYKESVDQRGNQIMSDKRNVILFSVFDENRSWYLTENIQRFLPNPAGVQLEDPEFQASNIMHSINGYVFDSLQLSVCLHEVAYWYILSIGAQTDFLSVFFSGYTFKHKGVYEDTLTLFPFSGETVFMSMENPGLWILGCHNSDFRNRGMTALLKVSSCDWNTGDYYEDSYEDISAYFDSKNNAIEPRSFSQNPPVLKRHQREGTRTTLQSDQEEIDYDDTISVEMKKEDFDIYDEDENQSPRSFQKKTRHYFIAAVERLWDYGMSSSPHVLRNRAQSGSVPQFKKVVFQEFTDGSFTQPLYRGELNEHLGLLGPYIRAEVEDNIMVTFRNQASRPYSFYSSLISYEEDQRQGAEPRKNFVKPNETKTYFWKVQHHMAPTKDEFDCKAWAYFSDVDLEKDVHSGLIGPLLVCHTNTLNPAHGRQVTVQEFALFFTIFDETKSWYFTENMERNCRAPCNIQMEDPTFKENYRFHAINGYIMDTLPGLVMAQDQRIRWYLLSMGSNENIHSIHFSGHVFTVRKKEEYKMALYNLYPGVFETVEMLPRKAGIWRVECLIGEHLHAGMSTLFLVYSNKCQNPLGMASGHIRDFQITASGQYGQWAPKLARLHYSGSINAWSTKEPFSWIKVDLLAPMIIHGIKTQGARQKFSSLYISQFIIMYSLDGKKWQTYRGNSTGTDMVFFGNVDSSGIKHNIFNPPIIARYIRLHPTHYSIRSTLRMELMGCDLNSCSMPLGMESKAISDAQITASSYFTNMFATWSPSKARLHLQGRSNAWRPQVNNPKEWLQVDFQKTMKVTGVTTQGVKSLDTSMYVKEFLISSSQDGHQWTLFFQNGKVKVFQGNQDSFTPVVNSLDPPLLTRYLRIHPQSWEHQIALRMEVLGCEAQDLY

SEQ ID NO: 1915 - DNA, 4371 bp, synthetic construct
  misc_feature 1..4371: note = Variant of human B-domain deleted Factor VIII
  source 1..4371: mol_type = other DNA
atgcagattgaactgtctacctgcttcttcctctgtttgctgaggttctgctttagcgccactagacggtactaccttggcgctgtggagctgtcctgggactatatgcagagtgatttgggagagcttcccgtcgacgcacgatttcctcctcgcgttccaaagtcatttccctttaacacaagccaggtgtacaagaagacgctcttcgtcgaattcaccgatcacctgttcaatatcgccaaacccagaccaccatggatgggtcttttggggcctaccatacaagcggaggtgtatgacacagttgttatcactctcaagaacatggcttctcatccggtaagtcttcacgcagtgggcgtgtcctactggaaagcttcagaaggagccgagtatgatgatcagacatcccagagggagaaagaagacgacaaggtatttccaggtgggtctcatacctatgtgtggcaagtgctcaaagagaatggccctatggcaagcgatccgccgtgtttgacttacagctacctttcacacgttgacctcgtcaaggacctcaactccgggttgattggagccttgttggtatgcagggaaggatctcttgccaaagagaagacacagaccctggccaagtttatccttctctttgctgtgttcgatgagggcaaaagttggcatagcgaaacgaagaattccctcatgcaggatcgcgacgcagccagcgccagagcttggcccaagatgcacactgtgaacggatatgtcaataggacgcttcctggcttgattgggtgtcatcggaaaagtgtctactggcacgtgatcggaatggggacaacaccagaggtccactccatatttctcgaaggccataccttccttgttcgaaaccacagacaggcatccttggggatctctcccattacctttctcactgcccaaacgctccttcgtgacttgggtcagttccttctcttttgccatatcccgtcacaccagcatgatggtatggaagcttatgtgaaagtcgacagttgtcctgaggagccacagttgcgcatgaagaataatgaagaagccgaggattacgacgacgatctcaccgattctgagatggacgtggtgaggtttgatgacgacaactctccctccatcattcaagctcggagcggggcgaagaaacaccccaagacttgggtccactatatagcggcggaagaggaggattgggattacgctcctcttgtattggcaccagatgaccgctcatacaaaagccagtacctcaacaacggaccgcagagaattggccggaagtataagaaagtgcgatttatggcctatacagacgaaacctttaagacaagggaggccatccagcatgagagtgggattttgggacctcttctttacggcgaagttggtgataccctcctcatcatcttcaagaatcaagcttctcgcccctataacatttacccacacgggatcactgacgttaggcctttgtatagcagaagacttcccaaaggcgtgaagcatctcaaagacttccccattttgccaggcgagatctttaagtacaaatggaccattacagtggaagatggaccgactaaatcagaccctcgatgccttacgcggtactattcctccttcgtgaattgggagagagatttggcaagcggactcataggaccactcctcatctgttacaaggaatctgtagactataggggtaaccagattatgagtgataaacgcaatgtgatcctttttagcgtcttcgacgagaaccggtcctggtacttgaccgagaatatacaaaggttccttcccaaccccgcaggcgttcagttggaagaccctgagtttcaggccagcaatattatgcactcaatcaacggctatgtgtttgatagtctccagctttctgtttgcctccatgaagtagcctattggtacatcttgtcaattggtgctcaaacagacttcctctccgtcttcttctccggctacacctttaagcacaagggcgtgtatgaggacactctcacactctttccattttctggagaaaccgtgttcatgagcatggagaatccaggcctttggatcttgggttgccacaacagtgattttcgcaatcggggaatgactgctctcctcaaagtcagcagctgtgattggaacacaggcgactattacgaagattcttacgaggacataagtgcctactttgactccaagaataacgccattgagcccagatcattctcccagaatcctcccgtgcttaaaaggcatcagcgcgaaggtaccagaactactcttcagtctgatcaagaggagattgactatgacgacaccattagcgtggaaatgaagaaggaggatttcgatatctatgacgaagatgagaaccagtctccgcggagctttcagaagaagacgcgacactacttcattgcagcagtcgaaaggctttgggactacggtatgtcatcatcccctcatgtgttgcgcaatagagctcagagtggaagtgttccacagttcaagaaagtcgtctttcaagagtttacagatggcagcttcacacagcctctctatcggggcgagcttaacgaacatttgggactccttggtccctatatccgagccgaagtggaggacaacattatggttacctttaggaatcaagcctctcgcccctacagcttctactcctccctcatcagttatgaggaggatcagagacaaggcgctgaaccacggaagaactttgtgaaaccgaatgagacgaagacctacttctggaaagtacagcaccacatggcccccacaaaagacgaattcgattgcaaagcatgggcgtatttttcagacgttgacttggagaaagatgtacattcaggacttattggtcctttgttggtgtgtcacactaacactctcaatccagcccatggcaggcaggtgacagtccaggaattcgctcttttctttaccatctttgatgagaccaagtcctggtacttcacggaaaacatggagcgcaattgcagagccccctgtaacatacagatggaggaccctacctttaaggaaaattatcggttccacgcaatcaacggatacattatggatacactccctggccttgtgatggctcaggaccaacgaatcaggtggtacctcctcagcatgggttctaatgagaacatacactccattcacttttcaggacatgtgttcactgtccggaagaaagaagagtataagatggccctctacaatttgtatccaggcgtgtttgagaccgttgaaatgcttccctctaaagctggcatctggagagtagagtgcttgatcggagaacatcttcacgcaggtatgagcaccttgttcctcgtgtacagcaacaaatgtcagaatccacttggcatggccagtggacacattcgcgactttcagatcacagcatctggccagtatggacaatgggccccaaagttggctcgcctccattactccggtagcataaatgcgtggtccactaaagaacctttcagctggattaaggtcgatcttcttgcccccatgatcatccacggcattaagacacagggagcgaggcagaaattctcctccctctacatctcacagttcattattatgtatagtttggacggcaagaagtggcaaacttatagaggtaacagtactggaacagacatggtgttcttcggcaacgttgatagctctggcatcaaacacaacatctttaatcctcccataatagctcggtacatcagattgcatccgacccactacagcattaggagtacactccgaatggagcttatgggttgcgacttgaattcctgttcaatgccactcggaatggagtctaaagccatctctgatgcacagataaccgccagtagctactttacgaacatgtttgctacgtggtcaccctctaaggcaaggcttcatttgcaaggccggtctaatgcctggagacctcaggtgaacaacccgaaagaatggctccaggtggactttcagaagaccatgaaagtaacaggtgtcactactcagggagttaagtccttggatactagcatgtatgtgaaggagttccttatttcctcatcacaagatggccaccagtggaccctcttctttcagaatggtaaggtcaaagtgtttcagggcaatcaagacagcttcacacccgtggtgaacagtcttgatcctccactcttgacacgataccttcgaatccatccacagtcttgggagcaccagattgcattgcgcatggaagtacttggatgcgaggctcaggacctctac

SEQ ID NO: 1916 - protein, 1457 aa, synthetic construct
  REGION 1..1457: note = Variant of human B-domain deleted Factor VIII
MQIELSTCFFLCLLRFCFSATRRYYLGAVELSWDYMQSDLGELPVDARFPPRVPKSFPFNTSQVYKKTLFVEFTDHLFNIAKPRPPWMGLLGPTIQAEVYDTVVITLKNMASHPVSLHAVGVSYWKASEGAEYDDQTSQREKEDDKVFPGGSHTYVWQVLKENGPMASDPPCLTYSYLSHVDLVKDLNSGLIGALLVCREGSLAKEKTQTLAKFILLFAVFDEGKSWHSETKNSLMQDRDAASARAWPKMHTVNGYVNRTLPGLIGCHRKSVYWHVIGMGTTPEVHSIFLEGHTFLVRNHRQASLGISPITFLTAQTLLRDLGQFLLFCHIPSHQHDGMEAYVKVDSCPEEPQLRMKNNEEAEDYDDDLTDSEMDVVRFDDDNSPSIIQARSGAKKHPKTWVHYIAAEEEDWDYAPLVLAPDDRSYKSQYLNNGPQRIGRKYKKVRFMAYTDETFKTREAIQHESGILGPLLYGEVGDTLLIIFKNQASRPYNIYPHGITDVRPLYSRRLPKGVKHLKDFPILPGEIFKYKWTITVEDGPTKSDPRCLTRYYSSFVNWERDLASGLIGPLLICYKESVDYRGNQIMSDKRNVILFSVFDENRSWYLTENIQRFLPNPAGVQLEDPEFQASNIMHSINGYVFDSLQLSVCLHEVAYWYILSIGAQTDFLSVFFSGYTFKHKGVYEDTLTLFPFSGETVFMSMENPGLWILGCHNSDFRNRGMTALLKVSSCDWNTGDYYEDSYEDISAYFDSKNNAIEPRSFSQNPPVLKRHQREGTRTTLQSDQEEIDYDDTISVEMKKEDFDIYDEDENQSPRSFQKKTRHYFIAAVERLWDYGMSSSPHVLRNRAQSGSVPQFKKVVFQEFTDGSFTQPLYRGELNEHLGLLGPYIRAEVEDNIMVTFRNQASRPYSFYSSLISYEEDQRQGAEPRKNFVKPNETKTYFWKVQHHMAPTKDEFDCKAWAYFSDVDLEKDVHSGLIGPLLVCHTNTLNPAHGRQVTVQEFALFFTIFDETKSWYFTENMERNCRAPCNIQMEDPTFKENYRFHAINGYIMDTLPGLVMAQDQRIRWYLLSMGSNENIHSIHFSGHVFTVRKKEEYKMALYNLYPGVFETVEMLPSKAGIWRVECLIGEHLHAGMSTLFLVYSNKCQNPLGMASGHIRDFQITASGQYGQWAPKLARLHYSGSINAWSTKEPFSWIKVDLLAPMIIHGIKTQGARQKFSSLYISQFIIMYSLDGKKWQTYRGNSTGTDMVFFGNVDSSGIKHNIFNPPIIARYIRLHPTHYSIRSTLRMELMGCDLNSCSMPLGMESKAISDAQITASSYFTNMFATWSPSKARLHLQGRSNAWRPQVNNPKEWLQVDFQKTMKVTGVTTQGVKSLDTSMYVKEFLISSSQDGHQWTLFFQNGKVKVFQGNQDSFTPVVNSLDPPLLTRYLRIHPQSWEHQIALRMEVLGCEAQDLY

SEQ ID NO: 1917 - DNA, 4371 bp, synthetic construct
  misc_feature 1..4371: note = Variant of human B-domain deleted Factor VIII
  source 1..4371: mol_type = other DNA
atgcagattgaactgtctacctgcttcttcctctgtttgctgaggttctgctttagcgccactagacggtactaccttggcgctgtggagctgtcctgggactatatgcagagtgatttgggagagcttcccgtcgacgcacgatttcctcctcgcgttccaaagtcatttccctttaacacaagccaggtgtacaagaagacgctcttcgtcgaattcaccgatcacctgttcaatatcgccaaacccagaccaccatggatgggtcttttggggcctaccatacaagcggaggtgtatgacacagttgttatcactctcaagaacatggcttctcatccggtaagtcttcacgcagtgggcgtgtcctactggaaagcttcagaaggagccgagtatgatgatcagacatcccagagggagaaagaagacgacaaggtatttccaggtgggtctcatacctatgtgtggcaagtgctcaaagagaatggccctatggcaagcgatccgccgtgtttgacttacagctacctttcacacgttgacctcgtcaaggacctcaactccgggttgattggagccttgttggtatgcagggaaggatctcttgccaaagagaagacacagaccctggccaagtttatccttctctttgctgtgttcgatgagggcaaaagttggcatagcgaaacgaagaattccctcatgcaggatcgcgacgcagccagcgccagagcttggcccaagatgcacactgtgaacggatatgtcaataggacgcttcctggcttgattgggtgtcatcggaaaagtgtctactggcacgtgatcggaatggggacaacaccagaggtccactccatatttctcgaaggccataccttccttgttcgaaaccacagacaggcagcgttggggatctctcccattacctttctcactgcccaaacgctccttcgtgacttgggtcagttccttctcttttgccatatcccgtcacaccagcatgatggtatggaagcttatgtgaaagtcgacagttgtcctgaggagccacagttgcgcatgaagaataatgaagaagccgaggattacgacgacgatctcaccgattctgagatggacgtggtgaggtttgatgacgacaactctccctccatcattcaagctcggagcggggcgaagaaacaccccaagacttgggtccactatatagcggcggaagaggaggattgggattacgctcctcttgtattggcaccagatgaccgctcatacaaaagccagtacctcaacaacggaccgcagagaattggccggaagtataagaaagtgcgatttatggcctatacagacgaaacctttaagacaagggaggccatccagcatgagagtgggattttgggacctcttctttacggcgaagttggtgataccctcctcatcatcttcaagaatcaagcttctcgcccctataacatttacccacacgggatcactgacgttaggcctttgtatagcagaagacttcccaaaggcgtgaagcatctcaaagacttccccattttgccaggcgagatctttaagtacaaatggaccattacagtggaagatggaccgactaaatcagaccctcgatgccttacgcggtactattcctccttcgtgaattgggagagagatttggcaagcggactcataggaccactcctcatctgttacaaggaatctgtagaccagaggggtaaccagattatgagtgataaacgcaatgtgatcctttttagcgtcttcgacgagaaccggtcctggtacttgaccgagaatatacaaaggttccttcccaaccccgcaggcgttcagttggaagaccctgagtttcaggccagcaatattatgcactcaatcaacggctatgtgtttgatagtctccagctttctgtttgcctccatgaagtagcctattggtacatcttgtcaattggtgctcaaacagacttcctctccgtcttcttctccggctacacctttaagcacaagggcgtgtatgaggacactctcacactctttccattttctggagaaaccgtgttcatgagcatggagaatccaggcctttggatcttgggttgccacaacagtgattttcgcaatcggggaatgactgctctcctcaaagtcagcagctgtgattggaacacaggcgactattacgaagattcttacgaggacataagtgcctactttgactccaagaataacgccattgagcccagatcattctcccagaatcctcccgtgcttaaaaggcatcagcgcgaaggtaccagaactactcttcagtctgatcaagaggagattgactatgacgacaccattagcgtggaaatgaagaaggaggatttcgatatctatgacgaagatgagaaccagtctccgcggagctttcagaagaagacgcgacactacttcattgcagcagtcgaaaggctttgggactacggtatgtcatcatcccctcatgtgttgcgcaatagagctcagagtggaagtgttccacagttcaagaaagtcgtctttcaagagtttacagatggcagcttcacacagcctctctatcggggcgagcttaacgaacatttgggactccttggtccctatatccgagccgaagtggaggacaacattatggttacctttaggaatcaagcctctcgcccctacagcttctactcctccctcatcagttatgaggaggatcagagacaaggcgctgaaccacggaagaactttgtgaaaccgaatgagacgaagacctacttctggaaagtacagcaccacatggcccccacaaaagacgaattcgattgcaaagcatgggcgtatttttcagacgttgacttggagaaagatgtacattcaggacttattggtcctttgttggtgtgtcacactaacactctcaatccagcccatggcaggcaggtgacagtccaggaattcgctcttttctttaccatctttgatgagaccaagtcctggtacttcacggaaaacatggagcgcaattgcagagccccctgtaacatacagatggaggaccctacctttaaggaaaattatcggttccacgcaatcaacggatacattatggatacactccctggccttgtgatggctcaggaccaacgaatcaggtggtacctcctcagcatgggttctaatgagaacatacactccattcacttttcaggacatgtgttcactgtccggaagaaagaagagtataagatggccctctacaatttgtatccaggcgtgtttgagaccgttgaaatgcttccctctaaagctggcatctggagagtagagtgcttgatcggagaacatcttcacgcaggtatgagcaccttgttcctcgtgtacagcaacaaatgtcagaatccacttggcatggccagtggacacattcgcgactttcagatcacagcatctggccagtatggacaatgggccccaaagttggctcgcctccattactccggtagcataaatgcgtggtccactaaagaacctttcagctggattaaggtcgatcttcttgcccccatgatcatccacggcattaagacacagggagcgaggcagaaattctcctccctctacatctcacagttcattattatgtatagtttggacggcaagaagtggcaaacttatagaggtaacagtactggaacagacatggtgttcttcggcaacgttgatagctctggcatcaaacacaacatctttaatcctcccataatagctcggtacatcagattgcatccgacccactacagcattaggagtacactccgaatggagcttatgggttgcgacttgaattcctgttcaatgccactcggaatggagtctaaagccatctctgatgcacagataaccgccagtagctactttacgaacatgtttgctacgtggtcaccctctaaggcaaggcttcatttgcaaggccggtctaatgcctggagacctcaggtgaacaacccgaaagaatggctccaggtggactttcagaagaccatgaaagtaacaggtgtcactactcagggagttaagtccttggatactagcatgtatgtgaaggagttccttatttcctcatcacaagatggccaccagtggaccctcttctttcagaatggtaaggtcaaagtgtttcagggcaatcaagacagcttcacacccgtggtgaacagtcttgatcctccactcttgacacgataccttcgaatccatccacagtcttgggagcaccagattgcattgcgcatggaagtacttggatgcgaggctcaggacctctac

SEQ ID NO: 1918 - protein, 1457 aa, synthetic construct
  REGION 1..1457: note = Variant of human B-domain deleted Factor VIII
MQIELSTCFFLCLLRFCFSATRRYYLGAVELSWDYMQSDLGELPVDARFPPRVPKSFPFNTSQVYKKTLFVEFTDHLFNIAKPRPPWMGLLGPTIQAEVYDTVVITLKNMASHPVSLHAVGVSYWKASEGAEYDDQTSQREKEDDKVFPGGSHTYVWQVLKENGPMASDPPCLTYSYLSHVDLVKDLNSGLIGALLVCREGSLAKEKTQTLAKFILLFAVFDEGKSWHSETKNSLMQDRDAASARAWPKMHTVNGYVNRTLPGLIGCHRKSVYWHVIGMGTTPEVHSIFLEGHTFLVRNHRQAALGISPITFLTAQTLLRDLGQFLLFCHIPSHQHDGMEAYVKVDSCPEEPQLRMKNNEEAEDYDDDLTDSEMDVVRFDDDNSPSIIQARSGAKKHPKTWVHYIAAEEEDWDYAPLVLAPDDRSYKSQYLNNGPQRIGRKYKKVRFMAYTDETFKTREAIQHESGILGPLLYGEVGDTLLIIFKNQASRPYNIYPHGITDVRPLYSRRLPKGVKHLKDFPILPGEIFKYKWTITVEDGPTKSDPRCLTRYYSSFVNWERDLASGLIGPLLICYKESVDQRGNQIMSDKRNVILFSVFDENRSWYLTENIQRFLPNPAGVQLEDPEFQASNIMHSINGYVFDSLQLSVCLHEVAYWYILSIGAQTDFLSVFFSGYTFKHKGVYEDTLTLFPFSGETVFMSMENPGLWILGCHNSDFRNRGMTALLKVSSCDWNTGDYYEDSYEDISAYFDSKNNAIEPRSFSQNPPVLKRHQREGTRTTLQSDQEEIDYDDTISVEMKKEDFDIYDEDENQSPRSFQKKTRHYFIAAVERLWDYGMSSSPHVLRNRAQSGSVPQFKKVVFQEFTDGSFTQPLYRGELNEHLGLLGPYIRAEVEDNIMVTFRNQASRPYSFYSSLISYEEDQRQGAEPRKNFVKPNETKTYFWKVQHHMAPTKDEFDCKAWAYFSDVDLEKDVHSGLIGPLLVCHTNTLNPAHGRQVTVQEFALFFTIFDETKSWYFTENMERNCRAPCNIQMEDPTFKENYRFHAINGYIMDTLPGLVMAQDQRIRWYLLSMGSNENIHSIHFSGHVFTVRKKEEYKMALYNLYPGVFETVEMLPSKAGIWRVECLIGEHLHAGMSTLFLVYSNKCQNPLGMASGHIRDFQITASGQYGQWAPKLARLHYSGSINAWSTKEPFSWIKVDLLAPMIIHGIKTQGARQKFSSLYISQFIIMYSLDGKKWQTYRGNSTGTDMVFFGNVDSSGIKHNIFNPPIIARYIRLHPTHYSIRSTLRMELMGCDLNSCSMPLGMESKAISDAQITASSYFTNMFATWSPSKARLHLQGRSNAWRPQVNNPKEWLQVDFQKTMKVTGVTTQGVKSLDTSMYVKEFLISSSQDGHQWTLFFQNGKVKVFQGNQDSFTPVVNSLDPPLLTRYLRIHPQSWEHQIALRMEVLGCEAQDLY

SEQ ID NO: 1919 - DNA, 4371 bp, synthetic construct
  misc_feature 1..4371: note = Variant of human B-domain deleted Factor VIII
  source 1..4371: mol_type = other DNA
atgcagattgaactgtctacctgcttcttcctctgtttgctgaggttctgctttagcgccactagacggtactaccttggcgctgtggagctgtcctgggactatatgcagagtgatttgggagagcttcccgtcgacgcacgatttcctcctcgcgttccaaagtcatttccctttaacacaagccaggtgtacaagaagacgctcttcgtcgaattcaccgatcacctgttcaatatcgccaaacccagaccaccatggatgggtcttttggggcctaccatacaagcggaggtgtatgacacagttgttatcactctcaagaacatggcttctcatccggtaagtcttcacgcagtgggcgtgtcctactggaaagcttcagaaggagccgagtatgatgatcagacatcccagagggagaaagaagacgacaaggtatttccaggtgggtctcatacctatgtgtggcaagtgctcaaagagaatggccctatggcaagcgatccgccgtgtttgacttacagctacctttcacacgttgacctcgtcaaggacctcaactccgggttgattggagccttgttggtatgcagggaaggatctcttgccaaagagaagacacagaccctggccaagtttatccttctctttgctgtgttcgatgagggcaaaagttggcatagcgaaacgaagaattccctcatgcaggatcgcgacgcagccagcgccagagcttggcccaagatgcacactgtgaacggatatgtcaataggacgcttcctggcttgattgggtgtcatcggaaaagtgtctactggcacgtgatcggaatggggacaacaccagaggtccactccatatttctcgaaggccataccttccttgttcgaaaccacagacaggcatccttggggatctctcccattacctttctcactgcccaaacgctccttcgtgacttgggtcagttccttctcttttgccatatcccgtcacaccagcatgatggtatggaagcttatgtgaaagtcgacagttgtcctgaggagccacagttgcgcatgaagaataatgaagaagccgaggattacgacgacgatctcaccgattctgagatggacgtggtgaggtttgatgacgacaactctccctccatcattcaagctcggagcggggcgaagaaacaccccaagacttgggtccactatatagcggcggaagaggaggattgggattacgctcctcttgtattggcaccagatgaccgctcatacaaaagccagtacctcaacaacggaccgcagagaattggccggaagtataagaaagtgcgatttatggcctatacagacgaaacctttaagacaagggaggccatccagcatgagagtgggattttgggacctcttctttacggcgaagttggtgataccctcctcatcatcttcaagaatcaagcttctcgcccctataacatttacccacacgggatcactgacgttaggcctttgtatagcagaagacttcccaaaggcgtgaagcatctcaaagacttccccattttgccaggcgagatctttaagtacaaatggaccattacagtggaagatggaccgactaaatcagaccctcgatgccttacgcggtactattcctccttcgtgaattgggagagagatttggcaagcggactcataggaccactcctcatctgttacaaggaatctgtagaccagaggggtaaccagattatgagtgataaacgcaatgtgatcctttttagcgtcttcgacgagaaccggtcctggtacttgaccgagaatatacaaaggttccttcccaaccccgcaggcgttcagttggaagaccctgagtttcaggccagcaatattatgcactcaatcaacggctatgtgtttgatagtctccagctttctgtttgcctccatgaagtagcctattggtacatcttgtcaattggtgctcaaacagacttcctctccgtcttcttctccggctacacctttaagcacaagggcgtgtatgaggacactctcacactctttccattttctggagaaaccgtgttcatgagcatggagaatccaggcctttggatcttgggttgccagaacagtgattttcgcaatcggggaatgactgctctcctcaaagtcagcagctgtgattggaacacaggcgactattacgaagattcttacgaggacataagtgcctactttgactccaagaataacgccattgagcccagatcattctcccagaatcctcccgtgcttaaaaggcatcagcgcgaaggtaccagaactactcttcagtctgatcaagaggagattgactatgacgacaccattagcgtggaaatgaagaaggaggatttcgatatctatgacgaagatgagaaccagtctccgcggagctttcagaagaagacgcgacactacttcattgcagcagtcgaaaggctttgggactacggtatgtcatcatcccctcatgtgttgcgcaatagagctcagagtggaagtgttccacagttcaagaaagtcgtctttcaagagtttacagatggcagcttcacacagcctctctatcggggcgagcttaacgaacatttgggactccttggtccctatatccgagccgaagtggaggacaacattatggttacctttaggaatcaagcctctcgcccctacagcttctactcctccctcatcagttatgaggaggatcagagacaaggcgctgaaccacggaagaactttgtgaaaccgaatgagacgaagacctacttctggaaagtacagcaccacatggcccccacaaaagacgaattcgattgcaaagcatgggcgtatttttcagacgttgacttggagaaagatgtacattcaggacttattggtcctttgttggtgtgtcacactaacactctcaatccagcccatggcaggcaggtgacagtccaggaattcgctcttttctttaccatctttgatgagaccaagtcctggtacttcacggaaaacatggagcgcaattgcagagccccctgtaacatacagatggaggaccctacctttaaggaaaattatcggttccacgcaatcaacggatacattatggatacactccctggccttgtgatggctcaggaccaacgaatcaggtggtacctcctcagcatgggttctaatgagaacatacactccattcacttttcaggacatgtgttcactgtccggaagaaagaagagtataagatggccctctacaatttgtatccaggcgtgtttgagaccgttgaaatgcttccctctaaagctggcatctggagagtagagtgcttgatcggagaacatcttcacgcaggtatgagcaccttgttcctcgtgtacagcaacaaatgtcagaatccacttggcatggccagtggacacattcgcgactttcagatcacagcatctggccagtatggacaatgggccccaaagttggctcgcctccattactccggtagcataaatgcgtggtccactaaagaacctttcagctggattaaggtcgatcttcttgcccccatgatcatccacggcattaagacacagggagcgaggcagaaattctcctccctctacatctcacagttcattattatgtatagtttggacggcaagaagtggcaaacttatagaggtaacagtactggaacagacatggtgttcttcggcaacgttgatagctctggcatcaaacacaacatctttaatcctcccataatagctcggtacatcagattgcatccgacccactacagcattaggagtacactccgaatggagcttatgggttgcgacttgaattcctgttcaatgccactcggaatggagtctaaagccatctctgatgcacagataaccgccagtagctactttacgaacatgtttgctacgtggtcaccctctaaggcaaggcttcatttgcaaggccggtctaatgcctggagacctcaggtgaacaacccgaaagaatggctccaggtggactttcagaagaccatgaaagtaacaggtgtcactactcagggagttaagtccttggatactagcatgtatgtgaaggagttccttatttcctcatcacaagatggccaccagtggaccctcttctttcagaatggtaaggtcaaagtgtttcagggcaatcaagacagcttcacacccgtggtgaacagtcttgatcctccactcttgacacgataccttcgaatccatccacagtcttgggagcaccagattgcattgcgcatggaagtacttggatgcgaggctcaggacctctac

SEQ ID NO: 1920 - protein, 1457 aa, synthetic construct
  REGION 1..1457: note = Variant of human B-domain deleted Factor VIII
MQIELSTCFFLCLLRFCFSATRRYYLGAVELSWDYMQSDLGELPVDARFPPRVPKSFPFNTSQVYKKTLFVEFTDHLFNIAKPRPPWMGLLGPTIQAEVYDTVVITLKNMASHPVSLHAVGVSYWKASEGAEYDDQTSQREKEDDKVFPGGSHTYVWQVLKENGPMASDPPCLTYSYLSHVDLVKDLNSGLIGALLVCREGSLAKEKTQTLAKFILLFAVFDEGKSWHSETKNSLMQDRDAASARAWPKMHTVNGYVNRTLPGLIGCHRKSVYWHVIGMGTTPEVHSIFLEGHTFLVRNHRQASLGISPITFLTAQTLLRDLGQFLLFCHIPSHQHDGMEAYVKVDSCPEEPQLRMKNNEEAEDYDDDLTDSEMDVVRFDDDNSPSIIQARSGAKKHPKTWVHYIAAEEEDWDYAPLVLAPDDRSYKSQYLNNGPQRIGRKYKKVRFMAYTDETFKTREAIQHESGILGPLLYGEVGDTLLIIFKNQASRPYNIYPHGITDVRPLYSRRLPKGVKHLKDFPILPGEIFKYKWTITVEDGPTKSDPRCLTRYYSSFVNWERDLASGLIGPLLICYKESVDQRGNQIMSDKRNVILFSVFDENRSWYLTENIQRFLPNPAGVQLEDPEFQASNIMHSINGYVFDSLQLSVCLHEVAYWYILSIGAQTDFLSVFFSGYTFKHKGVYEDTLTLFPFSGETVFMSMENPGLWILGCQNSDFRNRGMTALLKVSSCDWNTGDYYEDSYEDISAYFDSKNNAIEPRSFSQNPPVLKRHQREGTRTTLQSDQEEIDYDDTISVEMKKEDFDIYDEDENQSPRSFQKKTRHYFIAAVERLWDYGMSSSPHVLRNRAQSGSVPQFKKVVFQEFTDGSFTQPLYRGELNEHLGLLGPYIRAEVEDNIMVTFRNQASRPYSFYSSLISYEEDQRQGAEPRKNFVKPNETKTYFWKVQHHMAPTKDEFDCKAWAYFSDVDLEKDVHSGLIGPLLVCHTNTLNPAHGRQVTVQEFALFFTIFDETKSWYFTENMERNCRAPCNIQMEDPTFKENYRFHAINGYIMDTLPGLVMAQDQRIRWYLLSMGSNENIHSIHFSGHVFTVRKKEEYKMALYNLYPGVFETVEMLPSKAGIWRVECLIGEHLHAGMSTLFLVYSNKCQNPLGMASGHIRDFQITASGQYGQWAPKLARLHYSGSINAWSTKEPFSWIKVDLLAPMIIHGIKTQGARQKFSSLYISQFIIMYSLDGKKWQTYRGNSTGTDMVFFGNVDSSGIKHNIFNPPIIARYIRLHPTHYSIRSTLRMELMGCDLNSCSMPLGMESKAISDAQITASSYFTNMFATWSPSKARLHLQGRSNAWRPQVNNPKEWLQVDFQKTMKVTGVTTQGVKSLDTSMYVKEFLISSSQDGHQWTLFFQNGKVKVFQGNQDSFTPVVNSLDPPLLTRYLRIHPQSWEHQIALRMEVLGCEAQDLY

SEQ ID NO: 1921 - DNA, 4371 bp, synthetic construct
  misc_feature 1..4371: note = Variant of human B-domain deleted Factor VIII
  source 1..4371: mol_type = other DNA
atgcagattgaactgtctacctgcttcttcctctgtttgctgaggttctgctttagcgccactagacggtactaccttggcgctgtggagctgtcctgggactatatgcagagtgatttgggagagcttcccgtcgacgcacgatttcctcctcgcgttccaaagtcatttccctttaacacaagccaggtgtacaagaagacgctcttcgtcgaattcaccgatcacctgttcaatatcgccaaacccagaccaccatggatgggtcttttggggcctaccatacaagcggaggtgtatgacacagttgttatcactctcaagaacatggcttctcatccggtaagtcttcacgcagtgggcgtgtcctactggaaagcttcagaaggagccgagtatgatgatcagacatcccagagggagaaagaagacgacaaggtatttccaggtgggtctcatacctatgtgtggcaagtgctcaaagagaatggccctatggcaagcgatccgccgtgtttgacttacagctacctttcacacgttgacctcgtcaaggacctcaactccgggttgattggagccttgttggtatgcagggaaggatctcttgccaaagagaagacacagaccctggccaagtttatccttctctttgctgtgttcgatgagggcaaaagttggcatagcgaaacgaagaattccctcatgcaggatcgcgacgcagccagcgccagagcttggcccaagatgcacactgtgaacggatatgtcaataggacgcttcctggcttgattgggtgtcatcggaaaagtgtctactggcacgtgatcggaatggggacaacaccagaggtccactccatatttctcgaaggccataccttccttgttcgaaaccacagacaggcatccttggggatctctcccattacctttctcactgcccaaacgctccttcgtgacttgggtcagttccttctcttttgccatatcccgtcacaccagcatgatggtatggaagcttatgtgaaagtcgacagttgtcctgaggagccacagttgcgcatgaagaataatgaagaagccgaggattacgacgacgatctcaccgattctgagatggacgtggtgaggtttgatgacgacaactctccctccatcattcaagctcggagcggggcgaagaaacaccccaagacttgggtccactatatagcggcggaagaggaggattgggattacgctcctcttgtattggcaccagatgaccgctcatacaaaagccagtacctcaacaacggaccgcagagaattggccggaagtataagaaagtgcgatttatggcctatacagacgaaacctttaagacaagggaggccatccagcatgagagtgggattttgggacctcttctttacggcgaagttggtgataccctcctcatcatcttcaagaatcaagcttctcgcccctataacatttacccacacgggatcactgacgttaggcctttgtatagcagaagacttcccaaaggcgtgaagcatctcaaagacttccccattttgccaggcgagatctttaagtacaaatggaccattacagtggaagatggaccgactaaatcagaccctcgatgccttacgcggtactattcctccttcgtgaattgggagagagatttggcaagcggactcataggaccactcctcatctgttacaaggaatctgtagaccagaggggtaaccagattatgagtgataaacgcaatgtgatcctttttagcgtcttcgacgagaaccggtcctggtacttgaccgagaatatacaaaggttccttcccaaccccgcaggcgttcagttggaagaccctgagtttcaggccagcaatattatgcactcaatcaacggctatgtgtttgatagtctccagctttctgtttgcctccatgaagtagcctattggtacatcttgtcaattggtgctcaaacagacttcctctccgtcttcttctccggctacacctttaagcacaagggcgtgtatgaggacactctcacactctttccattttctggagaaaccgtgttcatgagcatggagaatccaggcctttggatcttgggttgccacaacagtgattttcgcaatcggggaatgactgctctcctcaaagtcagcagctgtgattggaacacaggcgactattacgaagattcttacgaggacataagtgcctactttgactccaagaataacgccattgagcccagatcattctcccagaatcctcccgtgcttaaaaggcatcagcgcgaaggtaccagaactactcttcagtctgatcaagaggagattgactatgacgacaccattagcgtggaaatgaagaaggaggatttcgatatctattctgaagatgagaaccagtctccgcggagctttcagaagaagacgcgacactacttcattgcagcagtcgaaaggctttgggactacggtatgtcatcatcccctcatgtgttgcgcaatagagctcagagtggaagtgttccacagttcaagaaagtcgtctttcaagagtttacagatggcagcttcacacagcctctctatcggggcgagcttaacgaacatttgggactccttggtccctatatccgagccgaagtggaggacaacattatggttacctttaggaatcaagcctctcgcccctacagcttctactcctccctcatcagttatgaggaggatcagagacaaggcgctgaaccacggaagaactttgtgaaaccgaatgagacgaagacctacttctggaaagtacagcaccacatggcccccacaaaagacgaattcgattgcaaagcatgggcgtatttttcagacgttgacttggagaaagatgtacattcaggacttattggtcctttgttggtgtgtcacactaacactctcaatccagcccatggcaggcaggtgacagtccaggaattcgctcttttctttaccatctttgatgagaccaagtcctggtacttcacggaaaacatggagcgcaattgcagagccccctgtaacatacagatggaggaccctacctttaaggaaaattatcggttccacgcaatcaacggatacattatggatacactccctggccttgtgatggctcaggaccaacgaatcaggtggtacctcctcagcatgggttctaatgagaacatacactccattcacttttcaggacatgtgttcactgtccggaagaaagaagagtataagatggccctctacaatttgtatccaggcgtgtttgagaccgttgaaatgcttccctctaaagctggcatctggagagtagagtgcttgatcggagaacatcttcacgcaggtatgagcaccttgttcctcgtgtacagcaacaaatgtcagaatccacttggcatggccagtggacacattcgcgactttcagatcacagcatctggccagtatggacaatgggccccaaagttggctcgcctccattactccggtagcataaatgcgtggtccactaaagaacctttcagctggattaaggtcgatcttcttgcccccatgatcatccacggcattaagacacagggagcgaggcagaaattctcctccctctacatctcacagttcattattatgtatagtttggacggcaagaagtggcaaacttatagaggtaacagtactggaacagacatggtgttcttcggcaacgttgatagctctggcatcaaacacaacatctttaatcctcccataatagctcggtacatcagattgcatccgacccactacagcattaggagtacactccgaatggagcttatgggttgcgacttgaattcctgttcaatgccactcggaatggagtctaaagccatctctgatgcacagataaccgccagtagctactttacgaacatgtttgctacgtggtcaccctctaaggcaaggcttcatttgcaaggccggtctaatgcctggagacctcaggtgaacaacccgaaagaatggctccaggtggactttcagaagaccatgaaagtaacaggtgtcactactcagggagttaagtccttggatactagcatgtatgtgaaggagttccttatttcctcatcacaagatggccaccagtggaccctcttctttcagaatggtaaggtcaaagtgtttcagggcaatcaagacagcttcacacccgtggtgaacagtcttgatcctccactcttgacacgataccttcgaatccatccacagtcttgggagcaccagattgcattgcgcatggaagtacttggatgcgaggctcaggacctctac

SEQ ID NO: 1922 - protein, 1457 aa, synthetic construct
  REGION 1..1457: note = Variant of human B-domain deleted Factor VIII
MQIELSTCFFLCLLRFCFSATRRYYLGAVELSWDYMQSDLGELPVDARFPPRVPKSFPFNTSQVYKKTLFVEFTDHLFNIAKPRPPWMGLLGPTIQAEVYDTVVITLKNMASHPVSLHAVGVSYWKASEGAEYDDQTSQREKEDDKVFPGGSHTYVWQVLKENGPMASDPPCLTYSYLSHVDLVKDLNSGLIGALLVCREGSLAKEKTQTLAKFILLFAVFDEGKSWHSETKNSLMQDRDAASARAWPKMHTVNGYVNRTLPGLIGCHRKSVYWHVIGMGTTPEVHSIFLEGHTFLVRNHRQASLGISPITFLTAQTLLRDLGQFLLFCHIPSHQHDGMEAYVKVDSCPEEPQLRMKNNEEAEDYDDDLTDSEMDVVRFDDDNSPSIIQARSGAKKHPKTWVHYIAAEEEDWDYAPLVLAPDDRSYKSQYLNNGPQRIGRKYKKVRFMAYTDETFKTREAIQHESGILGPLLYGEVGDTLLIIFKNQASRPYNIYPHGITDVRPLYSRRLPKGVKHLKDFPILPGEIFKYKWTITVEDGPTKSDPRCLTRYYSSFVNWERDLASGLIGPLLICYKESVDQRGNQIMSDKRNVILFSVFDENRSWYLTENIQRFLPNPAGVQLEDPEFQASNIMHSINGYVFDSLQLSVCLHEVAYWYILSIGAQTDFLSVFFSGYTFKHKGVYEDTLTLFPFSGETVFMSMENPGLWILGCHNSDFRNRGMTALLKVSSCDWNTGDYYEDSYEDISAYFDSKNNAIEPRSFSQNPPVLKRHQREGTRTTLQSDQEEIDYDDTISVEMKKEDFDIYSEDENQSPRSFQKKTRHYFIAAVERLWDYGMSSSPHVLRNRAQSGSVPQFKKVVFQEFTDGSFTQPLYRGELNEHLGLLGPYIRAEVEDNIMVTFRNQASRPYSFYSSLISYEEDQRQGAEPRKNFVKPNETKTYFWKVQHHMAPTKDEFDCKAWAYFSDVDLEKDVHSGLIGPLLVCHTNTLNPAHGRQVTVQEFALFFTIFDETKSWYFTENMERNCRAPCNIQMEDPTFKENYRFHAINGYIMDTLPGLVMAQDQRIRWYLLSMGSNENIHSIHFSGHVFTVRKKEEYKMALYNLYPGVFETVEMLPSKAGIWRVECLIGEHLHAGMSTLFLVYSNKCQNPLGMASGHIRDFQITASGQYGQWAPKLARLHYSGSINAWSTKEPFSWIKVDLLAPMIIHGIKTQGARQKFSSLYISQFIIMYSLDGKKWQTYRGNSTGTDMVFFGNVDSSGIKHNIFNPPIIARYIRLHPTHYSIRSTLRMELMGCDLNSCSMPLGMESKAISDAQITASSYFTNMFATWSPSKARLHLQGRSNAWRPQVNNPKEWLQVDFQKTMKVTGVTTQGVKSLDTSMYVKEFLISSSQDGHQWTLFFQNGKVKVFQGNQDSFTPVVNSLDPPLLTRYLRIHPQSWEHQIALRMEVLGCEAQDLY

SEQ ID NO: 1923 - DNA, 4371 bp, synthetic construct
  misc_feature 1..4371: note = Variant of human B-domain deleted Factor VIII
  source 1..4371: mol_type = other DNA
atgcagattgaactgtctacctgcttcttcctctgtttgctgaggttctgctttagcgccactagacggtactaccttggcgctgtggagctgtcctgggactatatgcagagtgatttgggagagcttcccgtcgacgcacgatttcctcctcgcgttccaaagtcatttccctttaacacaagccaggtgtacaagaagacgctcttcgtcgaattcaccgatcacctgttcaatatcgccaaacccagaccaccatggatgggtcttttggggcctaccatacaagcggaggtgtatgacacagttgttatcactctcaagaacatggcttctcatccggtaagtcttcacgcagtgggcgtgtcctactggaaagcttcagaaggagccgagtatgatgatcagacatcccagagggagaaagaagacgacaaggtatttccaggtgggtctcatacctatgtgtggcaagtgctcaaagagaatggccctatggcaagcgatccgccgtgtttgacttacagctacctttcacacgttgacctcgtcaaggacctcaactccgggttgattggagccttgttggtatgcagggaaggatctcttgccaaagagaagacacagaccctggccaagtttatccttctctttgctgtgttcgatgagggcaaaagttggcatagcgaaacgaagaattccctcatgcaggatcgcgacgcagccagcgccagagcttggcccaagatgcacactgtgaacggatatgtcaataggacgcttcctggcttgattgggtgtcatcggaaaagtgtctactggcacgtgatcggaatggggacaacaccagaggtccactccatatttctcgaaggccataccttccttgttcgaaaccacagacaggcatccttggggatctctcccattacctttctcactgcccaaacgctccttcgtgacttgggtcagttccttctcttttgccatatcccgtcacaccagcatgatggtatggaagcttatgtgaaagtcgacagttgtcctgaggagccacagttgcgcatgaagaataatgaagaagccgaggattacgacgacgatctcaccgattctgagatggacgtggtgaggtttgatgacgacaactctccctccatcattcaagctcggagcggggcgaagaaacaccccaagacttgggtccactatatagcggcggaagaggaggattgggattacgctcctcttgtattggcaccagatgaccgctcatacaaaagccagtacctcaacaacggaccgcagagaattggccggaagtataagaaagtgcgatttatggcctatacagacgaaacctttaagacaagggaggccatccagcatgagagtgggattttgggacctcttctttacggcgaagttggtgataccctcctcatcatcttcaagaatcaagcttctcgcccctataacatttacccacacgggatcactgacgttaggcctttgtatagcagaagacttcccaaaggcgtgaagcatctcaaagacttccccattttgccaggcgagatctttaagtacaaatggaccattacagtggaagatggaccgactaaatcagaccctcgatgccttacgcggtactattcctccttcgtgaattgggagagagatttggcaagcggactcataggaccactcctcatctgttacaaggaatctgtagaccagaggggtaaccagattatgagtgataaacgcaatgtgatcctttttagcgtcttcgacgagaaccggtcctggtacttgaccgagaatatacaaaggttccttcccaaccccgcaggcgttcagttggaagaccctgagtttcaggccagcaatattatgcactcaatcaacggctatgtgtttgatagtctccagctttctgtttgcctccatgaagtagcctattggtacatcttgtcaattggtgctcaaacagacttcctctccgtcttcttctccggctacacctttaagcacaagggcgtgtatgaggacactctcacactctttccattttctggagaaaccgtgttcatgagcatggagaatccaggcctttggatcttgggttgcggtaacagtgattttcgcaatcggggaatgactgctctcctcaaagtcagcagctgtgattggaacacaggcgactattacgaagattcttacgaggacataagtgcctactttgactccaagaataacgccattgagcccagatcattctcccagaatcctcccgtgcttaaaaggcatcagcgcgaaggtaccagaactactcttcagtctgatcaagaggagattgactatgacgacaccattagcgtggaaatgaagaaggaggatttcgatatctatgacgaagatgagaaccagtctccgcggagctttcagaagaagacgcgacactacttcattgcagcagtcgaaaggctttgggactacggtatgtcatcatcccctcatgtgttgcgcaatagagctcagagtggaagtgttccacagttcaagaaagtcgtctttcaagagtttacagatggcagcttcacacagcctctctatcggggcgagcttaacgaacatttgggactccttggtccctatatccgagccgaagtggaggacaacattatggttacctttaggaatcaagcctctcgcccctacagcttctactcctccctcatcagttatgaggaggatcagagacaaggcgctgaaccacggaagaactttgtgaaaccgaatgagacgaagacctacttctggaaagtacagcaccacatggcccccacaaaagacgaattcgattgcaaagcatgggcgtatttttcagacgttgacttggagaaagatgtacattcaggacttattggtcctttgttggtgtgtcacactaacactctcaatccagcccatggcaggcaggtgacagtccaggaattcgctcttttctttaccatctttgatgagaccaagtcctggtacttcacggaaaacatggagcgcaattgcagagccccctgtaacatacagatggaggaccctacctttaaggaaaattatcggttccacgcaatcaacggatacattatggatacactccctggccttgtgatggctcaggaccaacgaatcaggtggtacctcctcagcatgggttctaatgagaacatacactccattcacttttcaggacatgtgttcactgtccggaagaaagaagagtataagatggccctctacaatttgtatccaggcgtgtttgagaccgttgaaatgcttccctctaaagctggcatctggagagtagagtgcttgatcggagaacatcttcacgcaggtatgagcaccttgttcctcgtgtacagcaacaaatgtcagaatccacttggcatggccagtggacacattcgcgactttcagatcacagcatctggccagtatggacaatgggccccaaagttggctcgcctccattactccggtagcataaatgcgtggtccactaaagaacctttcagctggattaaggtcgatcttcttgcccccatgatcatccacggcattaagacacagggagcgaggcagaaattctcctccctctacatctcacagttcattattatgtatagtttggacggcaagaagtggcaaacttatagaggtaacagtactggaacagacatggtgttcttcggcaacgttgatagctctggcatcaaacacaacatctttaatcctcccataatagctcggtacatcagattgcatccgacccactacagcattaggagtacactccgaatggagcttatgggttgcgacttgaattcctgttcaatgccactcggaatggagtctaaagccatctctgatgcacagataaccgccagtagctactttacgaacatgtttgctacgtggtcaccctctaaggcaaggcttcatttgcaaggccggtctaatgcctggagacctcaggtgaacaacccgaaagaatggctccaggtggactttcagaagaccatgaaagtaacaggtgtcactactcagggagttaagtccttggatactagcatgtatgtgaaggagttccttatttcctcatcacaagatggccaccagtggaccctcttctttcagaatggtaaggtcaaagtgtttcagggcaatcaagacagcttcacacccgtggtgaacagtcttgatcctccactcttgacacgataccttcgaatccatccacagtcttgggagcaccagattgcattgcgcatggaagtacttggatgcgaggctcaggacctctac

SEQ ID NO: 1924 - protein, 1457 aa, synthetic construct
  REGION 1..1457: note = Variant of human B-domain deleted Factor VIII
MQIELSTCFFLCLLRFCFSATRRYYLGAVELSWDYMQSDLGELPVDARFPPRVPKSFPFNTSQVYKKTLFVEFTDHLFNIAKPRPPWMGLLGPTIQAEVYDTVVITLKNMASHPVSLHAVGVSYWKASEGAEYDDQTSQREKEDDKVFPGGSHTYVWQVLKENGPMASDPPCLTYSYLSHVDLVKDLNSGLIGALLVCREGSLAKEKTQTLAKFILLFAVFDEGKSWHSETKNSLMQDRDAASARAWPKMHTVNGYVNRTLPGLIGCHRKSVYWHVIGMGTTPEVHSIFLEGHTFLVRNHRQASLGISPITFLTAQTLLRDLGQFLLFCHIPSHQHDGMEAYVKVDSCPEEPQLRMKNNEEAEDYDDDLTDSEMDVVRFDDDNSPSIIQARSGAKKHPKTWVHYIAAEEEDWDYAPLVLAPDDRSYKSQYLNNGPQRIGRKYKKVRFMAYTDETFKTREAIQHESGILGPLLYGEVGDTLLIIFKNQASRPYNIYPHGITDVRPLYSRRLPKGVKHLKDFPILPGEIFKYKWTITVEDGPTKSDPRCLTRYYSSFVNWERDLASGLIGPLLICYKESVDQRGNQIMSDKRNVILFSVFDENRSWYLTENIQRFLPNPAGVQLEDPEFQASNIMHSINGYVFDSLQLSVCLHEVAYWYILSIGAQTDFLSVFFSGYTFKHKGVYEDTLTLFPFSGETVFMSMENPGLWILGCGNSDFRNRGMTALLKVSSCDWNTGDYYEDSYEDISAYFDSKNNAIEPRSFSQNPPVLKRHQREGTRTTLQSDQEEIDYDDTISVEMKKEDFDIYDEDENQSPRSFQKKTRHYFIAAVERLWDYGMSSSPHVLRNRAQSGSVPQFKKVVFQEFTDGSFTQPLYRGELNEHLGLLGPYIRAEVEDNIMVTFRNQASRPYSFYSSLISYEEDQRQGAEPRKNFVKPNETKTYFWKVQHHMAPTKDEFDCKAWAYFSDVDLEKDVHSGLIGPLLVCHTNTLNPAHGRQVTVQEFALFFTIFDETKSWYFTENMERNCRAPCNIQMEDPTFKENYRFHAINGYIMDTLPGLVMAQDQRIRWYLLSMGSNENIHSIHFSGHVFTVRKKEEYKMALYNLYPGVFETVEMLPSKAGIWRVECLIGEHLHAGMSTLFLVYSNKCQNPLGMASGHIRDFQITASGQYGQWAPKLARLHYSGSINAWSTKEPFSWIKVDLLAPMIIHGIKTQGARQKFSSLYISQFIIMYSLDGKKWQTYRGNSTGTDMVFFGNVDSSGIKHNIFNPPIIARYIRLHPTHYSIRSTLRMELMGCDLNSCSMPLGMESKAISDAQITASSYFTNMFATWSPSKARLHLQGRSNAWRPQVNNPKEWLQVDFQKTMKVTGVTTQGVKSLDTSMYVKEFLISSSQDGHQWTLFFQNGKVKVFQGNQDSFTPVVNSLDPPLLTRYLRIHPQSWEHQIALRMEVLGCEAQDLY

SEQ ID NO: 1925 - DNA, 4371 bp, synthetic construct
  misc_feature 1..4371: note = Variant of human B-domain deleted Factor VIII
  source 1..4371: mol_type = other DNA
atgcagattgaactgtctacctgcttcttcctctgtttgctgaggttctgctttagcgccactagacggtactaccttggcgctgtggagctgtcctgggactatatgcagagtgatttgggagagcttcccgtcgacgcacgatttcctcctcgcgttccaaagtcatttccctttaacacaagccaggtgtacaagaagacgctcttcgtcgaattcaccgatcacctgttcaatatcgccaaacccagaccaccatggatgggtcttttggggcctaccatacaagcggaggtgtatgacacagttgttatcactctcaagaacatggcttctcatccggtaagtcttcacgcagtgggcgtgtcctactggaaagcttcagaaggagccgagtatgatgatcagacatcccagagggagaaagaagacgacaaggtatttccaggtgggtctcatacctatgtgtggcaagtgctcaaagagaatggccctatggcaagcgatccgccgtgtttgacttacagctacctttcacacgttgacctcgtcaaggacctcaactccgggttgattggagccttgttggtatgcagggaaggatctcttgccaaagagaagacacagaccctggccaagtttatccttctctttgctgtgttcgatgagggcaaaagttggcatagcgaaacgaagaattccctcatgcaggatcgcgacgcagccagcgccagagcttggcccaagatgcacactgtgaacggatatgtcaataggacgcttcctggcttgattgggtgtcatcggaaaagtgtctactggcacgtgatcggaatggggacaacaccagaggtccactccatatttctcgaaggccataccttccttgttcgaaaccacagacaggcatccttggggatctctcccattacctttctcactgcccaaacgctccttcgtgacttgggtcagttccttctcttttgccatatcccgtcacaccagcatgatggtatggaagcttatgtgaaagtcgacagttgtcctgaggagccacagttgcgcatgaagaataatgaagaagccgaggattacgacgacgatctcaccgattctgagatggacgtggtgaggtttgatgacgacaactctccctccatcattcaagctcggagcggggcgaagaaacaccccaagacttgggtccactatatagcggcggaagaggaggattgggattacgctcctcttgtattggcaccagatgaccgctcatacaaaagccagtacctcaacaacggaccgcagagaattggccggaagtataagaaagtgcgatttatggcctatacagacgaaacctttaagacaagggaggccatccagcatgagagtgggattttgggacctcttctttacggcgaagttggtgataccctcctcatcatcttcaagaatcaagcttctcgcccctataacatttacccacacgggatcactgacgttaggcctttgtatagcagaagacttcccaaaggcgtgaagcatctcaaagacttccccattttgccaggcgagatctttaagtacaaatggaccattacagtggaagatggaccgactaaatcagaccctcgatgccttacgcggtactattcctccttcgtgaattgggagagagatttggcaagcggactcataggaccactcctcatctgttacaaggaatctgtagaccagaggggtaaccagattatgagtgataaacgcaatgtgatcctttttagcgtcttcgacgagaaccggtcctggtacttgaccgagaatatacaaaggttccttcccaaccccgcaggcgttcagttggaagaccctgagtttcaggccagcaatattatgcactcaatcaacggctatgtgtttgatagtctccagctttctgtttgcctccatgaagtagcctattggtacatcttgtcaattggtgctcaaacagacttcctctccgtcttcttctccggctacacctttaagcacaagggcgtgtatgaggacactctcacactctttccattttctggagaaaccgtgttcatgagcatggagaatccaggcctttggatcttgggttgccacaacagtgattttcgcaatcggggaatgactgctctcctcaaagtcagcagctgtgattggaacacaggcgactattacgaagattcttacgaggacataagtgcctactttgactccaagaataacgccattgagcccagatcattctcccagaatcctcccgtgcttaaaaggcatcagcgcgaaggtaccagaactactcttcagtctgatcaagaggagattgactatggggacaccattagcgtggaaatgaagaaggaggatttcgatatctatgacgaagatgagaaccagtctccgcggagctttcagaagaagacgcgacactacttcattgcagcagtcgaaaggctttgggactacggtatgtcatcatcccctcatgtgttgcgcaatagagctcagagtggaagtgttccacagttcaagaaagtcgtctttcaagagtttacagatggcagcttcacacagcctctctatcggggcgagcttaacgaacatttgggactccttggtccctatatccgagccgaagtggaggacaacattatggttacctttaggaatcaagcctctcgcccctacagcttctactcctccctcatcagttatgaggaggatcagagacaaggcgctgaaccacggaagaactttgtgaaaccgaatgagacgaagacctacttctggaaagtacagcaccacatggcccccacaaaagacgaattcgattgcaaagcatgggcgtatttttcagacgttgacttggagaaagatgtacattcaggacttattggtcctttgttggtgtgtcacactaacactctcaatccagcccatggcaggcaggtgacagtccaggaattcgctcttttctttaccatctttgatgagaccaagtcctggtacttcacggaaaacatggagcgcaattgcagagccccctgtaacatacagatggaggaccctacctttaaggaaaattatcggttccacgcaatcaacggatacattatggatacactccctggccttgtgatggctcaggaccaacgaatcaggtggtacctcctcagcatgggttctaatgagaacatacactccattcacttttcaggacatgtgttcactgtccggaagaaagaagagtataagatggccctctacaatttgtatccaggcgtgtttgagaccgttgaaatgcttccctctaaagctggcatctggagagtagagtgcttgatcggagaacatcttcacgcaggtatgagcaccttgttcctcgtgtacagcaacaaatgtcagaatccacttggcatggccagtggacacattcgcgactttcagatcacagcatctggccagtatggacaatgggccccaaagttggctcgcctccattactccggtagcataaatgcgtggtccactaaagaacctttcagctggattaaggtcgatcttcttgcccccatgatcatccacggcattaagacacagggagcgaggcagaaattctcctccctctacatctcacagttcattattatgtatagtttggacggcaagaagtggcaaacttatagaggtaacagtactggaacagacatggtgttcttcggcaacgttgatagctctggcatcaaacacaacatctttaatcctcccataatagctcggtacatcagattgcatccgacccactacagcattaggagtacactccgaatggagcttatgggttgcgacttgaattcctgttcaatgccactcggaatggagtctaaagccatctctgatgcacagataaccgccagtagctactttacgaacatgtttgctacgtggtcaccctctaaggcaaggcttcatttgcaaggccggtctaatgcctggagacctcaggtgaacaacccgaaagaatggctccaggtggactttcagaagaccatgaaagtaacaggtgtcactactcagggagttaagtccttggatactagcatgtatgtgaaggagttccttatttcctcatcacaagatggccaccagtggaccctcttctttcagaatggtaaggtcaaagtgtttcagggcaatcaagacagcttcacacccgtggtgaacagtcttgatcctccactcttgacacgataccttcgaatccatccacagtcttgggagcaccagattgcattgcgcatggaagtacttggatgcgaggctcaggacctctac

SEQ ID NO: 1926 - protein, 1457 aa, synthetic construct
  REGION 1..1457: note = Variant of human B-domain deleted Factor VIII
MQIELSTCFFLCLLRFCFSATRRYYLGAVELSWDYMQSDLGELPVDARFPPRVPKSFPFNTSQVYKKTLFVEFTDHLFNIAKPRPPWMGLLGPTIQAEVYDTVVITLKNMASHPVSLHAVGVSYWKASEGAEYDDQTSQREKEDDKVFPGGSHTYVWQVLKENGPMASDPPCLTYSYLSHVDLVKDLNSGLIGALLVCREGSLAKEKTQTLAKFILLFAVFDEGKSWHSETKNSLMQDRDAASARAWPKMHTVNGYVNRTLPGLIGCHRKSVYWHVIGMGTTPEVHSIFLEGHTFLVRNHRQASLGISPITFLTAQTLLRDLGQFLLFCHIPSHQHDGMEAYVKVDSCPEEPQLRMKNNEEAEDYDDDLTDSEMDVVRFDDDNSPSIIQARSGAKKHPKTWVHYIAAEEEDWDYAPLVLAPDDRSYKSQYLNNGPQRIGRKYKKVRFMAYTDETFKTREAIQHESGILGPLLYGEVGDTLLIIFKNQASRPYNIYPHGITDVRPLYSRRLPKGVKHLKDFPILPGEIFKYKWTITVEDGPTKSDPRCLTRYYSSFVNWERDLASGLIGPLLICYKESVDQRGNQIMSDKRNVILFSVFDENRSWYLTENIQRFLPNPAGVQLEDPEFQASNIMHSINGYVFDSLQLSVCLHEVAYWYILSIGAQTDFLSVFFSGYTFKHKGVYEDTLTLFPFSGETVFMSMENPGLWILGCHNSDFRNRGMTALLKVSSCDWNTGDYYEDSYEDISAYFDSKNNAIEPRSFSQNPPVLKRHQREGTRTTLQSDQEEIDYGDTISVEMKKEDFDIYDEDENQSPRSFQKKTRHYFIAAVERLWDYGMSSSPHVLRNRAQSGSVPQFKKVVFQEFTDGSFTQPLYRGELNEHLGLLGPYIRAEVEDNIMVTFRNQASRPYSFYSSLISYEEDQRQGAEPRKNFVKPNETKTYFWKVQHHMAPTKDEFDCKAWAYFSDVDLEKDVHSGLIGPLLVCHTNTLNPAHGRQVTVQEFALFFTIFDETKSWYFTENMERNCRAPCNIQMEDPTFKENYRFHAINGYIMDTLPGLVMAQDQRIRWYLLSMGSNENIHSIHFSGHVFTVRKKEEYKMALYNLYPGVFETVEMLPSKAGIWRVECLIGEHLHAGMSTLFLVYSNKCQNPLGMASGHIRDFQITASGQYGQWAPKLARLHYSGSINAWSTKEPFSWIKVDLLAPMIIHGIKTQGARQKFSSLYISQFIIMYSLDGKKWQTYRGNSTGTDMVFFGNVDSSGIKHNIFNPPIIARYIRLHPTHYSIRSTLRMELMGCDLNSCSMPLGMESKAISDAQITASSYFTNMFATWSPSKARLHLQGRSNAWRPQVNNPKEWLQVDFQKTMKVTGVTTQGVKSLDTSMYVKEFLISSSQDGHQWTLFFQNGKVKVFQGNQDSFTPVVNSLDPPLLTRYLRIHPQSWEHQIALRMEVLGCEAQDLY

SEQ ID NO: 1927 - DNA, 4371 bp, synthetic construct
  misc_feature 1..4371: note = Variant of human B-domain deleted Factor VIII
  source 1..4371: mol_type = other DNA
atgcagattgaactgtctacctgcttcttcctctgtttgctgaggttctgctttagcgccactagacggtactaccttggcgctgtggagctgtcctgggactatatgcagagtgatttgggagagcttcccgtcgacgcacgatttcctcctcgcgttccaaagtcatttccctttaacacaagccaggtgtacaagaagacgctcttcgtcgaattcaccgatcacctgttcaatatcgccaaacccagaccaccatggatgggtcttttggggcctaccatacaagcggaggtgtatgacacagttgttatcactctcaagaacatggcttctcatccggtaagtcttcacgcagtgggcgtgtcctactggaaagcttcagaaggagccgagtatgatgatcagacatcccagagggagaaagaagacgacaaggtatttccaggtgggtctcatacctatgtgtggcaagtgctcaaagagaatggccctatggcaagcgatccgccgtgtttgacttacagctacctttcacacgttgacctcgtcaaggacctcaactccgggttgattggagccttgttggtatgcagggaaggatctcttgccaaagagaagacacagaccctggccaagtttatccttctctttgctgtgttcgatgagggcaaaagttggcatagcgaaacgaagaattccctcatgcaggatcgcgacgcagccagcgccagagcttggcccaagatgcacactgtgaacggatatgtcaataggacgcttcctggcttgattgggtgtcatcggaaaagtgtctactggcacgtgatcggaatggggacaacaccagaggtccactccatatttctcgaaggccataccttccttgttcgaaaccacagacaggcatccttggggatctctcccattacctttctcactgcccaaacgctccttcgtgacttgggtcagttccttctcttttgccatatcccgtcacaccagcatgatggtatggaagcttatgtgaaagtcgacagttgtcctgaggagccacagttgcgcatgaagaataatgaagaagccgaggattacgacgacgatctcaccgattctgagatggacgtggtgaggtttgatgacgacaactctccctccatcattcaagctcggagcggggcgaagaaacaccccaagacttgggtccactatatagcggcggaagaggaggattgggattacgctcctcttgtattggcaccagatgaccgctcatacaaaagccagtacctcaacaacggaccgcagagaattggccggaagtataagaaagtgcgatttatggcctatacagacgaaacctttaagacaagggaggccatccagcatgagagtgggattttgggacctcttctttacggcgaagttggtgataccctcctcatcatcttcaagaatcaagcttctcgcccctataacatttacccacacgggatcactgacgttaggcctttgtatagcagaagacttcccaaaggcgtgaagcatctcaaagacttccccattttgccaggcgagatctttaagtacaaatggaccattacagtggaagatggaccgactaaatcagaccctcgatgccttacgcggtactattcctccttcgtgaattgggagagagatttggcaagcggactcataggaccactcctcatctgttacaaggaatctgtagaccagaggggtaaccagattatgagtgataaacgcaatgtgatcctttttagcgtcttcgacgagaaccggtcctggtacttgaccgagaatatacaaaggttccttcccaaccccgcaggcgttcagttggaagaccctgagtttcaggccagcaatattatgcactcaatcaacggctatgtgtttgatagtctccagctttctgtttgcctccatgaagtagcctattggtacatcttgtcaattggtgctcaaacagacttcctctccgtcttcttctccggctacacctttaagcacaagggcgtgtatgaggacactctcacactctttccattttctggagaaaccgtgttcatgagcatggagaatccaggcctttggatcttgggttgccacaacagtgattttcgcaatcggggaatgactgctctcctcaaagtcagcagctgtgattggaacacaggcgactattacgaagattcttacgaggacataagtgcctactttgactccaagaataacgccattgagcccagatcattctcccagaatcctcccgtgcttaaaaggcatcagcgcgaaggtaccagaactactcttcagtctgatcaagaggagattgactatgacgacaccattagcgtggaaatgaagaaggaggatttcgatatctatgacgaagatgagaaccagtctccgcggagctttcagaagaagacgcgacactacttcattgcagcagtcgaaaggctttgggactacggtatgtcatcatcccctcatgtgttgcgcaatagagctcagagtggaagtgttccacagttcaagaaagtcgtctttcaagagtttacagatggcagcttcacacagcctctctatcggggcgagcttaacgaacatttgggactccttggtccctatatccgagccgaagtggaggacaacattatggttacctttaggaatcaagcctctcgcccctacagcttctactcctccctcatcagttatgaggaggatcagagacaaggcgctgaaccacggaagaactttgtgaaaccgaatgagacgaagacctacttctggaaagtacagcaccacatggcccccacaaaagacgaattcgattgcaaagcatgggcgtatttttcagacgttgacttggagaaagatgtacattcaggacttattggtcctttgttggtgtgtcacactaacactctcaatccagcccatggcaggcaggtgacagtccaggaattcgctcttttctttaccatctttgatgagaccaagtcctggtacttcacggaaaacatggagcgcaattgcagagccccctgtaacatacagatggaggaccctacctttaaggaaaattatcggttccacgcaatcaacggatacattatggatacactccctggccttgtgatggctcaggaccaacgaatcaggtggtacctcctcagcatgggttctaatgagaacatacactccattcacttttcaggacatgtgttcactgtccggaagaaagaagagtataagatggccctctacaatttgtatccaggcgtggtggagaccgttgaaatgcttccctctaaagctggcatctggagagtagagtgcttgatcggagaacatcttcacgcaggtatgagcaccttgttcctcgtgtacagcaacaaatgtcagaatccacttggcatggccagtggacacattcgcgactttcagatcacagcatctggccagtatggacaatgggccccaaagttggctcgcctccattactccggtagcataaatgcgtggtccactaaagaacctttcagctggattaaggtcgatcttcttgcccccatgatcatccacggcattaagacacagggagcgaggcagaaattctcctccctctacatctcacagttcattattatgtatagtttggacggcaagaagtggcaaacttatagaggtaacagtactggaacagacatggtgttcttcggcaacgttgatagctctggcatcaaacacaacatctttaatcctcccataatagctcggtacatcagattgcatccgacccactacagcattaggagtacactccgaatggagcttatgggttgcgacttgaattcctgttcaatgccactcggaatggagtctaaagccatctctgatgcacagataaccgccagtagctactttacgaacatgtttgctacgtggtcaccctctaaggcaaggcttcatttgcaaggccggtctaatgcctggagacctcaggtgaacaacccgaaagaatggctccaggtggactttcagaagaccatgaaagtaacaggtgtcactactcagggagttaagtccttggatactagcatgtatgtgaaggagttccttatttcctcatcacaagatggccaccagtggaccctcttctttcagaatggtaaggtcaaagtgtttcagggcaatcaagacagcttcacacccgtggtgaacagtcttgatcctccactcttgacacgataccttcgaatccatccacagtcttgggagcaccagattgcattgcgcatggaagtacttggatgcgaggctcaggacctctac

SEQ ID NO: 1928 - protein, 1457 aa, synthetic construct
  REGION 1..1457: note = Variant of human B-domain deleted Factor VIII
MQIELSTCFFLCLLRFCFSATRRYYLGAVELSWDYMQSDLGELPVDARFPPRVPKSFPFNTSQVYKKTLFVEFTDHLFNIAKPRPPWMGLLGPTIQAEVYDTVVITLKNMASHPVSLHAVGVSYWKASEGAEYDDQTSQREKEDDKVFPGGSHTYVWQVLKENGPMASDPPCLTYSYLSHVDLVKDLNSGLIGALLVCREGSLAKEKTQTLAKFILLFAVFDEGKSWHSETKNSLMQDRDAASARAWPKMHTVNGYVNRTLPGLIGCHRKSVYWHVIGMGTTPEVHSIFLEGHTFLVRNHRQASLGISPITFLTAQTLLRDLGQFLLFCHIPSHQHDGMEAYVKVDSCPEEPQLRMKNNEEAEDYDDDLTDSEMDVVRFDDDNSPSIIQARSGAKKHPKTWVHYIAAEEEDWDYAPLVLAPDDRSYKSQYLNNGPQRIGRKYKKVRFMAYTDETFKTREAIQHESGILGPLLYGEVGDTLLIIFKNQASRPYNIYPHGITDVRPLYSRRLPKGVKHLKDFPILPGEIFKYKWTITVEDGPTKSDPRCLTRYYSSFVNWERDLASGLIGPLLICYKESVDQRGNQIMSDKRNVILFSVFDENRSWYLTENIQRFLPNPAGVQLEDPEFQASNIMHSINGYVFDSLQLSVCLHEVAYWYILSIGAQTDFLSVFFSGYTFKHKGVYEDTLTLFPFSGETVFMSMENPGLWILGCHNSDFRNRGMTALLKVSSCDWNTGDYYEDSYEDISAYFDSKNNAIEPRSFSQNPPVLKRHQREGTRTTLQSDQEEIDYDDTISVEMKKEDFDIYDEDENQSPRSFQKKTRHYFIAAVERLWDYGMSSSPHVLRNRAQSGSVPQFKKVVFQEFTDGSFTQPLYRGELNEHLGLLGPYIRAEVEDNIMVTFRNQASRPYSFYSSLISYEEDQRQGAEPRKNFVKPNETKTYFWKVQHHMAPTKDEFDCKAWAYFSDVDLEKDVHSGLIGPLLVCHTNTLNPAHGRQVTVQEFALFFTIFDETKSWYFTENMERNCRAPCNIQMEDPTFKENYRFHAINGYIMDTLPGLVMAQDQRIRWYLLSMGSNENIHSIHFSGHVFTVRKKEEYKMALYNLYPGVVETVEMLPSKAGIWRVECLIGEHLHAGMSTLFLVYSNKCQNPLGMASGHIRDFQITASGQYGQWAPKLARLHYSGSINAWSTKEPFSWIKVDLLAPMIIHGIKTQGARQKFSSLYISQFIIMYSLDGKKWQTYRGNSTGTDMVFFGNVDSSGIKHNIFNPPIIARYIRLHPTHYSIRSTLRMELMGCDLNSCSMPLGMESKAISDAQITASSYFTNMFATWSPSKARLHLQGRSNAWRPQVNNPKEWLQVDFQKTMKVTGVTTQGVKSLDTSMYVKEFLISSSQDGHQWTLFFQNGKVKVFQGNQDSFTPVVNSLDPPLLTRYLRIHPQSWEHQIALRMEVLGCEAQDLY

SEQ ID NO: 1929 - DNA, 4371 bp, synthetic construct
  misc_feature 1..4371: note = Variant of human B-domain deleted Factor VIII
  source 1..4371: mol_type = other DNA
atgcagattgaactgtctacctgcttcttcctctgtttgctgaggttctgctttagcgccactagacggtactaccttggcgctgtggagctgtcctgggactatatgcagagtgatttgggagagcttcccgtcgacgcacgatttcctcctcgcgttccaaagtcatttccctttaacacaagccaggtgtacaagaagacgctcttcgtcgaattcaccgatcacctgttcaatatcgccaaacccagaccaccatggatgggtcttttggggcctaccatacaagcggaggtgtatgacacagttgttatcactctcaagaacatggcttctcatccggtaagtcttcacgcagtgggcgtgtcctactggaaagcttcagaaggagccgagtatgatgatcagacatcccagagggagaaagaagacgacaaggtatttccaggtgggtctcatacctatgtgtggcaagtgctcaaagagaatggccctatggcaagcgatccgccgtgtttgacttacagctacctttcacacgttgacctcgtcaaggacctcaactccgggttgattggagccttgttggtatgcagggaaggatctcttgccaaagagaagacacagaccctggccaagtttatccttctctttgctgtgttcgatgagggcaaaagttggcatagcgaaacgaagaattccctcatgcaggatcgcgacgcagccagcgccagagcttggcccaagatgcacactgtgaacggatatgtcaataggacgcttcctggcttgattgggtgtcatcggaaaagtgtctactggcacgtgatcggaatggggacaacaccagaggtccactccatatttctcgaaggccataccttccttgttcgaaaccacagacaggcatccttggggatctctcccattacctttctcactgcccaaacgctccttcgtgacttgggtcagttccttctcttttgccatatcccgtcacaccagcatgatggtatggaagcttatgtgaaagtcgacagttgtcctgaggagccacagttgcgcatgaagaataatgaagaagccgaggattacgacgacgatctcaccgattctgagatggacgtggtgaggtttgatgacgacaactctccctccatcattcaagctcggagcggggcgaagaaacaccccaagacttgggtccactatatagcggcggaagaggaggattgggattacgctcctcttgtattggcaccagatgaccgctcatacaaaagccagtacctcaacaacggaccgcagagaattggccggaagtataagaaagtgcgatttatggcctatacagacgaaacctttaagacaagggaggccatccagcatgagagtgggattttgggacctcttctttacggcgaagttggtgataccctcctcatcatcttcaagaatcaagcttctcgcccctataacatttacccacacgggatcactgacgttaggcctttgtatagcagaagacttcccaaaggcgtgaagcatctcaaagacttccccattttgccaggcgagatctttaagtacaaatggaccattacagtggaagatggaccgactaaatcagaccctcgatgccttacgcggtactattcctccttcgtgaattgggagagagatttggcaagcggactcataggaccactcctcatctgttacaaggaatctgtagaccagaggggtaaccagattatgagtgataaacgcaatgtgatcctttttagcgtcttcgacgagaaccggtcctggtacttgaccgagaatatacaaaggttccttcccaaccccgcaggcgttcagttggaagaccctgagtttcaggccagcaatattatgcactcaatcaacggctatgtgtttgatagtctccagctttctgtttgcctccatgaagtagcctattggtacatcttgtcaattggtgctcaaacagacttcctctccgtcttcttctccggctacacctttaagcacaagggcgtgtatgaggacactctcacactctttccattttctggagaaaccgtgttcatgagcatggagaatccaggcctttggatcttgggttgccacaacagtgattttcgcaatcggggaatgactgctctcctcaaagtcagcagctgtctgtggaacacaggcgactattacgaagattcttacgaggacataagtgcctactttgactccaagaataacgccattgagcccagatcattctcccagaatcctcccgtgcttaaaaggcatcagcgcgaaggtaccagaactactcttcagtctgatcaagaggagattgactatgacgacaccattagcgtggaaatgaagaaggaggatttcgatatctatgacgaagatgagaaccagtctccgcggagctttcagaagaagacgcgacactacttcattgcagcagtcgaaaggctttgggactacggtatgtcatcatcccctcatgtgttgcgcaatagagctcagagtggaagtgttccacagttcaagaaagtcgtctttcaagagtttacagatggcagcttcacacagcctctctatcggggcgagcttaacgaacatttgggactccttggtccctatatccgagccgaagtggaggacaacattatggttacctttaggaatcaagcctctcgcccctacagcttctactcctccctcatcagttatgaggaggatcagagacaaggcgctgaaccacggaagaactttgtgaaaccgaatgagacgaagacctacttctggaaagtacagcaccacatggcccccacaaaagacgaattcgattgcaaagcatgggcgtatttttcagacgttgacttggagaaagatgtacattcaggacttattggtcctttgttggtgtgtcacactaacactctcaatccagcccatggcaggcaggtgacagtccaggaattcgctcttttctttaccatctttgatgagaccaagtcctggtacttcacggaaaacatggagcgcaattgcagagccccctgtaacatacagatggaggaccctacctttaaggaaaattatcggttccacgcaatcaacggatacattatggatacactccctggccttgtgatggctcaggaccaacgaatcaggtggtacctcctcagcatgggttctaatgagaacatacactccattcacttttcaggacatgtgttcactgtccggaagaaagaagagtataagatggccctctacaatttgtatccaggcgtgtttgagaccgttgaaatgcttccctctaaagctggcatctggagagtagagtgcttgatcggagaacatcttcacgcaggtatgagcaccttgttcctcgtgtacagcaacaaatgtcagaatccacttggcatggccagtggacacattcgcgactttcagatcacagcatctggccagtatggacaatgggccccaaagttggctcgcctccattactccggtagcataaatgcgtggtccactaaagaacctttcagctggattaaggtcgatcttcttgcccccatgatcatccacggcattaagacacagggagcgaggcagaaattctcctccctctacatctcacagttcattattatgtatagtttggacggcaagaagtggcaaacttatagaggtaacagtactggaacagacatggtgttcttcggcaacgttgatagctctggcatcaaacacaacatctttaatcctcccataatagctcggtacatcagattgcatccgacccactacagcattaggagtacactccgaatggagcttatgggttgcgacttgaattcctgttcaatgccactcggaatggagtctaaagccatctctgatgcacagataaccgccagtagctactttacgaacatgtttgctacgtggtcaccctctaaggcaaggcttcatttgcaaggccggtctaatgcctggagacctcaggtgaacaacccgaaagaatggctccaggtggactttcagaagaccatgaaagtaacaggtgtcactactcagggagttaagtccttggatactagcatgtatgtgaaggagttccttatttcctcatcacaagatggccaccagtggaccctcttctttcagaatggtaaggtcaaagtgtttcagggcaatcaagacagcttcacacccgtggtgaacagtcttgatcctccactcttgacacgataccttcgaatccatccacagtcttgggagcaccagattgcattgcgcatggaagtacttggatgcgaggctcaggacctctac

SEQ ID NO: 1930 - protein, 1457 aa, synthetic construct
  REGION 1..1457: note = Variant of human B-domain deleted Factor VIII
MQIELSTCFFLCLLRFCFSATRRYYLGAVELSWDYMQSDLGELPVDARFPPRVPKSFPFNTSQVYKKTLFVEFTDHLFNIAKPRPPWMGLLGPTIQAEVYDTVVITLKNMASHPVSLHAVGVSYWKASEGAEYDDQTSQREKEDDKVFPGGSHTYVWQVLKENGPMASDPPCLTYSYLSHVDLVKDLNSGLIGALLVCREGSLAKEKTQTLAKFILLFAVFDEGKSWHSETKNSLMQDRDAASARAWPKMHTVNGYVNRTLPGLIGCHRKSVYWHVIGMGTTPEVHSIFLEGHTFLVRNHRQASLGISPITFLTAQTLLRDLGQFLLFCHIPSHQHDGMEAYVKVDSCPEEPQLRMKNNEEAEDYDDDLTDSEMDVVRFDDDNSPSIIQARSGAKKHPKTWVHYIAAEEEDWDYAPLVLAPDDRSYKSQYLNNGPQRIGRKYKKVRFMAYTDETFKTREAIQHESGILGPLLYGEVGDTLLIIFKNQASRPYNIYPHGITDVRPLYSRRLPKGVKHLKDFPILPGEIFKYKWTITVEDGPTKSDPRCLTRYYSSFVNWERDLASGLIGPLLICYKESVDQRGNQIMSDKRNVILFSVFDENRSWYLTENIQRFLPNPAGVQLEDPEFQASNIMHSINGYVFDSLQLSVCLHEVAYWYILSIGAQTDFLSVFFSGYTFKHKGVYEDTLTLFPFSGETVFMSMENPGLWILGCHNSDFRNRGMTALLKVSSCLWNTGDYYEDSYEDISAYFDSKNNAIEPRSFSQNPPVLKRHQREGTRTTLQSDQEEIDYDDTISVEMKKEDFDIYDEDENQSPRSFQKKTRHYFIAAVERLWDYGMSSSPHVLRNRAQSGSVPQFKKVVFQEFTDGSFTQPLYRGELNEHLGLLGPYIRAEVEDNIMVTFRNQASRPYSFYSSLISYEEDQRQGAEPRKNFVKPNETKTYFWKVQHHMAPTKDEFDCKAWAYFSDVDLEKDVHSGLIGPLLVCHTNTLNPAHGRQVTVQEFALFFTIFDETKSWYFTENMERNCRAPCNIQMEDPTFKENYRFHAINGYIMDTLPGLVMAQDQRIRWYLLSMGSNENIHSIHFSGHVFTVRKKEEYKMALYNLYPGVFETVEMLPSKAGIWRVECLIGEHLHAGMSTLFLVYSNKCQNPLGMASGHIRDFQITASGQYGQWAPKLARLHYSGSINAWSTKEPFSWIKVDLLAPMIIHGIKTQGARQKFSSLYISQFIIMYSLDGKKWQTYRGNSTGTDMVFFGNVDSSGIKHNIFNPPIIARYIRLHPTHYSIRSTLRMELMGCDLNSCSMPLGMESKAISDAQITASSYFTNMFATWSPSKARLHLQGRSNAWRPQVNNPKEWLQVDFQKTMKVTGVTTQGVKSLDTSMYVKEFLISSSQDGHQWTLFFQNGKVKVFQGNQDSFTPVVNSLDPPLLTRYLRIHPQSWEHQIALRMEVLGCEAQDLY

SEQ ID NO: 1931 - DNA, 4371 bp, synthetic construct
  misc_feature 1..4371: note = Variant of human B-domain deleted Factor VIII
  source 1..4371: mol_type = other DNA
atgcagattgaactgtctacctgcttcttcctctgtttgctgaggttctgctttagcgccactagacggtactaccttggcgctgtggagctgtcctgggactatatgcagagtgatttgggagagcttcccgtcgacgcacgatttcctcctcgcgttccaaagtcatttccctttaacacaagccaggtgtacaagaagacgctcttcgtcgaattcaccgatcacctgttcaatatcgccaaacccagaccaccatggatgggtcttttggggcctaccatacaagcggaggtgtatgacacagttgttatcactctcaagaacatggcttctcatccggtaagtcttcacgcagtgggcgtgtcctactggaaagcttcagaaggagccgagtatgatgatcagacatcccagagggagaaagaagacgacaaggtatttccaggtgggtctcatacctatgtgtggcaagtgctcaaagagaatggccctatggcaagcgatccgccgtgtttgacttacagctacctttcacacgttgacctcgtcaaggacctcaactccgggttgattggagccttgttggtatgcagggaaggatctcttgccaaagagaagacacagaccctggccaagtttatccttctctttgctgtgttcgatgagggcaaaagttggcatagcgaaacgaagaattccctcatgcaggatcgcgacgcagccagcgccagagcttggcccaagatgcacactgtgaacggatatgtcaataggacgcttcctggcttgattgggtgtcatcggaaaagtgtctactggcacgtgatcggaatggggacaacaccagaggtccactccatatttctcgaaggccataccttccttgttcgaaaccacagacaggcatccttggggatctctcccattacctttctcactgcccaaacgctccttcgtgacttgggtcagttccttctcttttgccatatcccgtcacaccagcatgatggtatggaagcttatgtgaaagtcgacagttgtcctgaggagccacagttgcgcatgaagaataatgaagaagccgaggattacgacgacgatctcaccgattctgagatggacgtggtgaggtttgatgacgacaactctccctccatcattcaagctcggagcggggcgaagaaacaccccaagacttgggtccactatatagcggcggaagaggaggattgggattacgctcctcttgtattggcaccagatgaccgctcatacaaaagccagtacctcaacaacggaccgcagagaattggccggaagtataagaaagtgcgatttatggcctatacagacgaaacctttaagacaagggaggccatccagcatgagagtgggattttgggacctcttctttacggcgaagttggtgataccctcctcatcatcttcaagaatcaagcttctcgcccctataacatttacccacacgggatcactgacgttaggcctttgtatagcagaagacttcccaaaggcgtgaagcatctcaaagacttccccattttgccaggcgagatctttaagtacaaatggaccattacagtggaagatggaccgactaaatcagaccctcgatgccttacgcggtactattcctccttcgtgaattgggagagagatttggcaagcggactcataggaccactcctcatctgttacaaggaatctgtagaccagaggggtaaccagattatgagtgataaacgcaatgtgatcctttttagcgtcttcgacgagaaccggtcctggtacttgaccgagaatatacaaaggttccttcccaaccccgcaggcgttcagttggaagaccctgagtttcaggccagcaatattatgcactcaatcaacggctatgtgtttgatagtctccagctttctgtttgcctccatgaagtagcctattggtacatcttgtcaattggtgctcaaacagacttcctctccgtcttcttctccggctacacctttaagcacaagggcgtgtatgaggacactctcacactctttccattttctggagaaaccgtgttcatgagcatggagaatccaggcctttggatcttgggttgccacaacagtgattttcgcaatcggggaatgactgctctcctcaaagtcagcagctgtgattggaacacaggcgactattacgaagattcttacgaggacataagtgcctactttgactccaagaataacgccattgagcccagatcattctcccagaatcctcccgtgcttaaaaggcatcagcgcgaaggtaccagaactactcttcagtctgatcaagaggagattgactatgacgacaccattagcgtggaaatgaagaaggaggatttcgatatctatgacgaagatgagaaccagtctccgcggagctttcagaagaagacgcgacactacttcattgcagcagtcgaaaggctttgggactacggtatgtcatcatcccctcatgtgttgcgcaatagagctcagagtggaagtgttccacagttcaagaaagtcgtctttcaagagtttacagatggcagcttcacacagcctctctatcggggcgagcttaacgaacatttgggactccttggtccctatatccgagccgaagtggaggacaacattatggttacctttaggaatcaagcctctcgcccctacagcttctactcctccctcatcagttatgaggaggatcagagacaaggcgctgaaccacggaagaactttgtgaaaccgaatgagacgaagacctacttctggaaagtacagcaccacatggcccccacaaaagacgaattcgattgcaaagcatgggcgtatttttcagacgttgacttggagaaagatgtacattcaggacttattggtcctttgttggtgtgtcacactaacactctcaatccagcccatggcaggcaggtgacagtccaggaattcgctcttttctttaccatctttgatgagaccaagtcctggtacttcacggaaaacatggagcgcaattgcagagccccctgtaacatacagatggaggaccctacctttaaggaaaattatcggttccacgcaatcaacggatacattatggatacactccctggccttgtgatggctcaggaccaacgaatcaggtggtacctcctcagcatgggttctaatgagaacatacactccattcactttaatggacatgtgttcactgtccggaagaaagaagagtataagatggccctctacaatttgtatccaggcgtgtttgagaccgttgaaatgcttccctctaaagctggcatctggagagtagagtgcttgatcggagaacatcttcacgcaggtatgagcaccttgttcctcgtgtacagcaacaaatgtcagaatccacttggcatggccagtggacacattcgcgactttcagatcacagcatctggccagtatggacaatgggccccaaagttggctcgcctccattactccggtagcataaatgcgtggtccactaaagaacctttcagctggattaaggtcgatcttcttgcccccatgatcatccacggcattaagacacagggagcgaggcagaaattctcctccctctacatctcacagttcattattatgtatagtttggacggcaagaagtggcaaacttatagaggtaacagtactggaacagacatggtgttcttcggcaacgttgatagctctggcatcaaacacaacatctttaatcctcccataatagctcggtacatcagattgcatccgacccactacagcattaggagtacactccgaatggagcttatgggttgcgacttgaattcctgttcaatgccactcggaatggagtctaaagccatctctgatgcacagataaccgccagtagctactttacgaacatgtttgctacgtggtcaccctctaaggcaaggcttcatttgcaaggccggtctaatgcctggagacctcaggtgaacaacccgaaagaatggctccaggtggactttcagaagaccatgaaagtaacaggtgtcactactcagggagttaagtccttggatactagcatgtatgtgaaggagttccttatttcctcatcacaagatggccaccagtggaccctcttctttcagaatggtaaggtcaaagtgtttcagggcaatcaagacagcttcacacccgtggtgaacagtcttgatcctccactcttgacacgataccttcgaatccatccacagtcttgggagcaccagattgcattgcgcatggaagtacttggatgcgaggctcaggacctctac

SEQ ID NO: 1932 - protein, 1457 aa, synthetic construct
  REGION 1..1457: note = Variant of human B-domain deleted Factor VIII
MQIELSTCFFLCLLRFCFSATRRYYLGAVELSWDYMQSDLGELPVDARFPPRVPKSFPFNTSQVYKKTLFVEFTDHLFNIAKPRPPWMGLLGPTIQAEVYDTVVITLKNMASHPVSLHAVGVSYWKASEGAEYDDQTSQREKEDDKVFPGGSHTYVWQVLKENGPMASDPPCLTYSYLSHVDLVKDLNSGLIGALLVCREGSLAKEKTQTLAKFILLFAVFDEGKSWHSETKNSLMQDRDAASARAWPKMHTVNGYVNRTLPGLIGCHRKSVYWHVIGMGTTPEVHSIFLEGHTFLVRNHRQASLGISPITFLTAQTLLRDLGQFLLFCHIPSHQHDGMEAYVKVDSCPEEPQLRMKNNEEAEDYDDDLTDSEMDVVRFDDDNSPSIIQARSGAKKHPKTWVHYIAAEEEDWDYAPLVLAPDDRSYKSQYLNNGPQRIGRKYKKVRFMAYTDETFKTREAIQHESGILGPLLYGEVGDTLLIIFKNQASRPYNIYPHGITDVRPLYSRRLPKGVKHLKDFPILPGEIFKYKWTITVEDGPTKSDPRCLTRYYSSFVNWERDLASGLIGPLLICYKESVDQRGNQIMSDKRNVILFSVFDENRSWYLTENIQRFLPNPAGVQLEDPEFQASNIMHSINGYVFDSLQLSVCLHEVAYWYILSIGAQTDFLSVFFSGYTFKHKGVYEDTLTLFPFSGETVFMSMENPGLWILGCHNSDFRNRGMTALLKVSSCDWNTGDYYEDSYEDISAYFDSKNNAIEPRSFSQNPPVLKRHQREGTRTTLQSDQEEIDYDDTISVEMKKEDFDIYDEDENQSPRSFQKKTRHYFIAAVERLWDYGMSSSPHVLRNRAQSGSVPQFKKVVFQEFTDGSFTQPLYRGELNEHLGLLGPYIRAEVEDNIMVTFRNQASRPYSFYSSLISYEEDQRQGAEPRKNFVKPNETKTYFWKVQHHMAPTKDEFDCKAWAYFSDVDLEKDVHSGLIGPLLVCHTNTLNPAHGRQVTVQEFALFFTIFDETKSWYFTENMERNCRAPCNIQMEDPTFKENYRFHAINGYIMDTLPGLVMAQDQRIRWYLLSMGSNENIHSIHFNGHVFTVRKKEEYKMALYNLYPGVFETVEMLPSKAGIWRVECLIGEHLHAGMSTLFLVYSNKCQNPLGMASGHIRDFQITASGQYGQWAPKLARLHYSGSINAWSTKEPFSWIKVDLLAPMIIHGIKTQGARQKFSSLYISQFIIMYSLDGKKWQTYRGNSTGTDMVFFGNVDSSGIKHNIFNPPIIARYIRLHPTHYSIRSTLRMELMGCDLNSCSMPLGMESKAISDAQITASSYFTNMFATWSPSKARLHLQGRSNAWRPQVNNPKEWLQVDFQKTMKVTGVTTQGVKSLDTSMYVKEFLISSSQDGHQWTLFFQNGKVKVFQGNQDSFTPVVNSLDPPLLTRYLRIHPQSWEHQIALRMEVLGCEAQDLY

SEQ ID NO: 1933 - DNA, 4371 bp, synthetic construct
  misc_feature 1..4371: note = Variant of human B-domain deleted Factor VIII
  source 1..4371: mol_type = other DNA
atgcagattgaactgtctacctgcttcttcctctgtttgctgaggttctgctttagcgccactagacggtactaccttggcgctgtggagctgtcctgggactatatgcagagtgatttgggagagcttcccgtcgacgcacgatttcctcctcgcgttccaaagtcatttccctttaacacaagccaggtgtacaagaagacgctcttcgtcgaattcaccgatcacctgttcaatatcgccaaacccagaccaccatggatgggtcttttggggcctaccatacaagcggaggtgtatgacacagttgttatcactctcaagaacatggcttctcatccggtaagtcttcacgcagtgggcgtgtcctactggaaagcttcagaaggagccgagtatgatgatcagacatcccagagggagaaagaagacgacaaggtatttccaggtgggtctcatacctatgtgtggcaagtgctcaaagagaatggccctatggcaagcgatccgccgtgtttgacttacagctacctttcacacgttgacctcgtcaaggacctcaactccgggttgattggagccttgttggtatgcagggaaggatctcttgccaaagagaagacacagaccctggccaagtttatccttctctttgctgtgttcgatgagggcaaaagttggcatagcgaaacgaagaattccctcatgcaggatcgcgacgcagccagcgccagagcttggcccaagatgcacactgtgaacggatatgtcaataggacgcttcctggcttgattgggtgtcatcggaaaagtgtctactggcacgtgatcggaatggggacaacaccagaggtccactccatatttctcgaaggccataccttccttgttcgaaaccacagacaggcatccttggggatctctcccattacctttctcactgcccaaacgctccttcgtgacttgggtcagttccttctcttttgccatatcccgtcacaccagcatgatggtatggaagcttatgtgaaagtcgacagttgtcctgaggagccacagttgcgcatgaagaataatgaagaagccgaggattacgacgacgatctcaccgattctgagatggacgtggtgaggtttgatgacgacaactctccctccatcattcaagctcggagcggggcgaagaaacaccccaagacttgggtccactatatagcggcggaagaggaggattgggattacgctcctcttgtattggcaccagatgaccgctcatacaaaagccagtacctcaacaacggaccgcagagaattggccggaagtataagaaagtgcgatttatggcctatacagacgaaacctttaagacaagggaggccatccagcatgagagtgggattttgggacctcttctttacggcgaagttggtgataccctcctcatcatcttcaagaatcaagcttctcgcccctataacatttacccacacgggatcactgacgttaggcctttgtatagcagaagacttcccaaaggcgtgaagcatctcaaagacttccccattttgccaggcgagatctttaagtacaaatggaccattacagtggaagatggaccgactaaatcagaccctcgatgccttacgcggtactattcctccttcgtgaattgggagagagatttggcaagcggactcataggaccactcctcatctgttacaaggaatctgtagaccagaggggtaaccagattatgagtgataaacgcaatgtgatcctttttagcgtcttcgacgagaaccggtcctggtacttgaccgagaatatacaaaggttccttcccaaccccgcaggcgttcagttggaagaccctgagtttcaggccagcaatattatgcactcaatcaacggctatgtgtttgatagtctccagctttctgtttgcctccatgaagtagcctattggtacatcttgtcaattggtgctcaaacagacttcctctccgtcttcttctccggctacacctttaagcacaagggcgtgtatgaggacactctcacactctttccattttctggagaaaccgtgttcatgagcatggagaatccaggcctttggatcttgggttgccacaacagtgattttcgcaatcggggaatgactgctctcctcaaagtcagcagctgtgattggaacacaggcgactattacgaagattcttacgaggacataagtgcctactttgactccaagaataacgccattgagcccagatcattctcccagaatcctcccgtgcttaaaaggcatcagcgcgaaggtaccagaactactcttcagtctgatcaagaggagattgactatgacgacaccattagcgtggaaatgaagaaggaggatttcgatatctatgacgaagatgagaaccagtctccgcggagctttcagaagaagacgcgacactacttcattgcagcagtcgaaaggctttgggactacggtatgtcatcatcccctcatgtgttgcgcaatagagctcagagtggaagtgttccacagttcaagaaagtcgtctttcaagagtttacagatggcagcttcacacagcctctctatcggggcgagcttaacgaacatttgggactccttggtccctatatccgagccgaagtggaggacaacattatggttacctttaggaatcaagcctctcgcccctacagcttctactcctccctcatcagttatgaggaggatcagagacaaggcgctgaaccacggaagaactttgtgaaaccgaatgagacgaagacctacttctggaaagtacagcaccacatggcccccacaaaagacgaattcgattgcaaagcatgggcgtatttttcagacgttgacttggagaaagatgtacattcaggacttattggtcctttgttggtgtgtcacactaacactctcaatccagcccatggcaggcaggtgacagtccaggaattcgctcttttctttaccatctttgatgagaccaagtcctggtacttcacggaaaacatggagcgcaattgcagagccccctgtaacatacagatggaggaccctacctttaaggaaaattatcggttccacgcaatcaacggatacattatggatacactccctggccttgtgatggctcaggaccaacgaatcaggtggtacctcctcagcatgggttctaatgagaacatacactccattcacttttcaggacatgtgttcactgtccggaagaaagaagagtataagatggccctctacaatttgtatccaggcgtgtttgagaccgttgaaatgcttccctctaaagctggcatctggagagtagagtgcttgctgggagaacatcttcacgcaggtatgagcaccttgttcctcgtgtacagcaacaaatgtcagaatccacttggcatggccagtggacacattcgcgactttcagatcacagcatctggccagtatggacaatgggccccaaagttggctcgcctccattactccggtagcataaatgcgtggtccactaaagaacctttcagctggattaaggtcgatcttcttgcccccatgatcatccacggcattaagacacagggagcgaggcagaaattctcctccctctacatctcacagttcattattatgtatagtttggacggcaagaagtggcaaacttatagaggtaacagtactggaacagacatggtgttcttcggcaacgttgatagctctggcatcaaacacaacatctttaatcctcccataatagctcggtacatcagattgcatccgacccactacagcattaggagtacactccgaatggagcttatgggttgcgacttgaattcctgttcaatgccactcggaatggagtctaaagccatctctgatgcacagataaccgccagtagctactttacgaacatgtttgctacgtggtcaccctctaaggcaaggcttcatttgcaaggccggtctaatgcctggagacctcaggtgaacaacccgaaagaatggctccaggtggactttcagaagaccatgaaagtaacaggtgtcactactcagggagttaagtccttggatactagcatgtatgtgaaggagttccttatttcctcatcacaagatggccaccagtggaccctcttctttcagaatggtaaggtcaaagtgtttcagggcaatcaagacagcttcacacccgtggtgaacagtcttgatcctccactcttgacacgataccttcgaatccatccacagtcttgggagcaccagattgcattgcgcatggaagtacttggatgcgaggctcaggacctctac

SEQ ID NO: 1934 - protein, 1457 aa, synthetic construct
  REGION 1..1457: note = Variant of human B-domain deleted Factor VIII
MQIELSTCFFLCLLRFCFSATRRYYLGAVELSWDYMQSDLGELPVDARFPPRVPKSFPFNTSQVYKKTLFVEFTDHLFNIAKPRPPWMGLLGPTIQAEVYDTVVITLKNMASHPVSLHAVGVSYWKASEGAEYDDQTSQREKEDDKVFPGGSHTYVWQVLKENGPMASDPPCLTYSYLSHVDLVKDLNSGLIGALLVCREGSLAKEKTQTLAKFILLFAVFDEGKSWHSETKNSLMQDRDAASARAWPKMHTVNGYVNRTLPGLIGCHRKSVYWHVIGMGTTPEVHSIFLEGHTFLVRNHRQASLGISPITFLTAQTLLRDLGQFLLFCHIPSHQHDGMEAYVKVDSCPEEPQLRMKNNEEAEDYDDDLTDSEMDVVRFDDDNSPSIIQARSGAKKHPKTWVHYIAAEEEDWDYAPLVLAPDDRSYKSQYLNNGPQRIGRKYKKVRFMAYTDETFKTREAIQHESGILGPLLYGEVGDTLLIIFKNQASRPYNIYPHGITDVRPLYSRRLPKGVKHLKDFPILPGEIFKYKWTITVEDGPTKSDPRCLTRYYSSFVNWERDLASGLIGPLLICYKESVDQRGNQIMSDKRNVILFSVFDENRSWYLTENIQRFLPNPAGVQLEDPEFQASNIMHSINGYVFDSLQLSVCLHEVAYWYILSIGAQTDFLSVFFSGYTFKHKGVYEDTLTLFPFSGETVFMSMENPGLWILGCHNSDFRNRGMTALLKVSSCDWNTGDYYEDSYEDISAYFDSKNNAIEPRSFSQNPPVLKRHQREGTRTTLQSDQEEIDYDDTISVEMKKEDFDIYDEDENQSPRSFQKKTRHYFIAAVERLWDYGMSSSPHVLRNRAQSGSVPQFKKVVFQEFTDGSFTQPLYRGELNEHLGLLGPYIRAEVEDNIMVTFRNQASRPYSFYSSLISYEEDQRQGAEPRKNFVKPNETKTYFWKVQHHMAPTKDEFDCKAWAYFSDVDLEKDVHSGLIGPLLVCHTNTLNPAHGRQVTVQEFALFFTIFDETKSWYFTENMERNCRAPCNIQMEDPTFKENYRFHAINGYIMDTLPGLVMAQDQRIRWYLLSMGSNENIHSIHFSGHVFTVRKKEEYKMALYNLYPGVFETVEMLPSKAGIWRVECLLGEHLHAGMSTLFLVYSNKCQNPLGMASGHIRDFQITASGQYGQWAPKLARLHYSGSINAWSTKEPFSWIKVDLLAPMIIHGIKTQGARQKFSSLYISQFIIMYSLDGKKWQTYRGNSTGTDMVFFGNVDSSGIKHNIFNPPIIARYIRLHPTHYSIRSTLRMELMGCDLNSCSMPLGMESKAISDAQITASSYFTNMFATWSPSKARLHLQGRSNAWRPQVNNPKEWLQVDFQKTMKVTGVTTQGVKSLDTSMYVKEFLISSSQDGHQWTLFFQNGKVKVFQGNQDSFTPVVNSLDPPLLTRYLRIHPQSWEHQIALRMEVLGCEAQDLY

SEQ ID NO: 1935 - DNA, 4371 bp, synthetic construct
  misc_feature 1..4371: note = Variant of human B-domain deleted Factor VIII
  source 1..4371: mol_type = other DNA
atgcagattgaactgtctacctgcttcttcctctgtttgctgaggttctgctttagcgccactagacggtactaccttggcgctgtggagctgtcctgggactatatgcagagtgatttgggagagcttcccgtcgacgcacgatttcctcctcgcgttccaaagtcatttccctttaacacaagccaggtgtacaagaagacgctcttcgtcgaattcaccgatcacctgttcaatatcgccaaacccagaccaccatggatgggtcttttggggcctaccatacaagcggaggtgtatgacacagttgttatcactctcaagaacatggcttctcatccggtaagtcttcacgcagtgggcgtgtcctactggaaagcttcagaaggagccgagtatgatgatcagacatcccagagggagaaagaagacgacaaggtatttccaggtgggtctcatacctatgtgtggcaagtgctcaaagagaatggccctatggcaagcgatccgccgtgtttgacttacagctacctttcacacgttgacctcgtcaaggacctcaactccgggttgattggagccttgttggtatgcagggaaggatctcttgccaaagagaagacacagaccctggccaagtttatccttctctttgctgtgttcgatgagggcaaaagttggcatagcgaaacgaagaattccctcatgcaggatcgcgacgcagccagcgccagagcttggcccaagatgcacactgtgaacggatatgtcaataggacgcttcctggcttgattgggtgtcatcggaaaagtgtctactggcacgtgatcggaatggggacaacaccagaggtccactccatatttctcgaaggccataccttccttgttcgaaaccacagacaggcatccttggggatcccgcccattacctttctcactgcccaaacgctccttcgtgacttgggtcagttccttctcttttgccatatcccgtcacaccagcatgatggtatggaagcttatgtgaaagtcgacagttgtcctgaggagccacagttgcgcatgaagaataatgaagaagccgaggattacgacgacgatctcaccgattctgagatggacgtggtgaggtttgatgacgacaactctccctccatcattcaagctcggagcggggcgaagaaacaccccaagacttgggtccactatatagcggcggaagaggaggattgggattacgctcctcttgtattggcaccagatgaccgctcatacaaaagccagtacctcaacaacggaccgcagagaattggccggaagtataagaaagtgcgatttatggcctatacagacgaaacctttaagacaagggaggccatccagcatgagagtgggattttgggacctcttctttacggcgaagttggtgataccctcctcatcatcttcaagaatcaagcttctcgcccctataacatttacccacacgggatcactgacgttaggcctttgtatagcagaagacttcccaaaggcgtgaagcatctcaaagacttccccattttgccaggcgagatctttaagtacaaatggaccattacagtggaagatggaccgactaaatcagaccctcgatgccttacgcggtactattcctccttcgtgaattgggagagagatttggcaagcggactcataggaccactcctcatctgttacaaggaatctgtagaccagaggggtaaccagattatgagtgataaacgcaatgtgatcctttttagcgtcttcgacgagaaccggtcctggtacttgaccgagaatatacaaaggttccttcccaaccccgcaggcgttcagttggaagaccctgagtttcaggccagcaatattatgcactcaatcaacggctatgtgtttgatagtctccagctttctgtttgcctccatgaagtagcctattggtacatcttgtcaattggtgctcaaacagacttcctctccgtcttcttctccggctacacctttaagcacaagggcgtgtatgaggacactctcacactctttccattttctggagaaaccgtgttcatgagcatggagaatccaggcctttggatcttgggttgccacaacagtgattttcgcaatcggggaatgactgctctcctcaaagtcagcagctgtgattggaacacaggcgactattacgaagattcttacgaggacataagtgcctactttgactccaagaataacgccattgagcccagatcattctcccagaatcctcccgtgcttaaaaggcatcagcgcgaaggtaccagaactactcttcagtctgatcaagaggagattgactatgacgacaccattagcgtggaaatgaagaaggaggatttcgatatctatgacgaagatgagaaccagtctccgcggagctttcagaagaagacgcgacactacttcattgcagcagtcgaaaggctttgggactacggtatgtcatcatcccctcatgtgttgcgcaatagagctcagagtggaagtgttccacagttcaagaaagtcgtctttcaagagtttacagatggcagcttcacacagcctctctatcggggcgagcttaacgaacatttgggactccttggtccctatatccgagccgaagtggaggacaacattatggttacctttaggaatcaagcctctcgcccctacagcttctactcctccctcatcagttatgaggaggatcagagacaaggcgctgaaccacggaagaactttgtgaaaccgaatgagacgaagacctacttctggaaagtacagcaccacatggcccccacaaaagacgaattcgattgcaaagcatgggcgtatttttcagacgttgacttggagaaagatgtacattcaggacttattggtcctttgttggtgtgtcacactaacactctcaatccagcccatggcaggcaggtgacagtccaggaattcgctcttttctttaccatctttgatgagaccaagtcctggtacttcacggaaaacatggagcgcaattgcagagccccctgtaacatacagatggaggaccctacctttaaggaaaattatcggttccacgcaatcaacggatacattatggatacactccctggccttgtgatggctcaggaccaacgaatcaggtggtacctcctcagcatgggttctaatgagaacatacactccattcacttttcaggacatgtgttcactgtccggaagaaagaagagtataagatggccctctacaatttgtatccaggcgtgtttgagaccgttgaaatgcttccctctaaagctggcatctggagagtagagtgcttgatcggagaacatcttcacgcaggtatgagcaccttgttcctcgtgtacagcaacaaatgtcagaatccacttggcatggccagtggacacattcgcgactttcagatcacagcatctggccagtatggacaatgggccccaaagttggctcgcctccattactccggtagcataaatgcgtggtccactaaagaacctttcagctggattaaggtcgatcttcttgcccccatgatcatccacggcattaagacacagggagcgaggcagaaattctcctccctctacatctcacagttcattattatgtatagtttggacggcaagaagtggcaaacttatagaggtaacagtactggaacagacatggtgttcttcggcaacgttgatagctctggcatcaaacacaacatctttaatcctcccataatagctcggtacatcagattgcatccgacccactacagcattaggagtacactccgaatggagcttatgggttgcgacttgaattcctgttcaatgccactcggaatggagtctaaagccatctctgatgcacagataaccgccagtagctactttacgaacatgtttgctacgtggtcaccctctaaggcaaggcttcatttgcaaggccggtctaatgcctggagacctcaggtgaacaacccgaaagaatggctccaggtggactttcagaagaccatgaaagtaacaggtgtcactactcagggagttaagtccttggatactagcatgtatgtgaaggagttccttatttcctcatcacaagatggccaccagtggaccctcttctttcagaatggtaaggtcaaagtgtttcagggcaatcaagacagcttcacacccgtggtgaacagtcttgatcctccactcttgacacgataccttcgaatccatccacagtcttgggagcaccagattgcattgcgcatggaagtacttggatgcgaggctcaggacctctac

SEQ ID NO: 1936 - protein, 1457 aa, synthetic construct
  REGION 1..1457: note = Variant of human B-domain deleted Factor VIII
MQIELSTCFFLCLLRFCFSATRRYYLGAVELSWDYMQSDLGELPVDARFPPRVPKSFPFNTSQVYKKTLFVEFTDHLFNIAKPRPPWMGLLGPTIQAEVYDTVVITLKNMASHPVSLHAVGVSYWKASEGAEYDDQTSQREKEDDKVFPGGSHTYVWQVLKENGPMASDPPCLTYSYLSHVDLVKDLNSGLIGALLVCREGSLAKEKTQTLAKFILLFAVFDEGKSWHSETKNSLMQDRDAASARAWPKMHTVNGYVNRTLPGLIGCHRKSVYWHVIGMGTTPEVHSIFLEGHTFLVRNHRQASLGIPPITFLTAQTLLRDLGQFLLFCHIPSHQHDGMEAYVKVDSCPEEPQLRMKNNEEAEDYDDDLTDSEMDVVRFDDDNSPSIIQARSGAKKHPKTWVHYIAAEEEDWDYAPLVLAPDDRSYKSQYLNNGPQRIGRKYKKVRFMAYTDETFKTREAIQHESGILGPLLYGEVGDTLLIIFKNQASRPYNIYPHGITDVRPLYSRRLPKGVKHLKDFPILPGEIFKYKWTITVEDGPTKSDPRCLTRYYSSFVNWERDLASGLIGPLLICYKESVDQRGNQIMSDKRNVILFSVFDENRSWYLTENIQRFLPNPAGVQLEDPEFQASNIMHSINGYVFDSLQLSVCLHEVAYWYILSIGAQTDFLSVFFSGYTFKHKGVYEDTLTLFPFSGETVFMSMENPGLWILGCHNSDFRNRGMTALLKVSSCDWNTGDYYEDSYEDISAYFDSKNNAIEPRSFSQNPPVLKRHQREGTRTTLQSDQEEIDYDDTISVEMKKEDFDIYDEDENQSPRSFQKKTRHYFIAAVERLWDYGMSSSPHVLRNRAQSGSVPQFKKVVFQEFTDGSFTQPLYRGELNEHLGLLGPYIRAEVEDNIMVTFRNQASRPYSFYSSLISYEEDQRQGAEPRKNFVKPNETKTYFWKVQHHMAPTKDEFDCKAWAYFSDVDLEKDVHSGLIGPLLVCHTNTLNPAHGRQVTVQEFALFFTIFDETKSWYFTENMERNCRAPCNIQMEDPTFKENYRFHAINGYIMDTLPGLVMAQDQRIRWYLLSMGSNENIHSIHFSGHVFTVRKKEEYKMALYNLYPGVFETVEMLPSKAGIWRVECLIGEHLHAGMSTLFLVYSNKCQNPLGMASGHIRDFQITASGQYGQWAPKLARLHYSGSINAWSTKEPFSWIKVDLLAPMIIHGIKTQGARQKFSSLYISQFIIMYSLDGKKWQTYRGNSTGTDMVFFGNVDSSGIKHNIFNPPIIARYIRLHPTHYSIRSTLRMELMGCDLNSCSMPLGMESKAISDAQITASSYFTNMFATWSPSKARLHLQGRSNAWRPQVNNPKEWLQVDFQKTMKVTGVTTQGVKSLDTSMYVKEFLISSSQDGHQWTLFFQNGKVKVFQGNQDSFTPVVNSLDPPLLTRYLRIHPQSWEHQIALRMEVLGCEAQDLY

SEQ ID NO: 1937 - DNA, 4371 bp, synthetic construct
  misc_feature 1..4371: note = Variant of human B-domain deleted Factor VIII
  source 1..4371: mol_type = other DNA
atgcagattgaactgtctacctgcttcttcctctgtttgctgaggttctgctttagcgccactagacggtactaccttggcgctgtggagctgtcctgggactatatgcagagtgatttgggagagcttcccgtcgacgcacgatttcctcctcgcgttccaaagtcatttccctttaacacaagccaggtgtacaagaagacgctcttcgtcgaattcaccgatcacctgttcaatatcgccaaacccagaccaccatggatgggtcttttggggcctaccatacaagcggaggtgtatgacacagttgttatcactctcaagaacatggcttctcatccggtaagtcttcacgcagtgggcgtgtcctactggaaagcttcagaaggagccgagtatgatgatcagacatcccagagggagaaagaagacgacaaggtatttccaggtgggtctcatacctatgtgtggcaagtgctcaaagagaatggccctatggcaagcgatccgccgtgtttgacttacagctacctttcacacgttgacctcgtcaaggacctcaactccgggttgattggagccttgttggtatgcagggaaggatctcttgccaaagagaagacacagaccctggccaagtttatccttctctttgctgtgttcgatgagggcaaaagttggcatagcgaaacgaagaattccctcatgcaggatcgcgacgcagccagcgccagagcttggcccaagatgcacactgtgaacggatatgtcaataggacgcttcctggcttgattgggtgtcatcggaaaagtgtctactggcacgtgatcggaatggggacaacaccagaggtccactccatatttctcgaaggccataccttccttgttcgaaaccacagacaggcatccttggggatctctcccattacctttctcactgcccaaacgctccttcgtgacttgggtcagttccttctcttttgccatatcccgtcacaccagcatgatggtatggaagcttatgtgaaagtcgacagttgtcctgaggagccacagttgcgcatgaagaataatgaagaagccgaggattacgacgacgatctcaccgattctgagatggacgtggtgaggtttgatgacgacaactctccctccatcattcaagctcggagcggggcgaagaaacaccccaagacttgggtccactatatagcggcggaagaggaggattgggattacgctcctcttgtattggcaccagatgaccgctcatacaaaagccagtacctcaacaacggaccgcagagaattggccggaagtataagaaagtgcgatttatggcctatacagacgaaacctttaagacaagggaggccatccagcatgagagtgggattttgggacctcttctttacggcgaagttggtgataccctcctcatcatcttcaagaatcaagcttctcgcccctataacatttacccacacgggatcactgacgttaggcctttgtatagcagaagacttcccaaaggcgtgaagcatctcaaagacttccccattttgccaggcgagatctttaagtacaaatggaccattacagtggaagatggaccgactaaatcagaccctcgatgccttacgcggtactattcctccttcgtgaattgggagagagatttggcaagcggactcataggaccactcctcatctgttacaaggaatctgtagaccagaggggtaaccagattatgagtgataaacgcaatgtgatcctttttagcgtcttcgacgagaaccggtcctggtacttgaccgagaatatacaaaggttccttcccaaccccgcaggcgttcagttggaagaccctgagtttcaggccagcaatattatgcactcaatcaacggctatgtgtttgatagtctccagctttctgtttgcctccatgaagtagcctattggtacatcttgtcaattggtgctcaaacagacttcctctccgtcttcttctccggctacacctttaagcacaagggcgtgtatgaggacactctcacactctttccattttctggagaaaccgtgttcatgagcatggagaatccaggcctttggatcttgggttgccacaacagtgattttcgcaatcggggaatgactgctctcctcaaagtcagcagctgtgattggaacacaggcgactattacgaagattcttacgaggacataagtgcctactttgactccaagaataacgccattgagcccagatcattctcccagaatcctcccgtgcttaaaaggcatcagcgcgaaggtaccagaactactcttcagtctgatcaagaggagattgactatgacgacaccattagcgtggaaatgaagaaggaggatttcgatatctatgacgaagatgagaaccagtctccgcggagctttcagaagaagacgcgacactacttcattgcagcagtcgaaaggctttgggactacggtatgtcatcatcccctcatgtgttgcgcaatagagctcagagtggaagtgttccacagttcaagaaagtcgtctttcaagagtttacagatggcagcttcacacagcctctctatcggggcgagcttaacgaacatttgggactccttggtccctatatccgagccgaagtggaggacaacattatggttacctttaggaatcaagcctctcgcccctacagcttctactcctccctcatcagttatgaggaggatcagagacaaggcgctgaaccacggaagaactttgtgaaaccgaatgagacgaagacctacttctggaaagtacagcaccacatggcccccacaaaagacgaattcgattgcaaagcatgggcgtatttttcagacgttgacttggagaaagatgtacattcaggacttattggtcctttgttggtgtgtcacactaacactctcaatccagcccatggcaggcaggtgacagtccaggaattcgctcttttctttaccatctttgatgagaccaagtcctggtacttcacggaaaacatggagcgcaattgcagagccccctgtaacatacagatggaggaccctacctttaaggaaaattatcggttccacgcaatcaacggatacattatggatacactccctggccttgtgatggctcaggaccaacgaatcaggtggtacctcctcagcatgggttctaattctaacatacactccattcacttttcaggacatgtgttcactgtccggaagaaagaagagtataagatggccctctacaatttgtatccaggcgtgtttgagaccgttgaaatgcttccctctaaagctggcatctggagagtagagtgcttgatcggagaacatcttcacgcaggtatgagcaccttgttcctcgtgtacagcaacaaatgtcagaatccacttggcatggccagtggacacattcgcgactttcagatcacagcatctggccagtatggacaatgggccccaaagttggctcgcctccattactccggtagcataaatgcgtggtccactaaagaacctttcagctggattaaggtcgatcttcttgcccccatgatcatccacggcattaagacacagggagcgaggcagaaattctcctccctctacatctcacagttcattattatgtatagtttggacggcaagaagtggcaaacttatagaggtaacagtactggaacagacatggtgttcttcggcaacgttgatagctctggcatcaaacacaacatctttaatcctcccataatagctcggtacatcagattgcatccgacccactacagcattaggagtacactccgaatggagcttatgggttgcgacttgaattcctgttcaatgccactcggaatggagtctaaagccatctctgatgcacagataaccgccagtagctactttacgaacatgtttgctacgtggtcaccctctaaggcaaggcttcatttgcaaggccggtctaatgcctggagacctcaggtgaacaacccgaaagaatggctccaggtggactttcagaagaccatgaaagtaacaggtgtcactactcagggagttaagtccttggatactagcatgtatgtgaaggagttccttatttcctcatcacaagatggccaccagtggaccctcttctttcagaatggtaaggtcaaagtgtttcagggcaatcaagacagcttcacacccgtggtgaacagtcttgatcctccactcttgacacgataccttcgaatccatccacagtcttgggagcaccagattgcattgcgcatggaagtacttggatgcgaggctcaggacctctac

SEQ ID NO: 1938 - protein, 1457 aa, synthetic construct
  REGION 1..1457: note = Variant of human B-domain deleted Factor VIII
MQIELSTCFFLCLLRFCFSATRRYYLGAVELSWDYMQSDLGELPVDARFPPRVPKSFPFNTSQVYKKTLFVEFTDHLFNIAKPRPPWMGLLGPTIQAEVYDTVVITLKNMASHPVSLHAVGVSYWKASEGAEYDDQTSQREKEDDKVFPGGSHTYVWQVLKENGPMASDPPCLTYSYLSHVDLVKDLNSGLIGALLVCREGSLAKEKTQTLAKFILLFAVFDEGKSWHSETKNSLMQDRDAASARAWPKMHTVNGYVNRTLPGLIGCHRKSVYWHVIGMGTTPEVHSIFLEGHTFLVRNHRQASLGISPITFLTAQTLLRDLGQFLLFCHIPSHQHDGMEAYVKVDSCPEEPQLRMKNNEEAEDYDDDLTDSEMDVVRFDDDNSPSIIQARSGAKKHPKTWVHYIAAEEEDWDYAPLVLAPDDRSYKSQYLNNGPQRIGRKYKKVRFMAYTDETFKTREAIQHESGILGPLLYGEVGDTLLIIFKNQASRPYNIYPHGITDVRPLYSRRLPKGVKHLKDFPILPGEIFKYKWTITVEDGPTKSDPRCLTRYYSSFVNWERDLASGLIGPLLICYKESVDQRGNQIMSDKRNVILFSVFDENRSWYLTENIQRFLPNPAGVQLEDPEFQASNIMHSINGYVFDSLQLSVCLHEVAYWYILSIGAQTDFLSVFFSGYTFKHKGVYEDTLTLFPFSGETVFMSMENPGLWILGCHNSDFRNRGMTALLKVSSCDWNTGDYYEDSYEDISAYFDSKNNAIEPRSFSQNPPVLKRHQREGTRTTLQSDQEEIDYDDTISVEMKKEDFDIYDEDENQSPRSFQKKTRHYFIAAVERLWDYGMSSSPHVLRNRAQSGSVPQFKKVVFQEFTDGSFTQPLYRGELNEHLGLLGPYIRAEVEDNIMVTFRNQASRPYSFYSSLISYEEDQRQGAEPRKNFVKPNETKTYFWKVQHHMAPTKDEFDCKAWAYFSDVDLEKDVHSGLIGPLLVCHTNTLNPAHGRQVTVQEFALFFTIFDETKSWYFTENMERNCRAPCNIQMEDPTFKENYRFHAINGYIMDTLPGLVMAQDQRIRWYLLSMGSNSNIHSIHFSGHVFTVRKKEEYKMALYNLYPGVFETVEMLPSKAGIWRVECLIGEHLHAGMSTLFLVYSNKCQNPLGMASGHIRDFQITASGQYGQWAPKLARLHYSGSINAWSTKEPFSWIKVDLLAPMIIHGIKTQGARQKFSSLYISQFIIMYSLDGKKWQTYRGNSTGTDMVFFGNVDSSGIKHNIFNPPIIARYIRLHPTHYSIRSTLRMELMGCDLNSCSMPLGMESKAISDAQITASSYFTNMFATWSPSKARLHLQGRSNAWRPQVNNPKEWLQVDFQKTMKVTGVTTQGVKSLDTSMYVKEFLISSSQDGHQWTLFFQNGKVKVFQGNQDSFTPVVNSLDPPLLTRYLRIHPQSWEHQIALRMEVLGCEAQDLY

SEQ ID NO: 1939 - DNA, 4371 bp, synthetic construct
  misc_feature 1..4371: note = Variant of human B-domain deleted Factor VIII
  source 1..4371: mol_type = other DNA
atgcagattgaactgtctacctgcttcttcctctgtttgctgaggttctgctttagcgccactagacggtactaccttggcgctgtggagctgtcctgggactatatgcagagtgatttgggagagcttcccgtcgacgcacgatttcctcctcgcgttccaaagtcatttccctttaacacaagccaggtgtacaagaagacgctcttcgtcgaattcaccgatcacctgttcaatatcgccaaacccagaccaccatggatgggtcttttggggcctaccatacaagcggaggtgtatgacacagttgttatcactctcaagaacatggcttctcatccggtaagtcttcacgcagtgggcgtgtcctactggaaagcttcagaaggagccgagtatgatgatcagacatcccagagggagaaagaagacgacaaggtatttccaggtgggtctcatacctatgtgtggcaagtgctcaaagagaatggccctatggcaagcgatccgccgtgtttgacttacagctacctttcacacgttgacctcgtcaaggacctcaactccgggttgattggagccttgttggtatgcagggaaggatctcttgccaaagagaagacacagaccctggccaagtttatccttctctttgctgtgttcgatgagggcaaaagttggcatagcgaaacgaagaattccctcatgcaggatcgcgacgcagccagcgccagagcttggcccaagatgcacactgtgaacggatatgtcaataggacgcttcctggcttgattgggtgtcatcggaaaagtgtctactggcacgtgatcggaatggggacaacaccagaggtccactccatatttctcgaaggccataccttccttgttcgaaaccacagacaggcatccttggggatctctcccattacctttctcactgcccaaacgctccttcgtgacttgggtcagttccttctcttttgccatatcccgtcacaccagcatgatggtatggaagcttatgtgaaagtcgacagttgtcctgaggagccacagttgcgcatgaagaataatgaagaagccgaggattacgacgacgatctcaccgattctgagatggacgtggtgaggtttgatgacgacaactctccctccatcattcaagctcggagcggggcgaagaaacaccccaagacttgggtccactatatagcggcggaagaggaggattgggattacgctcctcttgtattggcaccagatgaccgctcatacaaaagccagtacctcaacaacggaccgcagagaattggccggaagtataagaaagtgcgatttatggcctatacagacgaaacctttaagacaagggaggccatccagcatgagagtgggattttgggacctcttctttacggcgaagttggtgataccctcctcatcatcttcaagaatcaagcttctcgcccctataacatttacccacacgggatcactgacgttaggcctttgtatagcagaagacttcccaaaggcgtgaagcatctcaaagacttccccattttgccaggcgagatctttaagtacaaatggaccattacagtggaagatggaccgactaaatcagaccctcgatgccttacgcggtactattcctccttcgtgaattgggagagagatttggcaagcggactcataggaccactcctcatctgttacaaggaatctgtagaccagaggggtaaccagattatgagtgataaacgcaatgtgatcctttttagcgtcttcgacgagaaccggtcctggtacttgaccgagaatatacaaaggttccttcccaaccccgcaggcgttcagttggaagaccctgagtttcaggccagcaatattatgcactcaatcaacggctatgtgtttgatagtctccagctttctgtttgcctccatgaagtagcctattggtacatcttgtcaattggtgctcaaacagacttcctctccgtcttcttctccggctacacctttaagcacaagggcgtgtatgaggacactctcacactctttccattttctggagaaaccgtgttcatgagcatggagaatccaggcctttggatcttgggttgccacaacagtgattttcgcaatcggggaatgactgctctcctcaaagtcagcagctgtgattggaacacaggcgactattacgaagattcttacgaggacataagtgcctactttgactccaagaataacgccattgagcccagatcattctcccagaatcctcccgtgcttaaaaggcatcagcgcgaaggtaccagaactactcttcagtctgatcaagaggagattgactatgacgacaccattagcgtggaaatgaagaaggaggatttcgatatctatgacgaagatgagaaccagtctccgcggagctttcagaagaagacgcgacactacttcattgcagcagtcgaaaggctttgggactacggtatgtcatcatcccctcatgtgttgcgcaatagagctcagagtggaagtgttccacagttcaagaaagtcgtctttcaagagtttacagatggcagcttcacacagcctctctatcggggcgagcttaacgaacatttgggactccttggtccctatatccgagccgaagtggaggacaacattatggttacctttaggaatcaagcctctcgcccctacagcttctactcctccctcatcagttatgaggaggatcagagacaaggcgctgaaccacggaagaactttgtgaaaccgaatgagacgaagacctacttctggaaagtacagcaccacatggcccccacaaaagacgaattcgattgcaaagcatgggcgtatttttcagacgttgacttggagaaagatgtacattcaggacttattggtcctttgttggtgtgtcacactaacactctcaatccagcccatggcaggcaggtgacagtccaggaattcgctcttttctttaccatctttgatgagaccaagtcctggtacttcacggaaaacatggagcgcaattgcagagccccctgtaacatacagatggaggaccctacctttaaggaaaattatcggttccacgcaatcaacggatacattatggatacactccctggccttgtgatggctcaggaccaacgaatcaggtggtacctcctcagcatgggttctaatgagaacatacactccattcacttttcaggacatgtgttcactgtccggaagcctgaagagtataagatggccctctacaatttgtatccaggcgtgtttgagaccgttgaaatgcttccctctaaagctggcatctggagagtagagtgcttgatcggagaacatcttcacgcaggtatgagcaccttgttcctcgtgtacagcaacaaatgtcagaatccacttggcatggccagtggacacattcgcgactttcagatcacagcatctggccagtatggacaatgggccccaaagttggctcgcctccattactccggtagcataaatgcgtggtccactaaagaacctttcagctggattaaggtcgatcttcttgcccccatgatcatccacggcattaagacacagggagcgaggcagaaattctcctccctctacatctcacagttcattattatgtatagtttggacggcaagaagtggcaaacttatagaggtaacagtactggaacagacatggtgttcttcggcaacgttgatagctctggcatcaaacacaacatctttaatcctcccataatagctcggtacatcagattgcatccgacccactacagcattaggagtacactccgaatggagcttatgggttgcgacttgaattcctgttcaatgccactcggaatggagtctaaagccatctctgatgcacagataaccgccagtagctactttacgaacatgtttgctacgtggtcaccctctaaggcaaggcttcatttgcaaggccggtctaatgcctggagacctcaggtgaacaacccgaaagaatggctccaggtggactttcagaagaccatgaaagtaacaggtgtcactactcagggagttaagtccttggatactagcatgtatgtgaaggagttccttatttcctcatcacaagatggccaccagtggaccctcttctttcagaatggtaaggtcaaagtgtttcagggcaatcaagacagcttcacacccgtggtgaacagtcttgatcctccactcttgacacgataccttcgaatccatccacagtcttgggagcaccagattgcattgcgcatggaagtacttggatgcgaggctcaggacctctac

SEQ ID NO: 1940 - protein, 1457 aa, synthetic construct
  REGION 1..1457: note = Variant of human B-domain deleted Factor VIII
MQIELSTCFFLCLLRFCFSATRRYYLGAVELSWDYMQSDLGELPVDARFPPRVPKSFPFNTSQVYKKTLFVEFTDHLFNIAKPRPPWMGLLGPTIQAEVYDTVVITLKNMASHPVSLHAVGVSYWKASEGAEYDDQTSQREKEDDKVFPGGSHTYVWQVLKENGPMASDPPCLTYSYLSHVDLVKDLNSGLIGALLVCREGSLAKEKTQTLAKFILLFAVFDEGKSWHSETKNSLMQDRDAASARAWPKMHTVNGYVNRTLPGLIGCHRKSVYWHVIGMGTTPEVHSIFLEGHTFLVRNHRQASLGISPITFLTAQTLLRDLGQFLLFCHIPSHQHDGMEAYVKVDSCPEEPQLRMKNNEEAEDYDDDLTDSEMDVVRFDDDNSPSIIQARSGAKKHPKTWVHYIAAEEEDWDYAPLVLAPDDRSYKSQYLNNGPQRIGRKYKKVRFMAYTDETFKTREAIQHESGILGPLLYGEVGDTLLIIFKNQASRPYNIYPHGITDVRPLYSRRLPKGVKHLKDFPILPGEIFKYKWTITVEDGPTKSDPRCLTRYYSSFVNWERDLASGLIGPLLICYKESVDQRGNQIMSDKRNVILFSVFDENRSWYLTENIQRFLPNPAGVQLEDPEFQASNIMHSINGYVFDSLQLSVCLHEVAYWYILSIGAQTDFLSVFFSGYTFKHKGVYEDTLTLFPFSGETVFMSMENPGLWILGCHNSDFRNRGMTALLKVSSCDWNTGDYYEDSYEDISAYFDSKNNAIEPRSFSQNPPVLKRHQREGTRTTLQSDQEEIDYDDTISVEMKKEDFDIYDEDENQSPRSFQKKTRHYFIAAVERLWDYGMSSSPHVLRNRAQSGSVPQFKKVVFQEFTDGSFTQPLYRGELNEHLGLLGPYIRAEVEDNIMVTFRNQASRPYSFYSSLISYEEDQRQGAEPRKNFVKPNETKTYFWKVQHHMAPTKDEFDCKAWAYFSDVDLEKDVHSGLIGPLLVCHTNTLNPAHGRQVTVQEFALFFTIFDETKSWYFTENMERNCRAPCNIQMEDPTFKENYRFHAINGYIMDTLPGLVMAQDQRIRWYLLSMGSNENIHSIHFSGHVFTVRKPEEYKMALYNLYPGVFETVEMLPSKAGIWRVECLIGEHLHAGMSTLFLVYSNKCQNPLGMASGHIRDFQITASGQYGQWAPKLARLHYSGSINAWSTKEPFSWIKVDLLAPMIIHGIKTQGARQKFSSLYISQFIIMYSLDGKKWQTYRGNSTGTDMVFFGNVDSSGIKHNIFNPPIIARYIRLHPTHYSIRSTLRMELMGCDLNSCSMPLGMESKAISDAQITASSYFTNMFATWSPSKARLHLQGRSNAWRPQVNNPKEWLQVDFQKTMKVTGVTTQGVKSLDTSMYVKEFLISSSQDGHQWTLFFQNGKVKVFQGNQDSFTPVVNSLDPPLLTRYLRIHPQSWEHQIALRMEVLGCEAQDLY

SEQ ID NO: 1941 - DNA, 4371 bp, synthetic construct
  misc_feature 1..4371: note = Variant of human B-domain deleted Factor VIII
  source 1..4371: mol_type = other DNA
atgcagattgaactgtctacctgcttcttcctctgtttgctgaggttctgctttagcgccactagacggtactaccttggcgctgtggagctgtcctgggactatatgcagagtgatttgggagagcttcccgtcgacgcacgatttcctcctcgcgttccaaagtcatttccctttaacacaagccaggtgtacaagaagacgctcttcgtcgaattcaccgatcacctgttcaatatcgccaaacccagaccaccatggatgggtcttttggggcctaccatacaagcggaggtgtatgacacagttgttatcactctcaagaacatggcttctcatccggtaagtcttcacgcagtgggcgtgtcctactggaaagcttcagaaggagccgagtatgatgatcagacatcccagagggagaaagaagacgacaaggtatttccaggtgggtctcatacctatgtgtggcaagtgctcaaagagaatggccctatggcaagcgatccgccgtgtttgacttacagctacctttcacacgttgacctcgtcaaggacctcaactccgggttgattggagccttgttggtatgcagggaaggatctcttgccaaagagaagacacagaccctggccaagtttatccttctctttgctgtgttcgatgagggcaaaagttggcatagcgaaacgaagaattccctcatgcaggatcgcgacgcagccagcgccagagcttggcccaagatgcacactgtgaacggatatgtcaataggacgcttcctggcttgattgggtgtcatcggaaaagtgtctactggcacgtgatcggaatggggacaacaccagaggtccactccatatttctcgaaggccataccttccttgttcgaaaccacagacaggcatccttggggatctctcccattacctttctcactgcccaaacgctccttcgtgacttgggtcagttccttctcttttgccatatcccgtcacaccagcatgatggtatggaagcttatgtgaaagtcgacagttgtcctgaggagccacagttgcgcatgaagaataatgaagaagccgaggattacgacgacgatctcaccgattctgagatggacgtggtgaggtttgatgacgacaactctccctccatcattcaagctcggagcggggcgaagaaacaccccaagacttgggtccactatatagcggcggaagaggaggattgggattacgctcctcttgtattggcaccagatgaccgctcatacaaaagccagtacctcaacaacggaccgcagagaattggccggaagtataagaaagtgcgatttatggcctatacagacgaaacctttaagacaagggaggccatccagcatgagagtgggattttgggacctcttctttacggcgaagttggtgataccctcctcatcatcttcaagaatcaagcttctcgcccctataacatttacccacacgggatcactgacgttaggcctttgtatagcagaagacttcccaaaggcgtgaagcatctcaaagacttccccattttgccaggcgagatctttaagtacaaatggaccattacagtggaagatggaccgactaaatcagaccctcgatgccttacgcggtactattcctccttcgtgaattgggagagagatttggcaagcggactcataggaccactcctcatctgttacaaggaatctgtagaccagaggggtaaccagattatgagtgataaacgcaatgtgatcctttttagcgtcttcgacgagaaccggtcctggtacttgaccgagaatatacaaaggttccttcccaaccccgcaggcgttcagttggaagaccctgagtttcaggccagcaatattatgcactcaatcaacggctatgtgtttgatagtctccagctttctgtttgcctccatgaagtagcctattggtacatcttgtcaattggtgctcaaacagacttcctctccgtcttcttctccggctacacctttaagcacaagggcgtgtatgaggacactctcacactctttccattttctggagaaaccgtgttcatgagcatggagaatccaggcctttggatcttgggttgccacaacagtgattttcgcaatcggggaatgactgctctcctcaaagtcagcagctgtgattggaacacaggcgactattacgaagattcttacgaggacataagtgcctactttgactccaagaataacgccattgagcccagatcattctcccagaatcctcccgtgcttaaaaggcatcagcgcgaaggtaccagaactactcttcagtctgatcaagaggagattgactatgacgacaccattagcgtggaaatgaagaaggaggatttcgatatctatgacgaagatgagaaccagtctccgcggagctttcagaagaagacgcgacactacttcattgcagcagtcgaaaggctttgggactacggtatgtcatcatcccctcatgtgttgcgcaatagagctcagagtggaagtgttccacagttcaagaaagtcgtctttcaagagtttacagatggcagcttcacacagcctctctatcggggcgagcttaacgaacatttgggactccttggtccctatatccgagccgaagtggaggacaacattatggttacctttaggaatcaagcctctcgcccctacagcttctactcctccctcatcagttatgaggaggatcagagacaaggcgctgaaccacggaagaactttgtgaaaccgaatgagacgaagacctacttctggaaagtacagcaccacatggcccccacaaaagacgaattcgattgcaaagcatgggcgtatttttcagacgttgacttggagaaagatgtacattcaggacttattggtcctttgttggtgtgtcacactaacactctcaatccagcccatggcaggcaggtgacagtccaggaattcgctcttttctttaccatctttgatgagaccaagtcctggtacttcacggaaaacatggagcgcaattgcagagccccctgtaacatacagatggaggaccctacctttaaggaaaattatcggttccacgcaatcaacggatacattatggatacactccctggccttgtgatggctcaggaccaacgaatcaggtggtacctcctcagcatgggttctaatgagaacatacactccattcacttttcaggacatgtgttcactgtccggaagtatgaagagtataagatggccctctacaatttgtatccaggcgtgtttgagaccgttgaaatgcttccctctaaagctggcatctggagagtagagtgcttgatcggagaacatcttcacgcaggtatgagcaccttgttcctcgtgtacagcaacaaatgtcagaatccacttggcatggccagtggacacattcgcgactttcagatcacagcatctggccagtatggacaatgggccccaaagttggctcgcctccattactccggtagcataaatgcgtggtccactaaagaacctttcagctggattaaggtcgatcttcttgcccccatgatcatccacggcattaagacacagggagcgaggcagaaattctcctccctctacatctcacagttcattattatgtatagtttggacggcaagaagtggcaaacttatagaggtaacagtactggaacagacatggtgttcttcggcaacgttgatagctctggcatcaaacacaacatctttaatcctcccataatagctcggtacatcagattgcatccgacccactacagcattaggagtacactccgaatggagcttatgggttgcgacttgaattcctgttcaatgccactcggaatggagtctaaagccatctctgatgcacagataaccgccagtagctactttacgaacatgtttgctacgtggtcaccctctaaggcaaggcttcatttgcaaggccggtctaatgcctggagacctcaggtgaacaacccgaaagaatggctccaggtggactttcagaagaccatgaaagtaacaggtgtcactactcagggagttaagtccttggatactagcatgtatgtgaaggagttccttatttcctcatcacaagatggccaccagtggaccctcttctttcagaatggtaaggtcaaagtgtttcagggcaatcaagacagcttcacacccgtggtgaacagtcttgatcctccactcttgacacgataccttcgaatccatccacagtcttgggagcaccagattgcattgcgcatggaagtacttggatgcgaggctcaggacctctac

SEQ ID NO: 1942 - protein, 1457 aa, synthetic construct
  REGION 1..1457: note = Variant of human B-domain deleted Factor VIII
MQIELSTCFFLCLLRFCFSATRRYYLGAVELSWDYMQSDLGELPVDARFPPRVPKSFPFNTSQVYKKTLFVEFTDHLFNIAKPRPPWMGLLGPTIQAEVYDTVVITLKNMASHPVSLHAVGVSYWKASEGAEYDDQTSQREKEDDKVFPGGSHTYVWQVLKENGPMASDPPCLTYSYLSHVDLVKDLNSGLIGALLVCREGSLAKEKTQTLAKFILLFAVFDEGKSWHSETKNSLMQDRDAASARAWPKMHTVNGYVNRTLPGLIGCHRKSVYWHVIGMGTTPEVHSIFLEGHTFLVRNHRQASLGISPITFLTAQTLLRDLGQFLLFCHIPSHQHDGMEAYVKVDSCPEEPQLRMKNNEEAEDYDDDLTDSEMDVVRFDDDNSPSIIQARSGAKKHPKTWVHYIAAEEEDWDYAPLVLAPDDRSYKSQYLNNGPQRIGRKYKKVRFMAYTDETFKTREAIQHESGILGPLLYGEVGDTLLIIFKNQASRPYNIYPHGITDVRPLYSRRLPKGVKHLKDFPILPGEIFKYKWTITVEDGPTKSDPRCLTRYYSSFVNWERDLASGLIGPLLICYKESVDQRGNQIMSDKRNVILFSVFDENRSWYLTENIQRFLPNPAGVQLEDPEFQASNIMHSINGYVFDSLQLSVCLHEVAYWYILSIGAQTDFLSVFFSGYTFKHKGVYEDTLTLFPFSGETVFMSMENPGLWILGCHNSDFRNRGMTALLKVSSCDWNTGDYYEDSYEDISAYFDSKNNAIEPRSFSQNPPVLKRHQREGTRTTLQSDQEEIDYDDTISVEMKKEDFDIYDEDENQSPRSFQKKTRHYFIAAVERLWDYGMSSSPHVLRNRAQSGSVPQFKKVVFQEFTDGSFTQPLYRGELNEHLGLLGPYIRAEVEDNIMVTFRNQASRPYSFYSSLISYEEDQRQGAEPRKNFVKPNETKTYFWKVQHHMAPTKDEFDCKAWAYFSDVDLEKDVHSGLIGPLLVCHTNTLNPAHGRQVTVQEFALFFTIFDETKSWYFTENMERNCRAPCNIQMEDPTFKENYRFHAINGYIMDTLPGLVMAQDQRIRWYLLSMGSNENIHSIHFSGHVFTVRKYEEYKMALYNLYPGVFETVEMLPSKAGIWRVECLIGEHLHAGMSTLFLVYSNKCQNPLGMASGHIRDFQITASGQYGQWAPKLARLHYSGSINAWSTKEPFSWIKVDLLAPMIIHGIKTQGARQKFSSLYISQFIIMYSLDGKKWQTYRGNSTGTDMVFFGNVDSSGIKHNIFNPPIIARYIRLHPTHYSIRSTLRMELMGCDLNSCSMPLGMESKAISDAQITASSYFTNMFATWSPSKARLHLQGRSNAWRPQVNNPKEWLQVDFQKTMKVTGVTTQGVKSLDTSMYVKEFLISSSQDGHQWTLFFQNGKVKVFQGNQDSFTPVVNSLDPPLLTRYLRIHPQSWEHQIALRMEVLGCEAQDLY

SEQ ID NO: 1943 - DNA, 4371 bp, synthetic construct
  misc_feature 1..4371: note = Variant of human B-domain deleted Factor VIII
  source 1..4371: mol_type = other DNA
atgcagattgaactgtctacctgcttcttcctctgtttgctgaggttctgctttagcgccactagacggtactaccttggcgctgtggagctgtcctgggactatatgcagagtgatttgggagagcttcccgtcgacgcacgatttcctcctcgcgttccaaagtcatttccctttaacacaagccaggtgtacaagaagacgctcttcgtcgaattcaccgatcacctgttcaatatcgccaaacccagaccaccatggatgggtcttttggggcctaccatacaagcggaggtgtatgacacagttgttatcactctcaagaacatggcttctcatccggtaagtcttcacgcagtgggcgtgtcctactggaaagcttcagaaggagccgagtatgatgatcagacatcccagagggagaaagaagacgacaaggtatttccaggtgggtctcatacctatgtgtggcaagtgctcaaagagaatggccctatggcaagcgatccgccgtgtttgacttacagctacctttcacacgttgacctcgtcaaggacctcaactccgggttgattggagccttgttggtatgcagggaaggatctcttgccaaagagaagacacagaccctggccaagtttatccttctctttgctgtgttcgatgagggcaaaagttggcatagcgaaacgaagaattccctcatgcaggatcgcgacgcagccagcgccagagcttggcccaagatgcacactgtgaacggatatgtcaataggacgcttcctggcttgattgggtgtcatcggaaaagtgtctactggcacgtgatcggaatggggacaacaccagaggtccactccatatttctcgaaggccataccttccttgttcgaaaccacagacaggcatccttggggatctctcccattacctttctcactgcccaaacgctccttcgtgacttgggtcagttccttctcttttgccatatcccgtcacaccagcatgatggtatggaagcttatgtgaaagtcgacagttgtcctgaggagccacagttgcgcatgaagaataatgaagaagccgaggattacgacgacgatctcaccgattctgagatggacgtggtgaggtttgatgacgacaactctccctccatcattcaagctcggagcggggcgaagaaacaccccaagacttgggtccactatatagcggcggaagaggaggattgggattacgctcctcttgtattggcaccagatgaccgctcatacaaaagccagtacctcaacaacggaccgcagagaattggccggaagtataagaaagtgcgatttatggcctatacagacgaaacctttaagacaagggaggccatccagcatgagagtgggattttgggacctcttctttacggcgaagttggtgataccctcctcatcatcttcaagaatcaagcttctcgcccctataacatttacccacacgggatcactgacgttaggcctttgtatagcagaagacttcccaaaggcgtgaagcatctcaaagacttccccattttgccaggcgagatctttaagtacaaatggaccattacagtggaagatggaccgactaaatcagaccctcgatgccttacgcggtactattcctccttcgtgaattgggagagagatttggcaagcggactcataggaccactcctcatctgttacaaggaatctgtagaccagaggggtaaccagattatgagtgataaacgcaatgtgatcctttttagcgtcttcgacgagaaccggtcctggtacttgaccgagaatatacaaaggttccttcccaaccccgcaggcgttcagttggaagaccctgagtttcaggccagcaatattatgcactcaatcaacggctatgtgtttgatagtctccagctttctgtttgcctccatgaagtagcctattggtacatcttgtcaattggtgctcaaacagacttcctctccgtcttcttctccggctacacctttaagcacaagggcgtgtatgaggacactctcacactctttccattttctggagaaaccgtgttcatgagcatggagaatccaggcctttggatcttgggttgccacaacagtgattttcgcaatcggggaatgactgctctcctcaaagtcagcagctgtgattggaacacaggcgactattaccgggattcttacgaggacataagtgcctactttgactccaagaataacgccattgagcccagatcattctcccagaatcctcccgtgcttaaaaggcatcagcgcgaaggtaccagaactactcttcagtctgatcaagaggagattgactatgacgacaccattagcgtggaaatgaagaaggaggatttcgatatctatgacgaagatgagaaccagtctccgcggagctttcagaagaagacgcgacactacttcattgcagcagtcgaaaggctttgggactacggtatgtcatcatcccctcatgtgttgcgcaatagagctcagagtggaagtgttccacagttcaagaaagtcgtctttcaagagtttacagatggcagcttcacacagcctctctatcggggcgagcttaacgaacatttgggactccttggtccctatatccgagccgaagtggaggacaacattatggttacctttaggaatcaagcctctcgcccctacagcttctactcctccctcatcagttatgaggaggatcagagacaaggcgctgaaccacggaagaactttgtgaaaccgaatgagacgaagacctacttctggaaagtacagcaccacatggcccccacaaaagacgaattcgattgcaaagcatgggcgtatttttcagacgttgacttggagaaagatgtacattcaggacttattggtcctttgttggtgtgtcacactaacactctcaatccagcccatggcaggcaggtgacagtccaggaattcgctcttttctttaccatctttgatgagaccaagtcctggtacttcacggaaaacatggagcgcaattgcagagccccctgtaacatacagatggaggaccctacctttaaggaaaattatcggttccacgcaatcaacggatacattatggatacactccctggccttgtgatggctcaggaccaacgaatcaggtggtacctcctcagcatgggttctaatgagaacatacactccattcacttttcaggacatgtgttcactgtccggaagaaagaagagtataagatggccctctacaatttgtatccaggcgtgtttgagaccgttgaaatgcttccctctaaagctggcatctggagagtagagtgcttgatcggagaacatcttcacgcaggtatgagcaccttgttcctcgtgtacagcaacaaatgtcagaatccacttggcatggccagtggacacattcgcgactttcagatcacagcatctggccagtatggacaatgggccccaaagttggctcgcctccattactccggtagcataaatgcgtggtccactaaagaacctttcagctggattaaggtcgatcttcttgcccccatgatcatccacggcattaagacacagggagcgaggcagaaattctcctccctctacatctcacagttcattattatgtatagtttggacggcaagaagtggcaaacttatagaggtaacagtactggaacagacatggtgttcttcggcaacgttgatagctctggcatcaaacacaacatctttaatcctcccataatagctcggtacatcagattgcatccgacccactacagcattaggagtacactccgaatggagcttatgggttgcgacttgaattcctgttcaatgccactcggaatggagtctaaagccatctctgatgcacagataaccgccagtagctactttacgaacatgtttgctacgtggtcaccctctaaggcaaggcttcatttgcaaggccggtctaatgcctggagacctcaggtgaacaacccgaaagaatggctccaggtggactttcagaagaccatgaaagtaacaggtgtcactactcagggagttaagtccttggatactagcatgtatgtgaaggagttccttatttcctcatcacaagatggccaccagtggaccctcttctttcagaatggtaaggtcaaagtgtttcagggcaatcaagacagcttcacacccgtggtgaacagtcttgatcctccactcttgacacgataccttcgaatccatccacagtcttgggagcaccagattgcattgcgcatggaagtacttggatgcgaggctcaggacctctac

SEQ ID NO: 1944 - protein, 1457 aa, synthetic construct
  REGION 1..1457: note = Variant of human B-domain deleted Factor VIII
MQIELSTCFFLCLLRFCFSATRRYYLGAVELSWDYMQSDLGELPVDARFPPRVPKSFPFNTSQVYKKTLFVEFTDHLFNIAKPRPPWMGLLGPTIQAEVYDTVVITLKNMASHPVSLHAVGVSYWKASEGAEYDDQTSQREKEDDKVFPGGSHTYVWQVLKENGPMASDPPCLTYSYLSHVDLVKDLNSGLIGALLVCREGSLAKEKTQTLAKFILLFAVFDEGKSWHSETKNSLMQDRDAASARAWPKMHTVNGYVNRTLPGLIGCHRKSVYWHVIGMGTTPEVHSIFLEGHTFLVRNHRQASLGISPITFLTAQTLLRDLGQFLLFCHIPSHQHDGMEAYVKVDSCPEEPQLRMKNNEEAEDYDDDLTDSEMDVVRFDDDNSPSIIQARSGAKKHPKTWVHYIAAEEEDWDYAPLVLAPDDRSYKSQYLNNGPQRIGRKYKKVRFMAYTDETFKTREAIQHESGILGPLLYGEVGDTLLIIFKNQASRPYNIYPHGITDVRPLYSRRLPKGVKHLKDFPILPGEIFKYKWTITVEDGPTKSDPRCLTRYYSSFVNWERDLASGLIGPLLICYKESVDQRGNQIMSDKRNVILFSVFDENRSWYLTENIQRFLPNPAGVQLEDPEFQASNIMHSINGYVFDSLQLSVCLHEVAYWYILSIGAQTDFLSVFFSGYTFKHKGVYEDTLTLFPFSGETVFMSMENPGLWILGCHNSDFRNRGMTALLKVSSCDWNTGDYYRDSYEDISAYFDSKNNAIEPRSFSQNPPVLKRHQREGTRTTLQSDQEEIDYDDTISVEMKKEDFDIYDEDENQSPRSFQKKTRHYFIAAVERLWDYGMSSSPHVLRNRAQSGSVPQFKKVVFQEFTDGSFTQPLYRGELNEHLGLLGPYIRAEVEDNIMVTFRNQASRPYSFYSSLISYEEDQRQGAEPRKNFVKPNETKTYFWKVQHHMAPTKDEFDCKAWAYFSDVDLEKDVHSGLIGPLLVCHTNTLNPAHGRQVTVQEFALFFTIFDETKSWYFTENMERNCRAPCNIQMEDPTFKENYRFHAINGYIMDTLPGLVMAQDQRIRWYLLSMGSNENIHSIHFSGHVFTVRKKEEYKMALYNLYPGVFETVEMLPSKAGIWRVECLIGEHLHAGMSTLFLVYSNKCQNPLGMASGHIRDFQITASGQYGQWAPKLARLHYSGSINAWSTKEPFSWIKVDLLAPMIIHGIKTQGARQKFSSLYISQFIIMYSLDGKKWQTYRGNSTGTDMVFFGNVDSSGIKHNIFNPPIIARYIRLHPTHYSIRSTLRMELMGCDLNSCSMPLGMESKAISDAQITASSYFTNMFATWSPSKARLHLQGRSNAWRPQVNNPKEWLQVDFQKTMKVTGVTTQGVKSLDTSMYVKEFLISSSQDGHQWTLFFQNGKVKVFQGNQDSFTPVVNSLDPPLLTRYLRIHPQSWEHQIALRMEVLGCEAQDLY

SEQ ID NO: 1945 - DNA, 4371 bp, synthetic construct
  misc_feature 1..4371: note = Variant of human B-domain deleted Factor VIII
  source 1..4371: mol_type = other DNA
atgcagattgaactgtctacctgcttcttcctctgtttgctgaggttctgctttagcgccactagacggtactaccttggcgctgtggagctgtcctgggactatatgcagagtgatttgggagagcttcccgtcgacgcacgatttcctcctcgcgttccaaagtcatttccctttaacacaagccaggtgtacaagaagacgctcttcgtcgaattcaccgatcacctgttcaatatcgccaaacccagaccaccatggatgggtcttttggggcctaccatacaagcggaggtgtatgacacagttgttatcactctcaagaacatggcttctcatccggtaagtcttcacgcagtgggcgtgtcctactggaaagcttcagaaggagccgagtatgatgatcagacatcccagagggagaaagaagacgacaaggtatttccaggtgggtctcatacctatgtgtggcaagtgctcaaagagaatggccctatggcaagcgatccgccgtgtttgacttacagctacctttcacacgttgacctcgtcaaggacctcaactccgggttgattggagccttgttggtatgcagggaaggatctcttgccaaagagaagacacagaccctggccaagtttatccttctctttgctgtgttcgatgagggcaaaagttggcatagcgaaacgaagaattccctcatgcaggatcgcgacgcagccagcgccagagcttggcccaagatgcacactgtgaacggatatgtcaataggacgcttcctggcttgattgggtgtcatcggaaaagtgtctactggcacgtgatcggaatggggacaacaccagaggtccactccatatttctcgaaggccataccttccttgttcgaaaccacagacaggcatccttggggatctctcccattacctttctcactgcccaaacgctccttcgtgacttgggtcagttccttctcttttgccatatcccgtcacaccagcatgatggtatggaagcttatgtgaaagtcgacagttgtcctgaggagccacagttgcgcatgaagaataatgaagaagccgaggattacgacgacgatctcaccgattctgagatggacgtggtgaggtttgatgacgacaactctccctccatcattcaagctcggagcggggcgaagaaacaccccaagacttgggtccactatatagcggcggaagaggaggattgggattacgctcctcttgtattggcaccagatgaccgctcatacaaaagccagtacctcaacaacggaccgcagagaattggccggaagtataagaaagtgcgatttatggcctatacagacgaaacctttaagacaagggaggccatccagcatgagagtgggattttgggacctcttctttacggcgaagttggtgataccctcctcatcatcttcaagaatcaagcttctcgcccctataacatttacccacacgggatcactgacgttaggcctttgtatagcagaagacttcccaaaggcgtgaagcatctcaaagacttccccattttgccaggcgagatctttaagtacaaatggaccattacagtggaagatggaccgactaaatcagaccctcgatgccttacgcggtactattcctccttcgtgaattgggagagagatttggcaagcggactcataggaccactcctcatctgttacaaggaatctgtagaccagaggggtaaccagattatgagtgataaacgcaatgtgatcctttttagcgtcttcgacgagaaccggtcctggtacttgaccgagaatatacaaaggttccttcccaaccccgcaggcgttcagttggaagaccctgagtttcaggccagcaatattatgcactcaatcaacggctatgtgtttgatagtctccagctttctgtttgcctccatgaagtagcctattggtacatcttgtcaattggtgctcaaacagacttcctctccgtcttcttctccggctacacctttaagcacaagggcgtgtatgaggacactctcacactctttccattttctggagaaaccgtgttcatgagcatggagaatccaggcctttggatcttgggttgccacaacagtgattttcgcaatcggggaatgactgctctcctcaaagtcagcagctgtgattggaacacaggcgactattaccctgattcttacgaggacataagtgcctactttgactccaagaataacgccattgagcccagatcattctcccagaatcctcccgtgcttaaaaggcatcagcgcgaaggtaccagaactactcttcagtctgatcaagaggagattgactatgacgacaccattagcgtggaaatgaagaaggaggatttcgatatctatgacgaagatgagaaccagtctccgcggagctttcagaagaagacgcgacactacttcattgcagcagtcgaaaggctttgggactacggtatgtcatcatcccctcatgtgttgcgcaatagagctcagagtggaagtgttccacagttcaagaaagtcgtctttcaagagtttacagatggcagcttcacacagcctctctatcggggcgagcttaacgaacatttgggactccttggtccctatatccgagccgaagtggaggacaacattatggttacctttaggaatcaagcctctcgcccctacagcttctactcctccctcatcagttatgaggaggatcagagacaaggcgctgaaccacggaagaactttgtgaaaccgaatgagacgaagacctacttctggaaagtacagcaccacatggcccccacaaaagacgaattcgattgcaaagcatgggcgtatttttcagacgttgacttggagaaagatgtacattcaggacttattggtcctttgttggtgtgtcacactaacactctcaatccagcccatggcaggcaggtgacagtccaggaattcgctcttttctttaccatctttgatgagaccaagtcctggtacttcacggaaaacatggagcgcaattgcagagccccctgtaacatacagatggaggaccctacctttaaggaaaattatcggttccacgcaatcaacggatacattatggatacactccctggccttgtgatggctcaggaccaacgaatcaggtggtacctcctcagcatgggttctaatgagaacatacactccattcacttttcaggacatgtgttcactgtccggaagaaagaagagtataagatggccctctacaatttgtatccaggcgtgtttgagaccgttgaaatgcttccctctaaagctggcatctggagagtagagtgcttgatcggagaacatcttcacgcaggtatgagcaccttgttcctcgtgtacagcaacaaatgtcagaatccacttggcatggccagtggacacattcgcgactttcagatcacagcatctggccagtatggacaatgggccccaaagttggctcgcctccattactccggtagcataaatgcgtggtccactaaagaacctttcagctggattaaggtcgatcttcttgcccccatgatcatccacggcattaagacacagggagcgaggcagaaattctcctccctctacatctcacagttcattattatgtatagtttggacggcaagaagtggcaaacttatagaggtaacagtactggaacagacatggtgttcttcggcaacgttgatagctctggcatcaaacacaacatctttaatcctcccataatagctcggtacatcagattgcatccgacccactacagcattaggagtacactccgaatggagcttatgggttgcgacttgaattcctgttcaatgccactcggaatggagtctaaagccatctctgatgcacagataaccgccagtagctactttacgaacatgtttgctacgtggtcaccctctaaggcaaggcttcatttgcaaggccggtctaatgcctggagacctcaggtgaacaacccgaaagaatggctccaggtggactttcagaagaccatgaaagtaacaggtgtcactactcagggagttaagtccttggatactagcatgtatgtgaaggagttccttatttcctcatcacaagatggccaccagtggaccctcttctttcagaatggtaaggtcaaagtgtttcagggcaatcaagacagcttcacacccgtggtgaacagtcttgatcctccactcttgacacgataccttcgaatccatccacagtcttgggagcaccagattgcattgcgcatggaagtacttggatgcgaggctcaggacctctac

SEQ ID NO: 1946 - protein, 1457 aa, synthetic construct
  REGION 1..1457: note = Variant of human B-domain deleted Factor VIII
MQIELSTCFFLCLLRFCFSATRRYYLGAVELSWDYMQSDLGELPVDARFPPRVPKSFPFNTSQVYKKTLFVEFTDHLFNIAKPRPPWMGLLGPTIQAEVYDTVVITLKNMASHPVSLHAVGVSYWKASEGAEYDDQTSQREKEDDKVFPGGSHTYVWQVLKENGPMASDPPCLTYSYLSHVDLVKDLNSGLIGALLVCREGSLAKEKTQTLAKFILLFAVFDEGKSWHSETKNSLMQDRDAASARAWPKMHTVNGYVNRTLPGLIGCHRKSVYWHVIGMGTTPEVHSIFLEGHTFLVRNHRQASLGISPITFLTAQTLLRDLGQFLLFCHIPSHQHDGMEAYVKVDSCPEEPQLRMKNNEEAEDYDDDLTDSEMDVVRFDDDNSPSIIQARSGAKKHPKTWVHYIAAEEEDWDYAPLVLAPDDRSYKSQYLNNGPQRIGRKYKKVRFMAYTDETFKTREAIQHESGILGPLLYGEVGDTLLIIFKNQASRPYNIYPHGITDVRPLYSRRLPKGVKHLKDFPILPGEIFKYKWTITVEDGPTKSDPRCLTRYYSSFVNWERDLASGLIGPLLICYKESVDQRGNQIMSDKRNVILFSVFDENRSWYLTENIQRFLPNPAGVQLEDPEFQASNIMHSINGYVFDSLQLSVCLHEVAYWYILSIGAQTDFLSVFFSGYTFKHKGVYEDTLTLFPFSGETVFMSMENPGLWILGCHNSDFRNRGMTALLKVSSCDWNTGDYYPDSYEDISAYFDSKNNAIEPRSFSQNPPVLKRHQREGTRTTLQSDQEEIDYDDTISVEMKKEDFDIYDEDENQSPRSFQKKTRHYFIAAVERLWDYGMSSSPHVLRNRAQSGSVPQFKKVVFQEFTDGSFTQPLYRGELNEHLGLLGPYIRAEVEDNIMVTFRNQASRPYSFYSSLISYEEDQRQGAEPRKNFVKPNETKTYFWKVQHHMAPTKDEFDCKAWAYFSDVDLEKDVHSGLIGPLLVCHTNTLNPAHGRQVTVQEFALFFTIFDETKSWYFTENMERNCRAPCNIQMEDPTFKENYRFHAINGYIMDTLPGLVMAQDQRIRWYLLSMGSNENIHSIHFSGHVFTVRKKEEYKMALYNLYPGVFETVEMLPSKAGIWRVECLIGEHLHAGMSTLFLVYSNKCQNPLGMASGHIRDFQITASGQYGQWAPKLARLHYSGSINAWSTKEPFSWIKVDLLAPMIIHGIKTQGARQKFSSLYISQFIIMYSLDGKKWQTYRGNSTGTDMVFFGNVDSSGIKHNIFNPPIIARYIRLHPTHYSIRSTLRMELMGCDLNSCSMPLGMESKAISDAQITASSYFTNMFATWSPSKARLHLQGRSNAWRPQVNNPKEWLQVDFQKTMKVTGVTTQGVKSLDTSMYVKEFLISSSQDGHQWTLFFQNGKVKVFQGNQDSFTPVVNSLDPPLLTRYLRIHPQSWEHQIALRMEVLGCEAQDLY

SEQ ID NO: 1947 - DNA, 4371 bp, synthetic construct
  misc_feature 1..4371: note = Variant of human B-domain deleted Factor VIII
  source 1..4371: mol_type = other DNA
atgcagattgaactgtctacctgcttcttcctctgtttgctgaggttctgctttagcgccactagacggtactaccttggcgctgtggagctgtcctgggactatatgcagagtgatttgggagagcttcccgtcgacgcacgatttcctcctcgcgttccaaagtcatttccctttaacacaagccaggtgtacaagaagacgctcttcgtcgaattcaccgatcacctgttcaatatcgccaaacccagaccaccatggatgggtcttttggggcctaccatacaagcggaggtgtatgacacagttgttatcactctcaagaacatggcttctcatccggtaagtcttcacgcagtgggcgtgtcctactggaaagcttcagaaggagccgagtatgatgatcagacatcccagagggagaaagaagacgacaaggtatttccaggtgggtctcatacctatgtgtggcaagtgctcaaagagaatggccctatggcaagcgatccgccgtgtttgacttacagctacctttcacacgttgacctcgtcaaggacctcaactccgggttgattggagccttgttggtatgcagggaaggatctcttgccaaagagaagacacagaccctggccaagtttatccttctctttgctgtgttcgatgagggcaaaagttggcatagcgaaacgaagaattccctcatgcaggatcgcgacgcagccagcgccagagcttggcccaagatgcacactgtgaacggatatgtcaataggacgcttcctggcttgattgggtgtcatcggaaaagtgtctactggcacgtgatcggaatggggacaacaccagaggtccactccatatttctcgaaggccataccttccttgttcgaaaccacagacaggcatccttggggatctctcccgtgacctttctcactgcccaaacgctccttcgtgacttgggtcagttccttctcttttgccatatcccgtcacaccagcatgatggtatggaagcttatgtgaaagtcgacagttgtcctgaggagccacagttgcgcatgaagaataatgaagaagccgaggattacgacgacgatctcaccgattctgagatggacgtggtgaggtttgatgacgacaactctccctccatcattcaagctcggagcggggcgaagaaacaccccaagacttgggtccactatatagcggcggaagaggaggattgggattacgctcctcttgtattggcaccagatgaccgctcatacaaaagccagtacctcaacaacggaccgcagagaattggccggaagtataagaaagtgcgatttatggcctatacagacgaaacctttaagacaagggaggccatccagcatgagagtgggattttgggacctcttctttacggcgaagttggtgataccctcctcatcatcttcaagaatcaagcttctcgcccctataacatttacccacacgggatcactgacgttaggcctttgtatagcagaagacttcccaaaggcgtgaagcatctcaaagacttccccattttgccaggcgagatctttaagtacaaatggaccattacagtggaagatggaccgactaaatcagaccctcgatgccttacgcggtactattcctccttcgtgaattgggagagagatttggcaagcggactcataggaccactcctcatctgttacaaggaatctgtagaccagaggggtaaccagattatgagtgataaacgcaatgtgatcctttttagcgtcttcgacgagaaccggtcctggtacttgaccgagaatatacaaaggttccttcccaaccccgcaggcgttcagttggaagaccctgagtttcaggccagcaatattatgcactcaatcaacggctatgtgtttgatagtctccagctttctgtttgcctccatgaagtagcctattggtacatcttgtcaattggtgctcaaacagacttcctctccgtcttcttctccggctacacctttaagcacaagggcgtgtatgaggacactctcacactctttccattttctggagaaaccgtgttcatgagcatggagaatccaggcctttggatcttgggttgccacaacagtgattttcgcaatcggggaatgactgctctcctcaaagtcagcagctgtgattggaacacaggcgactattacgaagattcttacgaggacataagtgcctactttgactccaagaataacgccattgagcccagatcattctcccagaatcctcccgtgcttaaaaggcatcagcgcgaaggtaccagaactactcttcagtctgatcaagaggagattgactatgacgacaccattagcgtggaaatgaagaaggaggatttcgatatctatgacgaagatgagaaccagtctccgcggagctttcagaagaagacgcgacactacttcattgcagcagtcgaaaggctttgggactacggtatgtcatcatcccctcatgtgttgcgcaatagagctcagagtggaagtgttccacagttcaagaaagtcgtctttcaagagtttacagatggcagcttcacacagcctctctatcggggcgagcttaacgaacatttgggactccttggtccctatatccgagccgaagtggaggacaacattatggttacctttaggaatcaagcctctcgcccctacagcttctactcctccctcatcagttatgaggaggatcagagacaaggcgctgaaccacggaagaactttgtgaaaccgaatgagacgaagacctacttctggaaagtacagcaccacatggcccccacaaaagacgaattcgattgcaaagcatgggcgtatttttcagacgttgacttggagaaagatgtacattcaggacttattggtcctttgttggtgtgtcacactaacactctcaatccagcccatggcaggcaggtgacagtccaggaattcgctcttttctttaccatctttgatgagaccaagtcctggtacttcacggaaaacatggagcgcaattgcagagccccctgtaacatacagatggaggaccctacctttaaggaaaattatcggttccacgcaatcaacggatacattatggatacactccctggccttgtgatggctcaggaccaacgaatcaggtggtacctcctcagcatgggttctaatgagaacatacactccattcacttttcaggacatgtgttcactgtccggaagaaagaagagtataagatggccctctacaatttgtatccaggcgtgtttgagaccgttgaaatgcttccctctaaagctggcatctggagagtagagtgcttgatcggagaacatcttcacgcaggtatgagcaccttgttcctcgtgtacagcaacaaatgtcagaatccacttggcatggccagtggacacattcgcgactttcagatcacagcatctggccagtatggacaatgggccccaaagttggctcgcctccattactccggtagcataaatgcgtggtccactaaagaacctttcagctggattaaggtcgatcttcttgcccccatgatcatccacggcattaagacacagggagcgaggcagaaattctcctccctctacatctcacagttcattattatgtatagtttggacggcaagaagtggcaaacttatagaggtaacagtactggaacagacatggtgttcttcggcaacgttgatagctctggcatcaaacacaacatctttaatcctcccataatagctcggtacatcagattgcatccgacccactacagcattaggagtacactccgaatggagcttatgggttgcgacttgaattcctgttcaatgccactcggaatggagtctaaagccatctctgatgcacagataaccgccagtagctactttacgaacatgtttgctacgtggtcaccctctaaggcaaggcttcatttgcaaggccggtctaatgcctggagacctcaggtgaacaacccgaaagaatggctccaggtggactttcagaagaccatgaaagtaacaggtgtcactactcagggagttaagtccttggatactagcatgtatgtgaaggagttccttatttcctcatcacaagatggccaccagtggaccctcttctttcagaatggtaaggtcaaagtgtttcagggcaatcaagacagcttcacacccgtggtgaacagtcttgatcctccactcttgacacgataccttcgaatccatccacagtcttgggagcaccagattgcattgcgcatggaagtacttggatgcgaggctcaggacctctac

SEQ ID NO: 1948 - protein, 1457 aa, synthetic construct
  REGION 1..1457: note = Variant of human B-domain deleted Factor VIII
MQIELSTCFFLCLLRFCFSATRRYYLGAVELSWDYMQSDLGELPVDARFPPRVPKSFPFNTSQVYKKTLFVEFTDHLFNIAKPRPPWMGLLGPTIQAEVYDTVVITLKNMASHPVSLHAVGVSYWKASEGAEYDDQTSQREKEDDKVFPGGSHTYVWQVLKENGPMASDPPCLTYSYLSHVDLVKDLNSGLIGALLVCREGSLAKEKTQTLAKFILLFAVFDEGKSWHSETKNSLMQDRDAASARAWPKMHTVNGYVNRTLPGLIGCHRKSVYWHVIGMGTTPEVHSIFLEGHTFLVRNHRQASLGISPVTFLTAQTLLRDLGQFLLFCHIPSHQHDGMEAYVKVDSCPEEPQLRMKNNEEAEDYDDDLTDSEMDVVRFDDDNSPSIIQARSGAKKHPKTWVHYIAAEEEDWDYAPLVLAPDDRSYKSQYLNNGPQRIGRKYKKVRFMAYTDETFKTREAIQHESGILGPLLYGEVGDTLLIIFKNQASRPYNIYPHGITDVRPLYSRRLPKGVKHLKDFPILPGEIFKYKWTITVEDGPTKSDPRCLTRYYSSFVNWERDLASGLIGPLLICYKESVDQRGNQIMSDKRNVILFSVFDENRSWYLTENIQRFLPNPAGVQLEDPEFQASNIMHSINGYVFDSLQLSVCLHEVAYWYILSIGAQTDFLSVFFSGYTFKHKGVYEDTLTLFPFSGETVFMSMENPGLWILGCHNSDFRNRGMTALLKVSSCDWNTGDYYEDSYEDISAYFDSKNNAIEPRSFSQNPPVLKRHQREGTRTTLQSDQEEIDYDDTISVEMKKEDFDIYDEDENQSPRSFQKKTRHYFIAAVERLWDYGMSSSPHVLRNRAQSGSVPQFKKVVFQEFTDGSFTQPLYRGELNEHLGLLGPYIRAEVEDNIMVTFRNQASRPYSFYSSLISYEEDQRQGAEPRKNFVKPNETKTYFWKVQHHMAPTKDEFDCKAWAYFSDVDLEKDVHSGLIGPLLVCHTNTLNPAHGRQVTVQEFALFFTIFDETKSWYFTENMERNCRAPCNIQMEDPTFKENYRFHAINGYIMDTLPGLVMAQDQRIRWYLLSMGSNENIHSIHFSGHVFTVRKKEEYKMALYNLYPGVFETVEMLPSKAGIWRVECLIGEHLHAGMSTLFLVYSNKCQNPLGMASGHIRDFQITASGQYGQWAPKLARLHYSGSINAWSTKEPFSWIKVDLLAPMIIHGIKTQGARQKFSSLYISQFIIMYSLDGKKWQTYRGNSTGTDMVFFGNVDSSGIKHNIFNPPIIARYIRLHPTHYSIRSTLRMELMGCDLNSCSMPLGMESKAISDAQITASSYFTNMFATWSPSKARLHLQGRSNAWRPQVNNPKEWLQVDFQKTMKVTGVTTQGVKSLDTSMYVKEFLISSSQDGHQWTLFFQNGKVKVFQGNQDSFTPVVNSLDPPLLTRYLRIHPQSWEHQIALRMEVLGCEAQDLY

SEQ ID NO: 1949 - DNA, 4371 bp, synthetic construct
  misc_feature 1..4371: note = Variant of human B-domain deleted Factor VIII
  source 1..4371: mol_type = other DNA
atgcagattgaactgtctacctgcttcttcctctgtttgctgaggttctgctttagcgccactagacggtactaccttggcgctgtggagctgtcctgggactatatgcagagtgatttgggagagcttcccgtcgacgcacgatttcctcctcgcgttccaaagtcatttccctttaacacaagccaggtgtacaagaagacgctcttcgtcgaattcaccgatcacctgttcaatatcgccaaacccagaccaccatggatgggtcttttggggcctaccatacaagcggaggtgtatgacacagttgttatcactctcaagaacatggcttctcatccggtaagtcttcacgcagtgggcgtgtcctactggaaagcttcagaaggagccgagtatgatgatcagacatcccagagggagaaagaagacgacaaggtatttccaggtgggtctcatacctatgtgtggcaagtgctcaaagagaatggccctatggcaagcgatccgccgtgtttgacttacagctacctttcacacgttgacctcgtcaaggacctcaactccgggttgattggagccttgttggtatgcagggaaggatctcttgccaaagagaagacacagaccctggccaagtttatccttctctttgctgtgttcgatgagggcaaaagttggcatagcgaaacgaagaattccctcatgcaggatcgcgacgcagccagcgccagagcttggcccaagatgcacactgtgaacggatatgtcaataggacgcttcctggcttgattgggtgtcatcggaaaagtgtctactggcacgtgatcggaatggggacaacaccagaggtccactccatatttctcgaaggccataccttccttgttcgaaaccacagacaggcatccttggggatctctcccattacctttctcactgcccaaacgctccttcgtgacttgggtcagttccttctcttttgccatatcccgtcacaccagcatgatggtatggaagcttatgtgaaagtcgacagttgtcctgaggagccacagttgcgcatgaagaataatgaagaagccgaggattacgacgacgatctcaccgattctgagatggacgtggtgaggtttgatgacgacaactctccctccatcattcaagctcggagcggggcgaagaaacaccccaagacttgggtccactatatagcggcggaagaggaggattgggattacgctcctcttgtattggcaccagatgaccgctcatacaaaagccagtacctcaacaacggaccgcagagaattggccggaagtataagaaagtgcgatttatggcctatacagacgaaacctttaagacaagggaggccatccagcatgagagtgggattttgggacctcttctttacggcgaagttggtgataccctcctcatcatcttcaagaatcaagcttctcgcccctataacatttacccacacgggatcactgacgttaggcctttgtatagcagaagacttcccaaaggcgtgaagcatctcaaagacttccccattttgccaggcgagatctttaagtacaaatggaccattacagtggaagatggaccgactaaatcagaccctcgatgccttacgcggtactattcctccttcgtgaattgggagagagatttggcaagcggactcataggaccactcctcatctgttacaaggaatctgtagaccagaggggtaaccagattatgagtgataaacgcaatgtgatcctttttagcgtcttcgacgagaaccggtcctggtacttgaccgagaatatacaaaggttccttcccaaccccgcaggcgttcagttggaagaccctgagtttcaggccagcaatattatgcactcaatcaacggctatgtgtttgatagtctccagctttctgtttgcctccatgaagtagcctattggtacatcttgtcaattggtgctcaaacagacttcctctccgtcttcttctccggctacacctttaagcacaagggcgtgtatgaggacactctcacactctttccattttctggagaaaccgtgttcatgagcatggagaatccaggcctttggatcttgggttgcactaacagtgattttcgcaatcggggaatgactgctctcctcaaagtcagcagctgtgattggaacacaggcgactattacgaagattcttacgaggacataagtgcctactttgactccaagaataacgccattgagcccagatcattctcccagaatcctcccgtgcttaaaaggcatcagcgcgaaggtaccagaactactcttcagtctgatcaagaggagattgactatgacgacaccattagcgtggaaatgaagaaggaggatttcgatatctatgacgaagatgagaaccagtctccgcggagctttcagaagaagacgcgacactacttcattgcagcagtcgaaaggctttgggactacggtatgtcatcatcccctcatgtgttgcgcaatagagctcagagtggaagtgttccacagttcaagaaagtcgtctttcaagagtttacagatggcagcttcacacagcctctctatcggggcgagcttaacgaacatttgggactccttggtccctatatccgagccgaagtggaggacaacattatggttacctttaggaatcaagcctctcgcccctacagcttctactcctccctcatcagttatgaggaggatcagagacaaggcgctgaaccacggaagaactttgtgaaaccgaatgagacgaagacctacttctggaaagtacagcaccacatggcccccacaaaagacgaattcgattgcaaagcatgggcgtatttttcagacgttgacttggagaaagatgtacattcaggacttattggtcctttgttggtgtgtcacactaacactctcaatccagcccatggcaggcaggtgacagtccaggaattcgctcttttctttaccatctttgatgagaccaagtcctggtacttcacggaaaacatggagcgcaattgcagagccccctgtaacatacagatggaggaccctacctttaaggaaaattatcggttccacgcaatcaacggatacattatggatacactccctggccttgtgatggctcaggaccaacgaatcaggtggtacctcctcagcatgggttctaatgagaacatacactccattcacttttcaggacatgtgttcactgtccggaagaaagaagagtataagatggccctctacaatttgtatccaggcgtgtttgagaccgttgaaatgcttccctctaaagctggcatctggagagtagagtgcttgatcggagaacatcttcacgcaggtatgagcaccttgttcctcgtgtacagcaacaaatgtcagaatccacttggcatggccagtggacacattcgcgactttcagatcacagcatctggccagtatggacaatgggccccaaagttggctcgcctccattactccggtagcataaatgcgtggtccactaaagaacctttcagctggattaaggtcgatcttcttgcccccatgatcatccacggcattaagacacagggagcgaggcagaaattctcctccctctacatctcacagttcattattatgtatagtttggacggcaagaagtggcaaacttatagaggtaacagtactggaacagacatggtgttcttcggcaacgttgatagctctggcatcaaacacaacatctttaatcctcccataatagctcggtacatcagattgcatccgacccactacagcattaggagtacactccgaatggagcttatgggttgcgacttgaattcctgttcaatgccactcggaatggagtctaaagccatctctgatgcacagataaccgccagtagctactttacgaacatgtttgctacgtggtcaccctctaaggcaaggcttcatttgcaaggccggtctaatgcctggagacctcaggtgaacaacccgaaagaatggctccaggtggactttcagaagaccatgaaagtaacaggtgtcactactcagggagttaagtccttggatactagcatgtatgtgaaggagttccttatttcctcatcacaagatggccaccagtggaccctcttctttcagaatggtaaggtcaaagtgtttcagggcaatcaagacagcttcacacccgtggtgaacagtcttgatcctccactcttgacacgataccttcgaatccatccacagtcttgggagcaccagattgcattgcgcatggaagtacttggatgcgaggctcaggacctctac

SEQ ID NO: 1950 - protein, 1457 aa, synthetic construct
  REGION 1..1457: note = Variant of human B-domain deleted Factor VIII
MQIELSTCFFLCLLRFCFSATRRYYLGAVELSWDYMQSDLGELPVDARFPPRVPKSFPFNTSQVYKKTLFVEFTDHLFNIAKPRPPWMGLLGPTIQAEVYDTVVITLKNMASHPVSLHAVGVSYWKASEGAEYDDQTSQREKEDDKVFPGGSHTYVWQVLKENGPMASDPPCLTYSYLSHVDLVKDLNSGLIGALLVCREGSLAKEKTQTLAKFILLFAVFDEGKSWHSETKNSLMQDRDAASARAWPKMHTVNGYVNRTLPGLIGCHRKSVYWHVIGMGTTPEVHSIFLEGHTFLVRNHRQASLGISPITFLTAQTLLRDLGQFLLFCHIPSHQHDGMEAYVKVDSCPEEPQLRMKNNEEAEDYDDDLTDSEMDVVRFDDDNSPSIIQARSGAKKHPKTWVHYIAAEEEDWDYAPLVLAPDDRSYKSQYLNNGPQRIGRKYKKVRFMAYTDETFKTREAIQHESGILGPLLYGEVGDTLLIIFKNQASRPYNIYPHGITDVRPLYSRRLPKGVKHLKDFPILPGEIFKYKWTITVEDGPTKSDPRCLTRYYSSFVNWERDLASGLIGPLLICYKESVDQRGNQIMSDKRNVILFSVFDENRSWYLTENIQRFLPNPAGVQLEDPEFQASNIMHSINGYVFDSLQLSVCLHEVAYWYILSIGAQTDFLSVFFSGYTFKHKGVYEDTLTLFPFSGETVFMSMENPGLWILGCTNSDFRNRGMTALLKVSSCDWNTGDYYEDSYEDISAYFDSKNNAIEPRSFSQNPPVLKRHQREGTRTTLQSDQEEIDYDDTISVEMKKEDFDIYDEDENQSPRSFQKKTRHYFIAAVERLWDYGMSSSPHVLRNRAQSGSVPQFKKVVFQEFTDGSFTQPLYRGELNEHLGLLGPYIRAEVEDNIMVTFRNQASRPYSFYSSLISYEEDQRQGAEPRKNFVKPNETKTYFWKVQHHMAPTKDEFDCKAWAYFSDVDLEKDVHSGLIGPLLVCHTNTLNPAHGRQVTVQEFALFFTIFDETKSWYFTENMERNCRAPCNIQMEDPTFKENYRFHAINGYIMDTLPGLVMAQDQRIRWYLLSMGSNENIHSIHFSGHVFTVRKKEEYKMALYNLYPGVFETVEMLPSKAGIWRVECLIGEHLHAGMSTLFLVYSNKCQNPLGMASGHIRDFQITASGQYGQWAPKLARLHYSGSINAWSTKEPFSWIKVDLLAPMIIHGIKTQGARQKFSSLYISQFIIMYSLDGKKWQTYRGNSTGTDMVFFGNVDSSGIKHNIFNPPIIARYIRLHPTHYSIRSTLRMELMGCDLNSCSMPLGMESKAISDAQITASSYFTNMFATWSPSKARLHLQGRSNAWRPQVNNPKEWLQVDFQKTMKVTGVTTQGVKSLDTSMYVKEFLISSSQDGHQWTLFFQNGKVKVFQGNQDSFTPVVNSLDPPLLTRYLRIHPQSWEHQIALRMEVLGCEAQDLY

SEQ ID NO: 1951 - DNA, 4371 bp, synthetic construct
  misc_feature 1..4371: note = Variant of human B-domain deleted Factor VIII
  source 1..4371: mol_type = other DNA
atgcagattgaactgtctacctgcttcttcctctgtttgctgaggttctgctttagcgccactagacggtactaccttggcgctgtggagctgtcctgggactatatgcagagtgatttgggagagcttcccgtcgacgcacgatttcctcctcgcgttccaaagtcatttccctttaacacaagccaggtgtacaagaagacgctcttcgtcgaattcaccgatcacctgttcaatatcgccaaacccagaccaccatggatgggtcttttggggcctaccatacaagcggaggtgtatgacacagttgttatcactctcaagaacatggcttctcatccggtaagtcttcacgcagtgggcgtgtcctactggaaagcttcagaaggagccgagtatgatgatcagacatcccagagggagaaagaagacgacaaggtatttccaggtgggtctcatacctatgtgtggcaagtgctcaaagagaatggccctatgcatagcgatccgccgtgtttgacttacagctacctttcacacgttgacctcgtcaaggacctcaactccgggttgattggagccttgttggtatgcagggaaggatctcttgccaaagagaagacacagaccctggccaagtttatccttctctttgctgtgttcgatgagggcaaaagttggcatagcgaaacgaagaattccctcatgcaggatcgcgacgcagccagcgccagagcttggcccaagatgcacactgtgaacggatatgtcaataggacgcttcctggcttgattgggtgtcatcggaaaagtgtctactggcacgtgatcggaatggggacaacaccagaggtccactccatatttctcgaaggccataccttccttgttcgaaaccacagacaggcatccttggggatctctcccattacctttctcactgcccaaacgctccttcgtgacttgggtcagttccttctcttttgccatatcccgtcacaccagcatgatggtatggaagcttatgtgaaagtcgacagttgtcctgaggagccacagttgcgcatgaagaataatgaagaagccgaggattacgacgacgatctcaccgattctgagatggacgtggtgaggtttgatgacgacaactctccctccatcattcaagctcggagcggggcgaagaaacaccccaagacttgggtccactatatagcggcggaagaggaggattgggattacgctcctcttgtattggcaccagatgaccgctcatacaaaagccagtacctcaacaacggaccgcagagaattggccggaagtataagaaagtgcgatttatggcctatacagacgaaacctttaagacaagggaggccatccagcatgagagtgggattttgggacctcttctttacggcgaagttggtgataccctcctcatcatcttcaagaatcaagcttctcgcccctataacatttacccacacgggatcactgacgttaggcctttgtatagcagaagacttcccaaaggcgtgaagcatctcaaagacttccccattttgccaggcgagatctttaagtacaaatggaccattacagtggaagatggaccgactaaatcagaccctcgatgccttacgcggtactattcctccttcgtgaattgggagagagatttggcaagcggactcataggaccactcctcatctgttacaaggaatctgtagaccagaggggtaaccagattatgagtgataaacgcaatgtgatcctttttagcgtcttcgacgagaaccggtcctggtacttgaccgagaatatacaaaggttccttcccaaccccgcaggcgttcagttggaagaccctgagtttcaggccagcaatattatgcactcaatcaacggctatgtgtttgatagtctccagctttctgtttgcctccatgaagtagcctattggtacatcttgtcaattggtgctcaaacagacttcctctccgtcttcttctccggctacacctttaagcacaagggcgtgtatgaggacactctcacactctttccattttctggagaaaccgtgttcatgagcatggagaatccaggcctttggatcttgggttgccacaacagtgattttcgcaatcggggaatgactgctctcctcaaagtcagcagctgtgattggaacacaggcgactattacgaagattcttacgaggacataagtgcctactttgactccaagaataacgccattgagcccagatcattctcccagaatcctcccgtgcttaaaaggcatcagcgcgaaggtaccagaactactcttcagtctgatcaagaggagattgactatgacgacaccattagcgtggaaatgaagaaggaggatttcgatatctatgacgaagatgagaaccagtctccgcggagctttcagaagaagacgcgacactacttcattgcagcagtcgaaaggctttgggactacggtatgtcatcatcccctcatgtgttgcgcaatagagctcagagtggaagtgttccacagttcaagaaagtcgtctttcaagagtttacagatggcagcttcacacagcctctctatcggggcgagcttaacgaacatttgggactccttggtccctatatccgagccgaagtggaggacaacattatggttacctttaggaatcaagcctctcgcccctacagcttctactcctccctcatcagttatgaggaggatcagagacaaggcgctgaaccacggaagaactttgtgaaaccgaatgagacgaagacctacttctggaaagtacagcaccacatggcccccacaaaagacgaattcgattgcaaagcatgggcgtatttttcagacgttgacttggagaaagatgtacattcaggacttattggtcctttgttggtgtgtcacactaacactctcaatccagcccatggcaggcaggtgacagtccaggaattcgctcttttctttaccatctttgatgagaccaagtcctggtacttcacggaaaacatggagcgcaattgcagagccccctgtaacatacagatggaggaccctacctttaaggaaaattatcggttccacgcaatcaacggatacattatggatacactccctggccttgtgatggctcaggaccaacgaatcaggtggtacctcctcagcatgggttctaatgagaacatacactccattcacttttcaggacatgtgttcactgtccggaagaaagaagagtataagatggccctctacaatttgtatccaggcgtgtttgagaccgttgaaatgcttccctctaaagctggcatctggagagtagagtgcttgatcggagaacatcttcacgcaggtatgagcaccttgttcctcgtgtacagcaacaaatgtcagaatccacttggcatggccagtggacacattcgcgactttcagatcacagcatctggccagtatggacaatgggccccaaagttggctcgcctccattactccggtagcataaatgcgtggtccactaaagaacctttcagctggattaaggtcgatcttcttgcccccatgatcatccacggcattaagacacagggagcgaggcagaaattctcctccctctacatctcacagttcattattatgtatagtttggacggcaagaagtggcaaacttatagaggtaacagtactggaacagacatggtgttcttcggcaacgttgatagctctggcatcaaacacaacatctttaatcctcccataatagctcggtacatcagattgcatccgacccactacagcattaggagtacactccgaatggagcttatgggttgcgacttgaattcctgttcaatgccactcggaatggagtctaaagccatctctgatgcacagataaccgccagtagctactttacgaacatgtttgctacgtggtcaccctctaaggcaaggcttcatttgcaaggccggtctaatgcctggagacctcaggtgaacaacccgaaagaatggctccaggtggactttcagaagaccatgaaagtaacaggtgtcactactcagggagttaagtccttggatactagcatgtatgtgaaggagttccttatttcctcatcacaagatggccaccagtggaccctcttctttcagaatggtaaggtcaaagtgtttcagggcaatcaagacagcttcacacccgtggtgaacagtcttgatcctccactcttgacacgataccttcgaatccatccacagtcttgggagcaccagattgcattgcgcatggaagtacttggatgcgaggctcaggacctctac

SEQ ID NO: 1952 - protein, 1457 aa, synthetic construct
  REGION 1..1457: note = Variant of human B-domain deleted Factor VIII
MQIELSTCFFLCLLRFCFSATRRYYLGAVELSWDYMQSDLGELPVDARFPPRVPKSFPFNTSQVYKKTLFVEFTDHLFNIAKPRPPWMGLLGPTIQAEVYDTVVITLKNMASHPVSLHAVGVSYWKASEGAEYDDQTSQREKEDDKVFPGGSHTYVWQVLKENGPMHSDPPCLTYSYLSHVDLVKDLNSGLIGALLVCREGSLAKEKTQTLAKFILLFAVFDEGKSWHSETKNSLMQDRDAASARAWPKMHTVNGYVNRTLPGLIGCHRKSVYWHVIGMGTTPEVHSIFLEGHTFLVRNHRQASLGISPITFLTAQTLLRDLGQFLLFCHIPSHQHDGMEAYVKVDSCPEEPQLRMKNNEEAEDYDDDLTDSEMDVVRFDDDNSPSIIQARSGAKKHPKTWVHYIAAEEEDWDYAPLVLAPDDRSYKSQYLNNGPQRIGRKYKKVRFMAYTDETFKTREAIQHESGILGPLLYGEVGDTLLIIFKNQASRPYNIYPHGITDVRPLYSRRLPKGVKHLKDFPILPGEIFKYKWTITVEDGPTKSDPRCLTRYYSSFVNWERDLASGLIGPLLICYKESVDQRGNQIMSDKRNVILFSVFDENRSWYLTENIQRFLPNPAGVQLEDPEFQASNIMHSINGYVFDSLQLSVCLHEVAYWYILSIGAQTDFLSVFFSGYTFKHKGVYEDTLTLFPFSGETVFMSMENPGLWILGCHNSDFRNRGMTALLKVSSCDWNTGDYYEDSYEDISAYFDSKNNAIEPRSFSQNPPVLKRHQREGTRTTLQSDQEEIDYDDTISVEMKKEDFDIYDEDENQSPRSFQKKTRHYFIAAVERLWDYGMSSSPHVLRNRAQSGSVPQFKKVVFQEFTDGSFTQPLYRGELNEHLGLLGPYIRAEVEDNIMVTFRNQASRPYSFYSSLISYEEDQRQGAEPRKNFVKPNETKTYFWKVQHHMAPTKDEFDCKAWAYFSDVDLEKDVHSGLIGPLLVCHTNTLNPAHGRQVTVQEFALFFTIFDETKSWYFTENMERNCRAPCNIQMEDPTFKENYRFHAINGYIMDTLPGLVMAQDQRIRWYLLSMGSNENIHSIHFSGHVFTVRKKEEYKMALYNLYPGVFETVEMLPSKAGIWRVECLIGEHLHAGMSTLFLVYSNKCQNPLGMASGHIRDFQITASGQYGQWAPKLARLHYSGSINAWSTKEPFSWIKVDLLAPMIIHGIKTQGARQKFSSLYISQFIIMYSLDGKKWQTYRGNSTGTDMVFFGNVDSSGIKHNIFNPPIIARYIRLHPTHYSIRSTLRMELMGCDLNSCSMPLGMESKAISDAQITASSYFTNMFATWSPSKARLHLQGRSNAWRPQVNNPKEWLQVDFQKTMKVTGVTTQGVKSLDTSMYVKEFLISSSQDGHQWTLFFQNGKVKVFQGNQDSFTPVVNSLDPPLLTRYLRIHPQSWEHQIALRMEVLGCEAQDLY

SEQ ID NO: 1953 - DNA, 4371 bp, synthetic construct
  misc_feature 1..4371: note = Variant of human B-domain deleted Factor VIII
  source 1..4371: mol_type = other DNA
atgcagattgaactgtctacctgcttcttcctctgtttgctgaggttctgctttagcgccactagacggtactaccttggcgctgtggagctgtcctgggactatatgcagagtgatttgggagagcttcccgtcgacgcacgatttcctcctcgcgttccaaagtcatttccctttaacacaagccaggtgtacaagaagacgctcttcgtcgaattcaccgatcacctgttcaatatcgccaaacccagaccaccatggatgggtcttttggggcctaccatacaagcggaggtgtatgacacagttgttatcactctcaagaacatggcttctcatccggtaagtcttcacgcagtgggcgtgtcctactggaaagcttcagaaggagccgagtatgatgatcagacatcccagagggagaaagaagacgacaaggtatttccaggtgggtctcatacctatgtgtggcaagtgctcaaagagaatggccctatggcaagcgatccgccgtgtttgacttacagctacctttcacacgttgacctcgtcaaggacctcaactccgggttgattggagccttgttggtatgcagggaaggatctcttgccaaagagaagacacagaccctggccaagtttatccttctctttgctgtgttcgatgagggcaaaagttggcatagcgaaacgaagaattccctcatgcaggatcgcgacgcagccagcgccagagcttggcccaagatgcacactgtgaacggatatgtcaataggacgcttcctggcttgattgggtgtcatcggaaaagtgtctactggcacgtgatcggaatggggacaacaccagaggtccactccatatttctcgaaggccataccttccttgttcgaaaccacagacaggcatccttggggatctctcccattacctttctcactgcccaaacgctccttcgtgacttgggtcagttccttctcttttgccatatcccgtcacaccagcatgatggtatggaagcttatgtgaaagtcgacagttgtcctgaggagccacagttgcgcatgaagaataatgaagaagccgaggattacgacgacgatctcaccgattctgagatggacgtggtgaggtttgatgacgacaactctccctccatcattcaagctcggagcggggcgaagaaacaccccaagacttgggtccactatatagcggcggaagaggaggattgggattacgctcctcttgtattggcaccagatgaccgctcatacaaaagccagtacctcaacaacggaccgcagagaattggccggaagtataagaaagtgcgatttatggcctatacagacgaaacctttaagacaagggaggccatccagcatgagagtgggattttgggacctcttctttacggcgaagttggtgataccctcctcatcatcttcaagaatcaagcttctcgcccctataacatttacccacacgggatcactgacgttaggcctttgtatagcagaagacttcccaaaggcgtgaagcatctcaaagacttccccattttgccaggcgagatctttaagtacaaatggaccattacagtggaagatggaccgactaaatcagaccctcgatgccttacgcggtactattcctccttcgtgaattgggagagagatttggcaagcggactcataggaccactcctcatctgttacaaggaatctgtagaccagaggggtaaccagattatgagtgataaacgcaatgtgatcctttttagcgtcttcgacgagaaccggtcctggtacttgaccgagaatatacaaaggttccttcccaaccccgcaggcgttcagttggaagaccctgagtttcaggccagcaatattatgcactcaatcaacggctatgtgtttgatagtctccagctttctgtttgcctccatgaagtagcctattggtacatcttgtcaattggtgctcaaacagacttcctctccgtcttcttctccggctacacctttaagcacaagggcgtgtatgaggacactctcacactctttccattttctggagaaaccgtgttcatgagcatggagaatccaggcctttggatcttgggttgccacaacagtgattttcgcaatcggggaatgactgctctcctcaaagtcagcagctgtgattggaacacaggcgactattacgaagattcttacgaggacataagtgcctactttgactccaagaataacgccattgagcccagatcattctcccagaatcctcccgtgcttaaaaggcatcagcgcgaaggtaccagaactactcttcagtctgatcaagaggagattgactatgacgacaccattagcgtggaaatgaagaaggaggatttcgatatctatgacgaagatgagaaccagtctccgcggagctttcagaagaagacgcgacactacttcattgcagcagtcgaaaggctttgggactacggtatgtcatcatcccctcatgtgttgcgcaatagagctcagagtggaagtgttccacagttcaagaaagtcgtctttcaagagtttacagatggcagcttcacacagcctctctatcggggcgagcttaacgaacatttgggactccttggtccctatatccgagccgaagtggaggacaacattatggttacctttaggaatcaagcctctcgcccctacagcttctactcctccctcatcagttatgaggaggatcagagacaaggcgctgaaccacggaagaactttgtgaaaccgaatgagacgaagacctacttctggaaagtacagcaccacatggcccccacaaaagacgaattcgattgcaaagcatgggcgtatttttcagacgttgacttggagaaagatgtacattcaggacttattggtcctttgttggtgtgtcacactaacactctcaatccagcccatggcaggcaggtgacagtccaggaattcgctcttttctttaccatctttgatgagaccaagtcctggtacttcacggaaaacatggagcgcaattgcagagccccctgtaacatacagatggaggaccctacctttaaggaaaattatcggttccacgcaatcaacggatacattatggatacactccctggccttgtgatggctcaggaccaacgaatcaggtggtacctcctcagcatgggttctaatgagaacatacactccattcacttttcaggacatgtgttcactgtccggaagcgggaagagtataagatggccctctacaatttgtatccaggcgtgtttgagaccgttgaaatgcttccctctaaagctggcatctggagagtagagtgcttgatcggagaacatcttcacgcaggtatgagcaccttgttcctcgtgtacagcaacaaatgtcagaatccacttggcatggccagtggacacattcgcgactttcagatcacagcatctggccagtatggacaatgggccccaaagttggctcgcctccattactccggtagcataaatgcgtggtccactaaagaacctttcagctggattaaggtcgatcttcttgcccccatgatcatccacggcattaagacacagggagcgaggcagaaattctcctccctctacatctcacagttcattattatgtatagtttggacggcaagaagtggcaaacttatagaggtaacagtactggaacagacatggtgttcttcggcaacgttgatagctctggcatcaaacacaacatctttaatcctcccataatagctcggtacatcagattgcatccgacccactacagcattaggagtacactccgaatggagcttatgggttgcgacttgaattcctgttcaatgccactcggaatggagtctaaagccatctctgatgcacagataaccgccagtagctactttacgaacatgtttgctacgtggtcaccctctaaggcaaggcttcatttgcaaggccggtctaatgcctggagacctcaggtgaacaacccgaaagaatggctccaggtggactttcagaagaccatgaaagtaacaggtgtcactactcagggagttaagtccttggatactagcatgtatgtgaaggagttccttatttcctcatcacaagatggccaccagtggaccctcttctttcagaatggtaaggtcaaagtgtttcagggcaatcaagacagcttcacacccgtggtgaacagtcttgatcctccactcttgacacgataccttcgaatccatccacagtcttgggagcaccagattgcattgcgcatggaagtacttggatgcgaggctcaggacctctac

SEQ ID NO: 1954 - protein, 1457 aa, synthetic construct
  REGION 1..1457: note = Variant of human B-domain deleted Factor VIII
MQIELSTCFFLCLLRFCFSATRRYYLGAVELSWDYMQSDLGELPVDARFPPRVPKSFPFNTSQVYKKTLFVEFTDHLFNIAKPRPPWMGLLGPTIQAEVYDTVVITLKNMASHPVSLHAVGVSYWKASEGAEYDDQTSQREKEDDKVFPGGSHTYVWQVLKENGPMASDPPCLTYSYLSHVDLVKDLNSGLIGALLVCREGSLAKEKTQTLAKFILLFAVFDEGKSWHSETKNSLMQDRDAASARAWPKMHTVNGYVNRTLPGLIGCHRKSVYWHVIGMGTTPEVHSIFLEGHTFLVRNHRQASLGISPITFLTAQTLLRDLGQFLLFCHIPSHQHDGMEAYVKVDSCPEEPQLRMKNNEEAEDYDDDLTDSEMDVVRFDDDNSPSIIQARSGAKKHPKTWVHYIAAEEEDWDYAPLVLAPDDRSYKSQYLNNGPQRIGRKYKKVRFMAYTDETFKTREAIQHESGILGPLLYGEVGDTLLIIFKNQASRPYNIYPHGITDVRPLYSRRLPKGVKHLKDFPILPGEIFKYKWTITVEDGPTKSDPRCLTRYYSSFVNWERDLASGLIGPLLICYKESVDQRGNQIMSDKRNVILFSVFDENRSWYLTENIQRFLPNPAGVQLEDPEFQASNIMHSINGYVFDSLQLSVCLHEVAYWYILSIGAQTDFLSVFFSGYTFKHKGVYEDTLTLFPFSGETVFMSMENPGLWILGCHNSDFRNRGMTALLKVSSCDWNTGDYYEDSYEDISAYFDSKNNAIEPRSFSQNPPVLKRHQREGTRTTLQSDQEEIDYDDTISVEMKKEDFDIYDEDENQSPRSFQKKTRHYFIAAVERLWDYGMSSSPHVLRNRAQSGSVPQFKKVVFQEFTDGSFTQPLYRGELNEHLGLLGPYIRAEVEDNIMVTFRNQASRPYSFYSSLISYEEDQRQGAEPRKNFVKPNETKTYFWKVQHHMAPTKDEFDCKAWAYFSDVDLEKDVHSGLIGPLLVCHTNTLNPAHGRQVTVQEFALFFTIFDETKSWYFTENMERNCRAPCNIQMEDPTFKENYRFHAINGYIMDTLPGLVMAQDQRIRWYLLSMGSNENIHSIHFSGHVFTVRKREEYKMALYNLYPGVFETVEMLPSKAGIWRVECLIGEHLHAGMSTLFLVYSNKCQNPLGMASGHIRDFQITASGQYGQWAPKLARLHYSGSINAWSTKEPFSWIKVDLLAPMIIHGIKTQGARQKFSSLYISQFIIMYSLDGKKWQTYRGNSTGTDMVFFGNVDSSGIKHNIFNPPIIARYIRLHPTHYSIRSTLRMELMGCDLNSCSMPLGMESKAISDAQITASSYFTNMFATWSPSKARLHLQGRSNAWRPQVNNPKEWLQVDFQKTMKVTGVTTQGVKSLDTSMYVKEFLISSSQDGHQWTLFFQNGKVKVFQGNQDSFTPVVNSLDPPLLTRYLRIHPQSWEHQIALRMEVLGCEAQDLY

SEQ ID NO: 1955 - DNA, 4371 bp, synthetic construct
  misc_feature 1..4371: note = Variant of human B-domain deleted Factor VIII
  source 1..4371: mol_type = other DNA
atgcagattgaactgtctacctgcttcttcctctgtttgctgaggttctgctttagcgccactagacggtactaccttggcgctgtggagctgtcctgggactatatgcagagtgatttgggagagcttcccgtcgacgcacgatttcctcctcgcgttccaaagtcatttccctttaacacaagccaggtgtacaagaagacgctcttcgtcgaattcaccgatcacctgttcaatatcgccaaacccagaccaccatggatgggtcttttggggcctaccatacaagcggaggtgtatgacacagttgttatcactctcaagaacatggcttctcatccggtaagtcttcacgcagtgggcgtgtcctactggaaagcttcagaaggagccgagtatgatgatcagacatcccagagggagaaagaagacgacaaggtatttccaggtgggtctcatacctatgtgtggcaagtgctcaaagagaatggccctatggcaagcgatccgccgtgtttgacttacagctacctttcacacgttgacctcgtcaaggacctcaactccgggttgattggagccttgttggtatgcagggaaggatctcttgccaaagagaagacacagaccctggccaagtttatccttctctttgctgtgttcgatgagggcaaaagttggcatagcgaaacgaagaattccctcatgcaggatcgcgacgcagccagcgccagagcttggcccaagatgcacactgtgaacggatatgtcaataggacgcttcctggcttgattgggtgtcatcggaaaagtgtctactggcacgtgatcggaatggggacaacaccagaggtccactccatatttctcgaaggccataccttccttgttcgaaaccacagacaggcatccttggggatctctcccattacctttctcactgcccaaacgctccttcgtgacttgggtcagttccttctcttttgccatatcccgtcacaccagcatgatggtatggaagcttatgtgaaagtcgacagttgtcctgaggagccacagttgcgcatgaagaataatgaagaagccgaggattacgacgacgatctcaccgattctgagatggacgtggtgaggtttgatgacgacaactctccctccatcattcaagctcggagcggggcgaagaaacaccccaagacttgggtccactatatagcggcggaagaggaggattgggattacgctcctcttgtattggcaccagatgaccgctcatacaaaagccagtacctcaacaacggaccgcagagaattggccggaagtataagaaagtgcgatttatggcctatacagacgaaacctttaagacaagggaggccatccagcatgagagtgggattttgggacctcttctttacggcgaagttggtgataccctcctcatcatcttcaagaatcaagcttctcgcccctataacatttacccacacgggatcactgacgttaggcctttgtatagcagaagacttcccaaaggcgtgaagcatctcaaagacttccccattttgccaggcgagatctttaagtacaaatggaccattacaccagaagatggaccgactaaatcagaccctcgatgccttacgcggtactattcctccgaagtgaattgggagagagatttggcaagcggactcataggaccactcctcatctgttacaaggaatctgtagaccagaggggtaaccagattatgagtgataaacgcaatgtgatcctttttagcgtcttcgacgagaaccggtcctggtacttgaccgagaatatacaaaggttccttcccaaccccgcagaggttcagttggaagaccctgagtttcaggccagcaatattatgcactcaatcaacggctatgtgtttgatagtctccagctttctgtttgcctccatgaagtagcctattggtacatcttgtcaattggtgctcaaacagacttcctctccgtcttcttctccggctacacctttaagcacaagggcgtgtatgaggacactctcacactctttccattttctggagaaaccgtgttcatgagcatggagaatccaggcctttggatcttgggttgccacaacagtgattttcgcaatcggggaatgactgctctcctcaaagtcagcagctgtgataagaacacaggcgactattacgaagattcttacgaggacataagtgcctactttgactccaagaataacgccattgagcccagatcattctcccagaatcctcccgtgcttaaaaggcatcagcgcgaaggtaccagaactactcttcagtctgatcaagaggagattgactatgacgacaccattagcgtggaaatgaagagcgaggatttcgatatccaggacgaagatgagaaccagtctccgcggagctttcagaagaagacgcgacactacttcattgcagcagtcgaaaggctttgggactacggtatgtcatcaagtcctcatgtgttgcgcaatagagctcagagtggaagtgttccacagttcaagaaagtcgtctttcaagagtttacagatggcagcttcacacagcctctctatcggggcgagcttaacgaacatttgggactccttggtccctatatccgagccgaagtggaggacaacattatggttacctttaggaatcaagcctctcgcccctacagcttctactcctccctcatcagttatgaggaggatcagagacaaggcgctgaaccacggaagaactttgtgaaaccgaatgagacgaagacctacttctggaaagtacagcaccacatggcccccacaaaagacgaattcgattgcaaagcatgggcgtatttttcagacgttgacttggagaaagatgtacattcaggacttattggtcctttgttggtgtgtcacactaacactctcaatccagcccatggcaggcaggtgacagtccaggaattcgctcttttctttaccatctttgatgagaccaagtcctggtacttcacggaaaacatggagcgcaattgcagagccccctgtaacatacagatggaggaccctacctttaaggaaaattatcggttccacgcaatcaacggatacattatggatacactccctggccttgtgatggctcaggaccaacgaatcaggtggtacctcctcagcatgggttctaatgagaacatacactccattcacttttcaggacatgtgttcactgtccggaagaaagaagagtataagatggccctctacaatttgtatccaggcgtgtttgagaccgttgaaatgcttccctctaaagctggcatctggagagtagagtgcttgatcggagaacatcttcacgcaggtatgagcaccttgttcctcgtgtacagcaacaaatgtcagaatccacttggcatggccagtggacacattcgcgactttcagatcacagcatctggccagtatggacaatgggccccaaagttggctcgcctccattactccggtagcataaatgcgtggtccactaaagaacctttcagctggattaaggtcgatcttcttgcccccatgatcatccacggcattaagacacagggagcgaggcagaaattctcctccctctacatctcacagttcattattatgtatagtttggacggcaagaagtggcaaacttatagaggtaacagtactggaacagacatggtgttcttcggcaacgttgatagctctggcatcaaacacaacatctttaatcctcccataatagctcggtacatcagattgcatccgacccactacagcattaggagtacactccgaatggagcttatgggttgcgacttgaattcctgttcaatgccactcggaatggagtctaaagccatctctgatgcacagataaccgccagtagctactttacgaacatgtttgctacgtggtcaccctctaaggcaaggcttcatttgcaaggccggtctaatgcctggagacctcaggtgaacaacccgaaagaatggctccaggtggactttcagaagaccatgaaagtaacaggtgtcactactcagggagttaagtccttggatactagcatgtatgtgaaggagttccttatttcctcatcacaagatggccaccagtggaccctcttctttcagaatggtaaggtcaaagtgtttcagggcaatcaagacagcttcacacccgtggtgaacagtcttgatcctccactcttgacacgataccttcgaatccatccacagtcttgggagcaccagattgcattgcgcatggaagtacttggatgcgaggctcaggacctctac

SEQ ID NO: 1956 - protein, 1457 aa, synthetic construct
  REGION 1..1457: note = Variant of human B-domain deleted Factor VIII
MQIELSTCFFLCLLRFCFSATRRYYLGAVELSWDYMQSDLGELPVDARFPPRVPKSFPFNTSQVYKKTLFVEFTDHLFNIAKPRPPWMGLLGPTIQAEVYDTVVITLKNMASHPVSLHAVGVSYWKASEGAEYDDQTSQREKEDDKVFPGGSHTYVWQVLKENGPMASDPPCLTYSYLSHVDLVKDLNSGLIGALLVCREGSLAKEKTQTLAKFILLFAVFDEGKSWHSETKNSLMQDRDAASARAWPKMHTVNGYVNRTLPGLIGCHRKSVYWHVIGMGTTPEVHSIFLEGHTFLVRNHRQASLGISPITFLTAQTLLRDLGQFLLFCHIPSHQHDGMEAYVKVDSCPEEPQLRMKNNEEAEDYDDDLTDSEMDVVRFDDDNSPSIIQARSGAKKHPKTWVHYIAAEEEDWDYAPLVLAPDDRSYKSQYLNNGPQRIGRKYKKVRFMAYTDETFKTREAIQHESGILGPLLYGEVGDTLLIIFKNQASRPYNIYPHGITDVRPLYSRRLPKGVKHLKDFPILPGEIFKYKWTITPEDGPTKSDPRCLTRYYSSEVNWERDLASGLIGPLLICYKESVDQRGNQIMSDKRNVILFSVFDENRSWYLTENIQRFLPNPAEVQLEDPEFQASNIMHSINGYVFDSLQLSVCLHEVAYWYILSIGAQTDFLSVFFSGYTFKHKGVYEDTLTLFPFSGETVFMSMENPGLWILGCHNSDFRNRGMTALLKVSSCDKNTGDYYEDSYEDISAYFDSKNNAIEPRSFSQNPPVLKRHQREGTRTTLQSDQEEIDYDDTISVEMKSEDFDIQDEDENQSPRSFQKKTRHYFIAAVERLWDYGMSSSPHVLRNRAQSGSVPQFKKVVFQEFTDGSFTQPLYRGELNEHLGLLGPYIRAEVEDNIMVTFRNQASRPYSFYSSLISYEEDQRQGAEPRKNFVKPNETKTYFWKVQHHMAPTKDEFDCKAWAYFSDVDLEKDVHSGLIGPLLVCHTNTLNPAHGRQVTVQEFALFFTIFDETKSWYFTENMERNCRAPCNIQMEDPTFKENYRFHAINGYIMDTLPGLVMAQDQRIRWYLLSMGSNENIHSIHFSGHVFTVRKKEEYKMALYNLYPGVFETVEMLPSKAGIWRVECLIGEHLHAGMSTLFLVYSNKCQNPLGMASGHIRDFQITASGQYGQWAPKLARLHYSGSINAWSTKEPFSWIKVDLLAPMIIHGIKTQGARQKFSSLYISQFIIMYSLDGKKWQTYRGNSTGTDMVFFGNVDSSGIKHNIFNPPIIARYIRLHPTHYSIRSTLRMELMGCDLNSCSMPLGMESKAISDAQITASSYFTNMFATWSPSKARLHLQGRSNAWRPQVNNPKEWLQVDFQKTMKVTGVTTQGVKSLDTSMYVKEFLISSSQDGHQWTLFFQNGKVKVFQGNQDSFTPVVNSLDPPLLTRYLRIHPQSWEHQIALRMEVLGCEAQDLY

SEQ ID NO: 1957 - DNA, 4371 bp, synthetic construct
  misc_feature 1..4371: note = Variant of human B-domain deleted Factor VIII
  source 1..4371: mol_type = other DNA
atgcagattgaactgtctacctgcttcttcctctgtttgctgaggttctgctttagcgccactagacggtactaccttggcgctgtggagctgtcctgggactatatgcagagtgatttgggagagcttcccgtcgacgcacgatttcctcctcgcgttccaaagtcatttccctttaacacaagccaggtgtacaagaagacgctcttcgtcgaattcaccgatcacctgttcaatatcgccaaacccagaccaccatggatgggtcttttggggcctaccatacaagcggaggtgtatgacacagttgttatcactctcaagaacatggcttctcatccggtaagtcttcacgcagtgggcgtgtcctactggaaagcttcagaaggagccgagtatgatgatcagacatcccagagggagaaagaagacgacaaggtatttccaggtgggtctcatacctatgtgtggcaagtgctcaaagagaatggccctatggcaagcgatccgccgtgtttgacttacagctacctttcacacgttgacctcgtcaaggacctcaactccgggttgattggagccttgttggtatgcagggaaggatctcttgccaaagagaagacacagaccctggccaagtttatccttctctttgctgtgttcgatgagggcaaaagttggcatagcgaaacgaagaattccctcatgcaggatcgcgacgcagccagcgccagagcttggcccaagatgcacactgtgaacggatatgtcaataggacgcttcctggcttgattgggtgtcatcggaaaagtgtctactggcacgtgatcggaatggggacaacaccagaggtccactccatatttctcgaaggccataccttccttgttcgaaaccacagacaggcatccttggggatctctcccattacctttctcactgcccaaacgctccttcgtgacttgggtcagttccttctcttttgccatatcccgtcacaccagcatgatggtatggaagcttatgtgaaagtcgacagttgtcctgaggagccacagttgcgcatgaagaataatgaagaagccgaggattacgacgacgatctcaccgattctgagatggacgtggtgaggtttgatgacgacaactctccctccatcattcaagctcggagcggggcgaagaaacaccccaagacttgggtccactatatagcggcggaagaggaggattgggattacgctcctcttgtattggcaccagatgaccgctcatacaaaagccagtacctcaacaacggaccgcagagaattggccggaagtataagaaagtgcgatttatggcctatacagacgaaacctttaagacaagggaggccatccagcatgagagtgggattttgggacctcttctttacggcgaagttggtgataccctcctcatcatcttcaagaatcaagcttctcgcccctataacatttacccacacgggatcactgacgttaggcctttgtatagcagaagacttcccaaaggcgtgaagcatctcaaagacttccccattttgccaggcgagatctttaagtacaaatggaccattacagtggaagatggaccgactaaatcagaccctcgatgccttacgcggtactattcctccgaagtgaattgggagagagatttggcaagcggactcataggaccactcctcatctgttacaaggaatctgtagaccagaggggtaaccagattatgagtgataaacgcaatgtgatcctttttagcgtcttcgacgagaaccggtcctggtacttgaccgagaatatacaaaggttccttcccaaccccgcagaggttcagttggaagaccctgagtttcaggccagcaatattatgcactcaatcaacggctatgtgtttgatagtctccagctttctgtttgcctccatgaagtagcctattggtacatcttgtcaattggtgctcaaacagacttcctctccgtcttcttctccggctacacctttaagcacaagggcgtgtatgaggacactctcacactctttccattttctggagaaaccgtgttcatgagcatggagaatccaggcctttggatcttgggttgccacaacagtgattttcgcaatcggggaatgactgctctcctcaaagtcagcagctgtgattggaacacaggcgactattacgaagattcttacgaggacataagtgcctactttgactccaagaataacgccattgagcccagatcattctcccagaatcctcccgtgcttaaaaggcatcagcgcgaaggtaccagaactactcttcagtctgatcaagaggagattgactatgacgacaccattagcgtggaaatgaagaaagagggtttcgatatctatgacgaagatgagaaccagtctccgcggagctttcagaagaagacgcgacactacttcattgcagcagtcgaaaggctttgggactacggtatgtcatcatcccctcatgtgttgcgcaatagagctcagagtggaagtgttccacagttcaagaaagtcgtctttcaagagtttacagatggcagcttcacacagcctctctatcggggcgagcttaacgaacatttgggactccttggtccctatatccgagccgaagtggaggacaacattatggttacctttaggaatcaagcctctcgcccctacagcttctactcctccctcatcagttatgaggaggatcagagacaaggcgctgaaccacggaagaactttgtgaaaccgaatgagacgaagacctacttctggaaagtacagcaccacatggcccccacaaaagacgaattcgattgcaaagcatgggcgtatttttcagacgttgacttggagaaagatgtacattcaggacttattggtcctttgttggtgtgtcacactaacactctcaatccagcccatggcaggcaggtgacagtccaggaattcgctcttttctttaccatctttgatgagaccaagtcctggtacttcacggaaaacatggagcgcaattgcagagccccctgtaacatacagatggaggaccctacctttaaggaaaattatcggttccacgcaatcaacggatacattatggatacactccctggccttgtgatggctcaggaccaacgaatcaggtggtacctcctcagcatgggttctaatgagaacatacactccattcacttttcaggacatgtgttcactgtccggaagaaagaagagtataagatggccctctacaatttgtatccaggcgtgtttgagaccgttgaaatgcttccctctaaagctggcatctggagagtagagtgcttgatcggagaacatcttcacgcaggtatgagcaccttgttcctcgtgtacagcaacaaatgtcagaatccacttggcatggccagtggacacattcgcgactttcagatcacagcatctggccagtatggacaatgggccccaaagttggctcgcctccattactccggtagcataaatgcgtggtccactaaagaacctttcagctggattaaggtcgatcttcttgcccccatgatcatccacggcattaagacacagggagcgaggcagaaattctcctccctctacatctcacagttcattattatgtatagtttggacggcaagaagtggcaaacttatagaggtaacagtactggaacagacatggtgttcttcggcaacgttgatagctctggcatcaaacacaacatctttaatcctcccataatagctcggtacatcagattgcatccgacccactacagcattaggagtacactccgaatggagcttatgggttgcgacttgaattcctgttcaatgccactcggaatggagtctaaagccatctctgatgcacagataaccgccagtagctactttacgaacatgtttgctacgtggtcaccctctaaggcaaggcttcatttgcaaggccggtctaatgcctggagacctcaggtgaacaacccgaaagaatggctccaggtggactttcagaagaccatgaaagtaacaggtgtcactactcagggagttaagtccttggatactagcatgtatgtgaaggagttccttatttcctcatcacaagatggccaccagtggaccctcttctttcagaatggtaaggtcaaagtgtttcagggcaatcaagacagcttcacacccgtggtgaacagtcttgatcctccactcttgacacgataccttcgaatccatccacagtcttgggagcaccagattgcattgcgcatggaagtacttggatgcgaggctcaggacctctac

SEQ ID NO: 1958 - protein, 1457 aa, synthetic construct
  REGION 1..1457: note = Variant of human B-domain deleted Factor VIII
MQIELSTCFFLCLLRFCFSATRRYYLGAVELSWDYMQSDLGELPVDARFPPRVPKSFPFNTSQVYKKTLFVEFTDHLFNIAKPRPPWMGLLGPTIQAEVYDTVVITLKNMASHPVSLHAVGVSYWKASEGAEYDDQTSQREKEDDKVFPGGSHTYVWQVLKENGPMASDPPCLTYSYLSHVDLVKDLNSGLIGALLVCREGSLAKEKTQTLAKFILLFAVFDEGKSWHSETKNSLMQDRDAASARAWPKMHTVNGYVNRTLPGLIGCHRKSVYWHVIGMGTTPEVHSIFLEGHTFLVRNHRQASLGISPITFLTAQTLLRDLGQFLLFCHIPSHQHDGMEAYVKVDSCPEEPQLRMKNNEEAEDYDDDLTDSEMDVVRFDDDNSPSIIQARSGAKKHPKTWVHYIAAEEEDWDYAPLVLAPDDRSYKSQYLNNGPQRIGRKYKKVRFMAYTDETFKTREAIQHESGILGPLLYGEVGDTLLIIFKNQASRPYNIYPHGITDVRPLYSRRLPKGVKHLKDFPILPGEIFKYKWTITVEDGPTKSDPRCLTRYYSSEVNWERDLASGLIGPLLICYKESVDQRGNQIMSDKRNVILFSVFDENRSWYLTENIQRFLPNPAEVQLEDPEFQASNIMHSINGYVFDSLQLSVCLHEVAYWYILSIGAQTDFLSVFFSGYTFKHKGVYEDTLTLFPFSGETVFMSMENPGLWILGCHNSDFRNRGMTALLKVSSCDWNTGDYYEDSYEDISAYFDSKNNAIEPRSFSQNPPVLKRHQREGTRTTLQSDQEEIDYDDTISVEMKKEGFDIYDEDENQSPRSFQKKTRHYFIAAVERLWDYGMSSSPHVLRNRAQSGSVPQFKKVVFQEFTDGSFTQPLYRGELNEHLGLLGPYIRAEVEDNIMVTFRNQASRPYSFYSSLISYEEDQRQGAEPRKNFVKPNETKTYFWKVQHHMAPTKDEFDCKAWAYFSDVDLEKDVHSGLIGPLLVCHTNTLNPAHGRQVTVQEFALFFTIFDETKSWYFTENMERNCRAPCNIQMEDPTFKENYRFHAINGYIMDTLPGLVMAQDQRIRWYLLSMGSNENIHSIHFSGHVFTVRKKEEYKMALYNLYPGVFETVEMLPSKAGIWRVECLIGEHLHAGMSTLFLVYSNKCQNPLGMASGHIRDFQITASGQYGQWAPKLARLHYSGSINAWSTKEPFSWIKVDLLAPMIIHGIKTQGARQKFSSLYISQFIIMYSLDGKKWQTYRGNSTGTDMVFFGNVDSSGIKHNIFNPPIIARYIRLHPTHYSIRSTLRMELMGCDLNSCSMPLGMESKAISDAQITASSYFTNMFATWSPSKARLHLQGRSNAWRPQVNNPKEWLQVDFQKTMKVTGVTTQGVKSLDTSMYVKEFLISSSQDGHQWTLFFQNGKVKVFQGNQDSFTPVVNSLDPPLLTRYLRIHPQSWEHQIALRMEVLGCEAQDLY

SEQ ID NO: 1959 - DNA, 4371 bp, synthetic construct
  misc_feature 1..4371: note = Variant of human B-domain deleted Factor VIII
  source 1..4371: mol_type = other DNA
atgcagattgaactgtctacctgcttcttcctctgtttgctgaggttctgctttagcgccactagacggtactaccttggcgctgtggagctgtcctgggactatatgcagagtgatttgggagagcttcccgtcgacgcacgatttcctcctcgcgttccaaagtcatttccctttaacacaagccaggtgtacaagaagacgctcttcgtcgaattcaccgatcacctgttcaatatcgccaaacccagaccaccatggatgggtcttttggggcctaccatacaagcggaggtgtatgacacagttgttatcactctcaagaacatggcttctcatccggtaagtcttcacgcagtgggcgtgtcctactggaaagcttcagaaggagccgagtatgatgatcagacatcccagagggagaaagaagacgacaaggtatttccaggtgggtctcatacctatgtgtggcaagtgctcaaagagaatggccctatggcaagcgatccgccgtgtttgacttacagctacctttcacacgttgacctcgtcaaggacctcaactccgggttgattggagccttgttggtatgcagggaaggatctcttgccaaagagaagacacagaccctggccaagtttatccttctctttgctgtgttcgatgagggcaaaagttggcatagcgaaacgaagaattccctcatgcaggatcgcgacgcagccagcgccagagcttggcccaagatgcacactgtgaacggatatgtcaataggacgcttcctggcttgattgggtgtcatcggaaaagtgtctactggcacgtgatcggaatggggacaacaccagaggtccactccatatttctcgaaggccataccttccttgttcgaaaccacagacaggcatccttggggatctctcccattacctttctcactgcccaaacgctccttcgtgacttgggtcagttccttctcttttgccatatcccgtcacaccagcatgatggtatggaagcttatgtgaaagtcgacagttgtcctgaggagccacagttgcgcatgaagaataatgaagaagccgaggattacgacgacgatctcaccgattctgagatggacgtggtgaggtttgatgacgacaactctccctccatcattcaagctcggagcggggcgaagaaacaccccaagacttgggtccactatatagcggcggaagaggaggattgggattacgctcctcttgtattggcaccagatgaccgctcatacaaaagccagtacctcaacaacggaccgcagagaattggccggaagtataagaaagtgcgatttatggcctatacagacgaaacctttaagacaagggaggccatccagcatgagagtgggattttgggacctcttctttacggcgaagttggtgataccctcctcatcatcttcaagaatcaagcttctcgcccctataacatttacccacacgggatcactgacgttaggcctttgtatagcagaagacttcccaaaggcgtgaagcatctcaaagacttccccattttgccaggcgagatctttaagtacaaatggaccattacagtggaagatggaccgactaaatcagaccctcgatgccttacgcggtactattcctccgaagtgaattgggagagagatttggcaagcggactcataggaccactcctcatctgttacaaggaatctgtagaccagaggggtaaccagattatgagtgataaacgcaatgtgatcctttttagcgtcttcgacgagaaccggtcctggtacttgaccgagaatatacaaaggttccttcccaaccccgcagaggttcagttggaagaccctgagtttcaggccagcaatattatgcactcaatcaacggctatgtgtttgatagtctccagctttctgtttgcctccatgaagtagcctattggtacatcttgtcaattggtgctcaaacagacttcctctccgtcttcttctccggctacacctttaagcacaagggcgtgtatgaggacactctcacactctttccattttctggagaaaccgtgttcatgagcatggagaatccaggcctttggatcttgggttgccacaacagtgattttcgcaatcggggaatgactgctctcctcaaagtcagcagctgtgattggaacacaggcgactattacgaagattcttacgaggacataagtgcctactttgactccaagaataacgccattgagcccagatcattctcccagaatcctcccgtgcttaaaaggcatcagcgcgaaggtaccagaactactcttcagtctgatcaagaggagattgactatgacgacaccattagcgtggaaatgaagagcgaggatttcgatatctatgacgaagatgagaaccagtctccgcggagctttcagaagaagacgcgacactacttcattgcagcagtcgaaaggctttgggactacggtatgtcatcaagtcctcatgtgttgcgcaatagagctcagagtggaagtgttccacagttcaagaaagtcgtctttcaagagtttacagatggcagcttcacacagcctctctatcggggcgagcttaacgaacatttgggactccttggtccctatatccgagccgaagtggaggacaacattatggttacctttaggaatcaagcctctcgcccctacagcttctactcctccctcatcagttatgaggaggatcagagacaaggcgctgaaccacggaagaactttgtgaaaccgaatgagacgaagacctacttctggaaagtacagcaccacatggcccccacaaaagacgaattcgattgcaaagcatgggcgtatttttcagacgttgacttggagaaagatgtacattcaggacttattggtcctttgttggtgtgtcacactaacactctcaatccagcccatggcaggcaggtgacagtccaggaattcgctcttttctttaccatctttgatgagaccaagtcctggtacttcacggaaaacatggagcgcaattgcagagccccctgtaacatacagatggaggaccctacctttaaggaaaattatcggttccacgcaatcaacggatacattatggatacactccctggccttgtgatggctcaggaccaacgaatcaggtggtacctcctcagcatgggttctaatgagaacatacactccattcacttttcaggacatgtgttcactgtccggaagaaagaagagtataagatggccctctacaatttgtatccaggcgtgtttgagaccgttgaaatgcttccctctaaagctggcatctggagagtagagtgcttgatcggagaacatcttcacgcaggtatgagcaccttgttcctcgtgtacagcaacaaatgtcagaatccacttggcatggccagtggacacattcgcgactttcagatcacagcatctggccagtatggacaatgggccccaaagttggctcgcctccattactccggtagcataaatgcgtggtccactaaagaacctttcagctggattaaggtcgatcttcttgcccccatgatcatccacggcattaagacacagggagcgaggcagaaattctcctccctctacatctcacagttcattattatgtatagtttggacggcaagaagtggcaaacttatagaggtaacagtactggaacagacatggtgttcttcggcaacgttgatagctctggcatcaaacacaacatctttaatcctcccataatagctcggtacatcagattgcatccgacccactacagcattaggagtacactccgaatggagcttatgggttgcgacttgaattcctgttcaatgccactcggaatggagtctaaagccatctctgatgcacagataaccgccagtagctactttacgaacatgtttgctacgtggtcaccctctaaggcaaggcttcatttgcaaggccggtctaatgcctggagacctcaggtgaacaacccgaaagaatggctccaggtggactttcagaagaccatgaaagtaacaggtgtcactactcagggagttaagtccttggatactagcatgtatgtgaaggagttccttatttcctcatcacaagatggccaccagtggaccctcttctttcagaatggtaaggtcaaagtgtttcagggcaatcaagacagcttcacacccgtggtgaacagtcttgatcctccactcttgacacgataccttcgaatccatccacagtcttgggagcaccagattgcattgcgcatggaagtacttggatgcgaggctcaggacctctac

SEQ ID NO: 1960 - protein, 1457 aa, synthetic construct
  REGION 1..1457: note = Variant of human B-domain deleted Factor VIII
MQIELSTCFFLCLLRFCFSATRRYYLGAVELSWDYMQSDLGELPVDARFPPRVPKSFPFNTSQVYKKTLFVEFTDHLFNIAKPRPPWMGLLGPTIQAEVYDTVVITLKNMASHPVSLHAVGVSYWKASEGAEYDDQTSQREKEDDKVFPGGSHTYVWQVLKENGPMASDPPCLTYSYLSHVDLVKDLNSGLIGALLVCREGSLAKEKTQTLAKFILLFAVFDEGKSWHSETKNSLMQDRDAASARAWPKMHTVNGYVNRTLPGLIGCHRKSVYWHVIGMGTTPEVHSIFLEGHTFLVRNHRQASLGISPITFLTAQTLLRDLGQFLLFCHIPSHQHDGMEAYVKVDSCPEEPQLRMKNNEEAEDYDDDLTDSEMDVVRFDDDNSPSIIQARSGAKKHPKTWVHYIAAEEEDWDYAPLVLAPDDRSYKSQYLNNGPQRIGRKYKKVRFMAYTDETFKTREAIQHESGILGPLLYGEVGDTLLIIFKNQASRPYNIYPHGITDVRPLYSRRLPKGVKHLKDFPILPGEIFKYKWTITVEDGPTKSDPRCLTRYYSSEVNWERDLASGLIGPLLICYKESVDQRGNQIMSDKRNVILFSVFDENRSWYLTENIQRFLPNPAEVQLEDPEFQASNIMHSINGYVFDSLQLSVCLHEVAYWYILSIGAQTDFLSVFFSGYTFKHKGVYEDTLTLFPFSGETVFMSMENPGLWILGCHNSDFRNRGMTALLKVSSCDWNTGDYYEDSYEDISAYFDSKNNAIEPRSFSQNPPVLKRHQREGTRTTLQSDQEEIDYDDTISVEMKSEDFDIYDEDENQSPRSFQKKTRHYFIAAVERLWDYGMSSSPHVLRNRAQSGSVPQFKKVVFQEFTDGSFTQPLYRGELNEHLGLLGPYIRAEVEDNIMVTFRNQASRPYSFYSSLISYEEDQRQGAEPRKNFVKPNETKTYFWKVQHHMAPTKDEFDCKAWAYFSDVDLEKDVHSGLIGPLLVCHTNTLNPAHGRQVTVQEFALFFTIFDETKSWYFTENMERNCRAPCNIQMEDPTFKENYRFHAINGYIMDTLPGLVMAQDQRIRWYLLSMGSNENIHSIHFSGHVFTVRKKEEYKMALYNLYPGVFETVEMLPSKAGIWRVECLIGEHLHAGMSTLFLVYSNKCQNPLGMASGHIRDFQITASGQYGQWAPKLARLHYSGSINAWSTKEPFSWIKVDLLAPMIIHGIKTQGARQKFSSLYISQFIIMYSLDGKKWQTYRGNSTGTDMVFFGNVDSSGIKHNIFNPPIIARYIRLHPTHYSIRSTLRMELMGCDLNSCSMPLGMESKAISDAQITASSYFTNMFATWSPSKARLHLQGRSNAWRPQVNNPKEWLQVDFQKTMKVTGVTTQGVKSLDTSMYVKEFLISSSQDGHQWTLFFQNGKVKVFQGNQDSFTPVVNSLDPPLLTRYLRIHPQSWEHQIALRMEVLGCEAQDLY

SEQ ID NO: 1961 - DNA, 4371 bp, synthetic construct
  misc_feature 1..4371: note = Variant of human B-domain deleted Factor VIII
  source 1..4371: mol_type = other DNA
atgcagattgaactgtctacctgcttcttcctctgtttgctgaggttctgctttagcgccactagacggtactaccttggcgctgtggagctgtcctgggactatatgcagagtgatttgggagagcttcccgtcgacgcacgatttcctcctcgcgttccaaagtcatttccctttaacacaagccaggtgtacaagaagacgctcttcgtcgaattcaccgatcacctgttcaatatcgccaaacccagaccaccatggatgggtcttttggggcctaccatacaagcggaggtgtatgacacagttgttatcactctcaagaacatggcttctcatccggtaagtcttcacgcagtgggcgtgtcctactggaaagcttcagaaggagccgagtatgatgatcagacatcccagagggagaaagaagacgacaaggtatttccaggtgggtctcatacctatgtgtggcaagtgctcaaagagaatggccctatggcaagcgatccgccgtgtttgacttacagctacctttcacacgttgacctcgtcaaggacctcaactccgggttgattggagccttgttggtatgcagggaaggatctcttgccaaagagaagacacagaccctggccaagtttatccttctctttgctgtgttcgatgagggcaaaagttggcatagcgaaacgaagaattccctcatgcaggatcgcgacgcagccagcgccagagcttggcccaagatgcacactgtgaacggatatgtcaataggacgcttcctggcttgattgggtgtcatcggaaaagtgtctactggcacgtgatcggaatggggacaacaccagaggtccactccatatttctcgaaggccataccttccttgttcgaaaccacagacaggcatccttggggatctctcccattacctttctcactgcccaaacgctccttcgtgacttgggtcagttccttctcttttgccatatcccgtcacaccagcatgatggtatggaagcttatgtgaaagtcgacagttgtcctgaggagccacagttgcgcatgaagaataatgaagaagccgaggattacgacgacgatctcaccgattctgagatggacgtggtgaggtttgatgacgacaactctccctccatcattcaagctcggagcggggcgaagaaacaccccaagacttgggtccactatatagcggcggaagaggaggattgggattacgctcctcttgtattggcaccagatgaccgctcatacaaaagccagtacctcaacaacggaccgcagagaattggccggaagtataagaaagtgcgatttatggcctatacagacgaaacctttaagacaagggaggccatccagcatgagagtgggattttgggacctcttctttacggcgaagttggtgataccctcctcatcatcttcaagaatcaagcttctcgcccctataacatttacccacacgggatcactgacgttaggcctttgtatagcagaagacttcccaaaggcgtgaagcatctcaaagacttccccattttgccaggcgagatctttaagtacaaatggaccattacagtggaagatggaccgactaaatcagaccctcgatgccttacgcggtactattcctccttcgtgaattgggagagagatttggcaagcggactcataggaccactcctcatctgttacaaggaatctgtagaccagaggggtaaccagattatgagtgataaacgcaatgtgatcctttttagcgtcttcgacgagaaccggtcctggtacttgaccgagaatatacaaaggttccttcccaaccccgcagaggttcagttggaagaccctgagtttcaggccagcaatattatgcactcaatcaacggctatgtgtttgatagtctccagctttctgtttgcctccatgaagtagcctattggtacatcttgtcaattggtgctcaaacagacttcctctccgtcttcttctccggctacacctttaagcacaagggcgtgtatgaggacactctcacactctttccattttctggagaaaccgtgttcatgagcatggagaatccaggcctttggatcttgggttgccacaacagtgattttcgcaatcggggaatgactgctctcctcaaagtcagcagctgtgattggaacacaggcgactattacgaagattcttacgaggacataagtgcctactttgactccaagaataacgccattgagcccagatcattctcccagaatcctcccgtgcttaaaaggcatcagcgcgaaggtaccagaactactcttcagtctgatcaagaggagattgactatgacgacaccattagcgtggaaatgaagagcgagggtttcgatatccaggacgaagatgagaaccagtctccgcggagctttcagaagaagacgcgacactacttcattgcagcagtcgaaaggctttgggactacggtatgtcatcatcccctcatgtgttgcgcaatagagctcagagtggaagtgttccacagttcaagaaagtcgtctttcaagagtttacagatggcagcttcacacagcctctctatcggggcgagcttaacgaacatttgggactccttggtccctatatccgagccgaagtggaggacaacattatggttacctttaggaatcaagcctctcgcccctacagcttctactcctccctcatcagttatgaggaggatcagagacaaggcgctgaaccacggaagaactttgtgaaaccgaatgagacgaagacctacttctggaaagtacagcaccacatggcccccacaaaagacgaattcgattgcaaagcatgggcgtatttttcagacgttgacttggagaaagatgtacattcaggacttattggtcctttgttggtgtgtcacactaacactctcaatccagcccatggcaggcaggtgacagtccaggaattcgctcttttctttaccatctttgatgagaccaagtcctggtacttcacggaaaacatggagcgcaattgcagagccccctgtaacatacagatggaggaccctacctttaaggaaaattatcggttccacgcaatcaacggatacattatggatacactccctggccttgtgatggctcaggaccaacgaatcaggtggtacctcctcagcatgggttctaatgagaacatacactccattcacttttcaggacatgtgttcactgtccggaagaaagaagagtataagatggccctctacaatttgtatccaggcgtgtttgagaccgttgaaatgcttccctctaaagctggcatctggagagtagagtgcttgatcggagaacatcttcacgcaggtatgagcaccttgttcctcgtgtacagcaacaaatgtcagaatccacttggcatggccagtggacacattcgcgactttcagatcacagcatctggccagtatggacaatgggccccaaagttggctcgcctccattactccggtagcataaatgcgtggtccactaaagaacctttcagctggattaaggtcgatcttcttgcccccatgatcatccacggcattaagacacagggagcgaggcagaaattctcctccctctacatctcacagttcattattatgtatagtttggacggcaagaagtggcaaacttatagaggtaacagtactggaacagacatggtgttcttcggcaacgttgatagctctggcatcaaacacaacatctttaatcctcccataatagctcggtacatcagattgcatccgacccactacagcattaggagtacactccgaatggagcttatgggttgcgacttgaattcctgttcaatgccactcggaatggagtctaaagccatctctgatgcacagataaccgccagtagctactttacgaacatgtttgctacgtggtcaccctctaaggcaaggcttcatttgcaaggccggtctaatgcctggagacctcaggtgaacaacccgaaagaatggctccaggtggactttcagaagaccatgaaagtaacaggtgtcactactcagggagttaagtccttggatactagcatgtatgtgaaggagttccttatttcctcatcacaagatggccaccagtggaccctcttctttcagaatggtaaggtcaaagtgtttcagggcaatcaagacagcttcacacccgtggtgaacagtcttgatcctccactcttgacacgataccttcgaatccatccacagtcttgggagcaccagattgcattgcgcatggaagtacttggatgcgaggctcaggacctctac

SEQ ID NO: 1962 - protein, 1457 aa, synthetic construct
  REGION 1..1457: note = Variant of human B-domain deleted Factor VIII
MQIELSTCFFLCLLRFCFSATRRYYLGAVELSWDYMQSDLGELPVDARFPPRVPKSFPFNTSQVYKKTLFVEFTDHLFNIAKPRPPWMGLLGPTIQAEVYDTVVITLKNMASHPVSLHAVGVSYWKASEGAEYDDQTSQREKEDDKVFPGGSHTYVWQVLKENGPMASDPPCLTYSYLSHVDLVKDLNSGLIGALLVCREGSLAKEKTQTLAKFILLFAVFDEGKSWHSETKNSLMQDRDAASARAWPKMHTVNGYVNRTLPGLIGCHRKSVYWHVIGMGTTPEVHSIFLEGHTFLVRNHRQASLGISPITFLTAQTLLRDLGQFLLFCHIPSHQHDGMEAYVKVDSCPEEPQLRMKNNEEAEDYDDDLTDSEMDVVRFDDDNSPSIIQARSGAKKHPKTWVHYIAAEEEDWDYAPLVLAPDDRSYKSQYLNNGPQRIGRKYKKVRFMAYTDETFKTREAIQHESGILGPLLYGEVGDTLLIIFKNQASRPYNIYPHGITDVRPLYSRRLPKGVKHLKDFPILPGEIFKYKWTITVEDGPTKSDPRCLTRYYSSFVNWERDLASGLIGPLLICYKESVDQRGNQIMSDKRNVILFSVFDENRSWYLTENIQRFLPNPAEVQLEDPEFQASNIMHSINGYVFDSLQLSVCLHEVAYWYILSIGAQTDFLSVFFSGYTFKHKGVYEDTLTLFPFSGETVFMSMENPGLWILGCHNSDFRNRGMTALLKVSSCDWNTGDYYEDSYEDISAYFDSKNNAIEPRSFSQNPPVLKRHQREGTRTTLQSDQEEIDYDDTISVEMKSEGFDIQDEDENQSPRSFQKKTRHYFIAAVERLWDYGMSSSPHVLRNRAQSGSVPQFKKVVFQEFTDGSFTQPLYRGELNEHLGLLGPYIRAEVEDNIMVTFRNQASRPYSFYSSLISYEEDQRQGAEPRKNFVKPNETKTYFWKVQHHMAPTKDEFDCKAWAYFSDVDLEKDVHSGLIGPLLVCHTNTLNPAHGRQVTVQEFALFFTIFDETKSWYFTENMERNCRAPCNIQMEDPTFKENYRFHAINGYIMDTLPGLVMAQDQRIRWYLLSMGSNENIHSIHFSGHVFTVRKKEEYKMALYNLYPGVFETVEMLPSKAGIWRVECLIGEHLHAGMSTLFLVYSNKCQNPLGMASGHIRDFQITASGQYGQWAPKLARLHYSGSINAWSTKEPFSWIKVDLLAPMIIHGIKTQGARQKFSSLYISQFIIMYSLDGKKWQTYRGNSTGTDMVFFGNVDSSGIKHNIFNPPIIARYIRLHPTHYSIRSTLRMELMGCDLNSCSMPLGMESKAISDAQITASSYFTNMFATWSPSKARLHLQGRSNAWRPQVNNPKEWLQVDFQKTMKVTGVTTQGVKSLDTSMYVKEFLISSSQDGHQWTLFFQNGKVKVFQGNQDSFTPVVNSLDPPLLTRYLRIHPQSWEHQIALRMEVLGCEAQDLY

SEQ ID NO: 1963 - DNA, 4371 bp, synthetic construct
  misc_feature 1..4371: note = Variant of human B-domain deleted Factor VIII
  source 1..4371: mol_type = other DNA
atgcagattgaactgtctacctgcttcttcctctgtttgctgaggttctgctttagcgccactagacggtactaccttggcgctgtggagctgtcctgggactatatgcagagtgatttgggagagcttcccgtcgacgcacgatttcctcctcgcgttccaaagtcatttccctttaacacaagccaggtgtacaagaagacgctcttcgtcgaattcaccgatcacctgttcaatatcgccaaacccagaccaccatggatgggtcttttggggcctaccatacaagcggaggtgtatgacacagttgttatcactctcaagaacatggcttctcatccggtaagtcttcacgcagtgggcgtgtcctactggaaagcttcagaaggagccgagtatgatgatcagacatcccagagggagaaagaagacgacaaggtatttccaggtgggtctcatacctatgtgtggcaagtgctcaaagagaatggccctatggcaagcgatccgccgtgtttgacttacagctacctttcacacgttgacctcgtcaaggacctcaactccgggttgattggagccttgttggtatgcagggaaggatctcttgccaaagagaagacacagaccctggccaagtttatccttctctttgctgtgttcgatgagggcaaaagttggcatagcgaaacgaagaattccctcatgcaggatcgcgacgcagccagcgccagagcttggcccaagatgcacactgtgaacggatatgtcaataggacgcttcctggcttgattgggtgtcatcggaaaagtgtctactggcacgtgatcggaatggggacaacaccagaggtccactccatatttctcgaaggccataccttccttgttcgaaaccacagacaggcatccttggggatctctcccattacctttctcactgcccaaacgctccttcgtgacttgggtcagttccttctcttttgccatatcccgtcacaccagcatgatggtatggaagcttatgtgaaagtcgacagttgtcctgaggagccacagttgcgcatgaagaataatgaagaagccgaggattacgacgacgatctcaccgattctgagatggacgtggtgaggtttgatgacgacaactctccctccatcattcaagctcggagcggggcgaagaaacaccccaagacttgggtccactatatagcggcggaagaggaggattgggattacgctcctcttgtattggcaccagatgaccgctcatacaaaagccagtacctcaacaacggaccgcagagaattggccggaagtataagaaagtgcgatttatggcctatacagacgaaacctttaagacaagggaggccatccagcatgagagtgggattttgggacctcttctttacggcgaagttggtgataccctcctcatcatcttcaagaatcaagcttctcgcccctataacatttacccacacgggatcactgacgttaggcctttgtatagcagaagacttcccaaaggcgtgaagcatctcaaagacttccccattttgccaggcgagatctttaagtacaaatggaccattacaccagaagatggaccgactaaatcagaccctcgatgccttacgcggtactattcctccgaagtgaattgggagagagatttggcaagcggactcataggaccactcctcatctgttacaaggaatctgtagaccagaggggtaaccagattatgagtgataaacgcaatgtgatcctttttagcgtcttcgacgagaaccggtcctggtacttgaccgagaatatacaaaggttccttcccaaccccgcagaggttcagttggaagaccctgagtttcaggccagcaatattatgcactcaatcaacggctatgtgtttgatagtctccagctttctgtttgcctccatgaagtagcctattggtacatcttgtcaattggtgctcaaacagacttcctctccgtcttcttctccggctacacctttaagcacaagggcgtgtatgaggacactctcacactctttccattttctggagaaaccgtgttcatgagcatggagaatccaggcctttggatcttgggttgccacaacagtgattttcgcaatcggggaatgactgctctcctcaaagtcagcagctgtgataagaacacaggcgactattacgaagattcttacgaggacataagtgcctactttgactccaagaataacgccattgagcccagatcattctcccagaatcctcccgtgcttaaaaggcatcagcgcgaaggtaccagaactactcttcagtctgatcaagaggagattgactatgacgacaccattagcgtggaaatgaagagcgaggatttcgatatctatgacgaagatgagaaccagtctccgcggagctttcagaagaagacgcgacactacttcattgcagcagtcgaaaggctttgggactacggtatgtcatcatcccctcatgtgttgcgcaatagagctcagagtggaagtgttccacagttcaagaaagtcgtctttcaagagtttacagatggcagcttcacacagcctctctatcggggcgagcttaacgaacatttgggactccttggtccctatatccgagccgaagtggaggacaacattatggttacctttaggaatcaagcctctcgcccctacagcttctactcctccctcatcagttatgaggaggatcagagacaaggcgctgaaccacggaagaactttgtgaaaccgaatgagacgaagacctacttctggaaagtacagcaccacatggcccccacaaaagacgaattcgattgcaaagcatgggcgtatttttcagacgttgacttggagaaagatgtacattcaggacttattggtcctttgttggtgtgtcacactaacactctcaatccagcccatggcaggcaggtgacagtccaggaattcgctcttttctttaccatctttgatgagaccaagtcctggtacttcacggaaaacatggagcgcaattgcagagccccctgtaacatacagatggaggaccctacctttaaggaaaattatcggttccacgcaatcaacggatacattatggatacactccctggccttgtgatggctcaggaccaacgaatcaggtggtacctcctcagcatgggttctaatgagaacatacactccattcacttttcaggacatgtgttcactgtccggaagaaagaagagtataagatggccctctacaatttgtatccaggcgtgtttgagaccgttgaaatgcttccctctaaagctggcatctggagagtagagtgcttgatcggagaacatcttcacgcaggtatgagcaccttgttcctcgtgtacagcaacaaatgtcagaatccacttggcatggccagtggacacattcgcgactttcagatcacagcatctggccagtatggacaatgggccccaaagttggctcgcctccattactccggtagcataaatgcgtggtccactaaagaacctttcagctggattaaggtcgatcttcttgcccccatgatcatccacggcattaagacacagggagcgaggcagaaattctcctccctctacatctcacagttcattattatgtatagtttggacggcaagaagtggcaaacttatagaggtaacagtactggaacagacatggtgttcttcggcaacgttgatagctctggcatcaaacacaacatctttaatcctcccataatagctcggtacatcagattgcatccgacccactacagcattaggagtacactccgaatggagcttatgggttgcgacttgaattcctgttcaatgccactcggaatggagtctaaagccatctctgatgcacagataaccgccagtagctactttacgaacatgtttgctacgtggtcaccctctaaggcaaggcttcatttgcaaggccggtctaatgcctggagacctcaggtgaacaacccgaaagaatggctccaggtggactttcagaagaccatgaaagtaacaggtgtcactactcagggagttaagtccttggatactagcatgtatgtgaaggagttccttatttcctcatcacaagatggccaccagtggaccctcttctttcagaatggtaaggtcaaagtgtttcagggcaatcaagacagcttcacacccgtggtgaacagtcttgatcctccactcttgacacgataccttcgaatccatccacagtcttgggagcaccagattgcattgcgcatggaagtacttggatgcgaggctcaggacctctac

SEQ ID NO: 1964 - protein, 1457 aa, synthetic construct
  REGION 1..1457: note = Variant of human B-domain deleted Factor VIII
MQIELSTCFFLCLLRFCFSATRRYYLGAVELSWDYMQSDLGELPVDARFPPRVPKSFPFNTSQVYKKTLFVEFTDHLFNIAKPRPPWMGLLGPTIQAEVYDTVVITLKNMASHPVSLHAVGVSYWKASEGAEYDDQTSQREKEDDKVFPGGSHTYVWQVLKENGPMASDPPCLTYSYLSHVDLVKDLNSGLIGALLVCREGSLAKEKTQTLAKFILLFAVFDEGKSWHSETKNSLMQDRDAASARAWPKMHTVNGYVNRTLPGLIGCHRKSVYWHVIGMGTTPEVHSIFLEGHTFLVRNHRQASLGISPITFLTAQTLLRDLGQFLLFCHIPSHQHDGMEAYVKVDSCPEEPQLRMKNNEEAEDYDDDLTDSEMDVVRFDDDNSPSIIQARSGAKKHPKTWVHYIAAEEEDWDYAPLVLAPDDRSYKSQYLNNGPQRIGRKYKKVRFMAYTDETFKTREAIQHESGILGPLLYGEVGDTLLIIFKNQASRPYNIYPHGITDVRPLYSRRLPKGVKHLKDFPILPGEIFKYKWTITPEDGPTKSDPRCLTRYYSSEVNWERDLASGLIGPLLICYKESVDQRGNQIMSDKRNVILFSVFDENRSWYLTENIQRFLPNPAEVQLEDPEFQASNIMHSINGYVFDSLQLSVCLHEVAYWYILSIGAQTDFLSVFFSGYTFKHKGVYEDTLTLFPFSGETVFMSMENPGLWILGCHNSDFRNRGMTALLKVSSCDKNTGDYYEDSYEDISAYFDSKNNAIEPRSFSQNPPVLKRHQREGTRTTLQSDQEEIDYDDTISVEMKSEDFDIYDEDENQSPRSFQKKTRHYFIAAVERLWDYGMSSSPHVLRNRAQSGSVPQFKKVVFQEFTDGSFTQPLYRGELNEHLGLLGPYIRAEVEDNIMVTFRNQASRPYSFYSSLISYEEDQRQGAEPRKNFVKPNETKTYFWKVQHHMAPTKDEFDCKAWAYFSDVDLEKDVHSGLIGPLLVCHTNTLNPAHGRQVTVQEFALFFTIFDETKSWYFTENMERNCRAPCNIQMEDPTFKENYRFHAINGYIMDTLPGLVMAQDQRIRWYLLSMGSNENIHSIHFSGHVFTVRKKEEYKMALYNLYPGVFETVEMLPSKAGIWRVECLIGEHLHAGMSTLFLVYSNKCQNPLGMASGHIRDFQITASGQYGQWAPKLARLHYSGSINAWSTKEPFSWIKVDLLAPMIIHGIKTQGARQKFSSLYISQFIIMYSLDGKKWQTYRGNSTGTDMVFFGNVDSSGIKHNIFNPPIIARYIRLHPTHYSIRSTLRMELMGCDLNSCSMPLGMESKAISDAQITASSYFTNMFATWSPSKARLHLQGRSNAWRPQVNNPKEWLQVDFQKTMKVTGVTTQGVKSLDTSMYVKEFLISSSQDGHQWTLFFQNGKVKVFQGNQDSFTPVVNSLDPPLLTRYLRIHPQSWEHQIALRMEVLGCEAQDLY

SEQ ID NO: 1965 - DNA, 4371 bp, synthetic construct
  misc_feature 1..4371: note = Variant of human B-domain deleted Factor VIII
  source 1..4371: mol_type = other DNA
atgcagattgaactgtctacctgcttcttcctctgtttgctgaggttctgctttagcgccactagacggtactaccttggcgctgtggagctgtcctgggactatatgcagagtgatttgggagagcttcccgtcgacgcacgatttcctcctcgcgttccaaagtcatttccctttaacacaagccaggtgtacaagaagacgctcttcgtcgaattcaccgatcacctgttcaatatcgccaaacccagaccaccatggatgggtcttttggggcctaccatacaagcggaggtgtatgacacagttgttatcactctcaagaacatggcttctcatccggtaagtcttcacgcagtgggcgtgtcctactggaaagcttcagaaggagccgagtatgatgatcagacatcccagagggagaaagaagacgacaaggtatttccaggtgggtctcatacctatgtgtggcaagtgctcaaagagaatggccctatggcaagcgatccgccgtgtttgacttacagctacctttcacacgttgacctcgtcaaggacctcaactccgggttgattggagccttgttggtatgcagggaaggatctcttgccaaagagaagacacagaccctggccaagtttatccttctctttgctgtgttcgatgagggcaaaagttggcatagcgaaacgaagaattccctcatgcaggatcgcgacgcagccagcgccagagcttggcccaagatgcacactgtgaacggatatgtcaataggacgcttcctggcttgattgggtgtcatcggaaaagtgtctactggcacgtgatcggaatggggacaacaccagaggtccactccatatttctcgaaggccataccttccttgttcgaaaccacagacaggcatccttggggatctctcccattacctttctcactgcccaaacgctccttcgtgacttgggtcagttccttctcttttgccatatcccgtcacaccagcatgatggtatggaagcttatgtgaaagtcgacagttgtcctgaggagccacagttgcgcatgaagaataatgaagaagccgaggattacgacgacgatctcaccgattctgagatggacgtggtgaggtttgatgacgacaactctccctccatcattcaagctcggagcggggcgaagaaacaccccaagacttgggtccactatatagcggcggaagaggaggattgggattacgctcctcttgtattggcaccagatgaccgctcatacaaaagccagtacctcaacaacggaccgcagagaattggccggaagtataagaaagtgcgatttatggcctatacagacgaaacctttaagacaagggaggccatccagcatgagagtgggattttgggacctcttctttacggcgaagttggtgataccctcctcatcatcttcaagaatcaagcttctcgcccctataacatttacccacacgggatcactgacgttaggcctttgtatagcagaagacttcccaaaggcgtgaagcatctcaaagacttccccattttgccaggcgagatctttaagtacaaatggaccattacagtggaagatggaccgactaaatcagaccctcgatgccttacgcggtactattcctccttcgtgaattgggagagagatttggcaagcggactcataggaccactcctcatctgttacaaggaatctgtagaccagaggggtaaccagattatgagtgataaacgcaatgtgatcctttttagcgtcttcgacgagaaccggtcctggtacttgaccgagaatatacaaaggttccttcccaaccccgcaggggttcagttggaagaccctgagtttcaggccagcaatattatgcactcaatcaacggctatgtgtttgatagtctccagctttctgtttgcctccatgaagtagcctattggtacatcttgtcaattggtgctcaaacagacttcctctccgtcttcttctccggctacacctttaagcacaagggcgtgtatgaggacactctcacactctttccattttctggagaaaccgtgttcatgagcatggagaatccaggcctttggatcttgggttgccacaacagtgattttcgcaatcggggaatgactgctctcctcaaagtcagcagctgtgattggaacacaggcgactattacgaagattcttacgaggacataagtgcctactttgactccaagaataacgccattgagcccagatcattctcccagaatcctcccgtgcttaaaaggcatcagcgcgaaggtaccagaactactcttcagtctgatcaagaggagattgactatgacgacaccattagcgtggaaatgaagagcgaggatttcgatatccaggacgaagatgagaaccagtctccgcggagctttcagaagaagacgcgacactacttcattgcagcagtcgaaaggctttgggactacggtatgtcatcatcccctcatgtgttgcgcaatagagctcagagtggaagtgttccacagttcaagaaagtcgtctttcaagagtttacagatggcagcttcacacagcctctctatcggggcgagcttaacgaacatttgggactccttggtccctatatccgagccgaagtggaggacaacattatggttacctttaggaatcaagcctctcgcccctacagcttctactcctccctcatcagttatgaggaggatcagagacaaggcgctgaaccacggaagaactttgtgaaaccgaatgagacgaagacctacttctggaaagtacagcaccacatggcccccacaaaagacgaattcgattgcaaagcatgggcgtatttttcagacgttgacttggagaaagatgtacattcaggacttattggtcctttgttggtgtgtcacactaacactctcaatccagcccatggcaggcaggtgacagtccaggaattcgctcttttctttaccatctttgatgagaccaagtcctggtacttcacggaaaacatggagcgcaattgcagagccccctgtaacatacagatggaggaccctacctttaaggaaaattatcggttccacgcaatcaacggatacattatggatacactccctggccttgtgatggctcaggaccaacgaatcaggtggtacctcctcagcatgggttctaatgagaacatacactccattcacttttcaggacatgtgttcactgtccggaagaaagaagagtataagatggccctctacaatttgtatccaggcgtgtttgagaccgttgaaatgcttccctctaaagctggcatctggagagtagagtgcttgatcggagaacatcttcacgcaggtatgagcaccttgttcctcgtgtacagcaacaaatgtcagaatccacttggcatggccagtggacacattcgcgactttcagatcacagcatctggccagtatggacaatgggccccaaagttggctcgcctccattactccggtagcataaatgcgtggtccactaaagaacctttcagctggattaaggtcgatcttcttgcccccatgatcatccacggcattaagacacagggagcgaggcagaaattctcctccctctacatctcacagttcattattatgtatagtttggacggcaagaagtggcaaacttatagaggtaacagtactggaacagacatggtgttcttcggcaacgttgatagctctggcatcaaacacaacatctttaatcctcccataatagctcggtacatcagattgcatccgacccactacagcattaggagtacactccgaatggagcttatgggttgcgacttgaattcctgttcaatgccactcggaatggagtctaaagccatctctgatgcacagataaccgccagtagctactttacgaacatgtttgctacgtggtcaccctctaaggcaaggcttcatttgcaaggccggtctaatgcctggagacctcaggtgaacaacccgaaagaatggctccaggtggactttcagaagaccatgaaagtaacaggtgtcactactcagggagttaagtccttggatactagcatgtatgtgaaggagttccttatttcctcatcacaagatggccaccagtggaccctcttctttcagaatggtaaggtcaaagtgtttcagggcaatcaagacagcttcacacccgtggtgaacagtcttgatcctccactcttgacacgataccttcgaatccatccacagtcttgggagcaccagattgcattgcgcatggaagtacttggatgcgaggctcaggacctctac

SEQ ID NO: 1966 - protein, 1457 aa, synthetic construct
  REGION 1..1457: note = Variant of human B-domain deleted Factor VIII
MQIELSTCFFLCLLRFCFSATRRYYLGAVELSWDYMQSDLGELPVDARFPPRVPKSFPFNTSQVYKKTLFVEFTDHLFNIAKPRPPWMGLLGPTIQAEVYDTVVITLKNMASHPVSLHAVGVSYWKASEGAEYDDQTSQREKEDDKVFPGGSHTYVWQVLKENGPMASDPPCLTYSYLSHVDLVKDLNSGLIGALLVCREGSLAKEKTQTLAKFILLFAVFDEGKSWHSETKNSLMQDRDAASARAWPKMHTVNGYVNRTLPGLIGCHRKSVYWHVIGMGTTPEVHSIFLEGHTFLVRNHRQASLGISPITFLTAQTLLRDLGQFLLFCHIPSHQHDGMEAYVKVDSCPEEPQLRMKNNEEAEDYDDDLTDSEMDVVRFDDDNSPSIIQARSGAKKHPKTWVHYIAAEEEDWDYAPLVLAPDDRSYKSQYLNNGPQRIGRKYKKVRFMAYTDETFKTREAIQHESGILGPLLYGEVGDTLLIIFKNQASRPYNIYPHGITDVRPLYSRRLPKGVKHLKDFPILPGEIFKYKWTITVEDGPTKSDPRCLTRYYSSFVNWERDLASGLIGPLLICYKESVDQRGNQIMSDKRNVILFSVFDENRSWYLTENIQRFLPNPAGVQLEDPEFQASNIMHSINGYVFDSLQLSVCLHEVAYWYILSIGAQTDFLSVFFSGYTFKHKGVYEDTLTLFPFSGETVFMSMENPGLWILGCHNSDFRNRGMTALLKVSSCDWNTGDYYEDSYEDISAYFDSKNNAIEPRSFSQNPPVLKRHQREGTRTTLQSDQEEIDYDDTISVEMKSEDFDIQDEDENQSPRSFQKKTRHYFIAAVERLWDYGMSSSPHVLRNRAQSGSVPQFKKVVFQEFTDGSFTQPLYRGELNEHLGLLGPYIRAEVEDNIMVTFRNQASRPYSFYSSLISYEEDQRQGAEPRKNFVKPNETKTYFWKVQHHMAPTKDEFDCKAWAYFSDVDLEKDVHSGLIGPLLVCHTNTLNPAHGRQVTVQEFALFFTIFDETKSWYFTENMERNCRAPCNIQMEDPTFKENYRFHAINGYIMDTLPGLVMAQDQRIRWYLLSMGSNENIHSIHFSGHVFTVRKKEEYKMALYNLYPGVFETVEMLPSKAGIWRVECLIGEHLHAGMSTLFLVYSNKCQNPLGMASGHIRDFQITASGQYGQWAPKLARLHYSGSINAWSTKEPFSWIKVDLLAPMIIHGIKTQGARQKFSSLYISQFIIMYSLDGKKWQTYRGNSTGTDMVFFGNVDSSGIKHNIFNPPIIARYIRLHPTHYSIRSTLRMELMGCDLNSCSMPLGMESKAISDAQITASSYFTNMFATWSPSKARLHLQGRSNAWRPQVNNPKEWLQVDFQKTMKVTGVTTQGVKSLDTSMYVKEFLISSSQDGHQWTLFFQNGKVKVFQGNQDSFTPVVNSLDPPLLTRYLRIHPQSWEHQIALRMEVLGCEAQDLY

SEQ ID NO: 1967 - DNA, 4371 bp, synthetic construct
  misc_feature 1..4371: note = Variant of human B-domain deleted Factor VIII
  source 1..4371: mol_type = other DNA
atgcagattgaactgtctacctgcttcttcctctgtttgctgaggttctgctttagcgccactagacggtactaccttggcgctgtggagctgtcctgggactatatgcagagtgatttgggagagcttcccgtcgacgcacgatttcctcctcgcgttccaaagtcatttccctttaacacaagccaggtgtacaagaagacgctcttcgtcgaattcaccgatcacctgttcaatatcgccaaacccagaccaccatggatgggtcttttggggcctaccatacaagcggaggtgtatgacacagttgttatcactctcaagaacatggcttctcatccggtaagtcttcacgcagtgggcgtgtcctactggaaagcttcagaaggagccgagtatgatgatcagacatcccagagggagaaagaagacgacaaggtatttccaggtgggtctcatacctatgtgtggcaagtgctcaaagagaatggccctatggcaagcgatccgccgtgtttgacttacagctacctttcacacgttgacctcgtcaaggacctcaactccgggttgattggagccttgttggtatgcagggaaggatctcttgccaaagagaagacacagaccctggccaagtttatccttctctttgctgtgttcgatgagggcaaaagttggcatagcgaaacgaagaattccctcatgcaggatcgcgacgcagccagcgccagagcttggcccaagatgcacactgtgaacggatatgtcaataggacgcttcctggcttgattgggtgtcatcggaaaagtgtctactggcacgtgatcggaatggggacaacaccagaggtccactccatatttctcgaaggccataccttccttgttcgaaaccacagacaggcatccttggggatctctcccattacctttctcactgcccaaacgctccttcgtgacttgggtcagttccttctcttttgccatatcccgtcacaccagcatgatggtatggaagcttatgtgaaagtcgacagttgtcctgaggagccacagttgcgcatgaagaataatgaagaagccgaggattacgacgacgatctcaccgattctgagatggacgtggtgaggtttgatgacgacaactctccctccatcattcaagctcggagcggggcgaagaaacaccccaagacttgggtccactatatagcggcggaagaggaggattgggattacgctcctcttgtattggcaccagatgaccgctcatacaaaagccagtacctcaacaacggaccgcagagaattggccggaagtataagaaagtgcgatttatggcctatacagacgaaacctttaagacaagggaggccatccagcatgagagtgggattttgggacctcttctttacggcgaagttggtgataccctcctcatcatcttcaagaatcaagcttctcgcccctataacatttacccacacgggatcactgacgttaggcctttgtatagcagaagacttcccaaaggcgtgaagcatctcaaagacttccccattttgccaggcgagatctttaagtacaaatggaccattacagtggaagatggaccgactaaatcagaccctcgatgccttacgcggtactattcctccttcgtgaattgggagagagatttggcaagcggactcataggaccactcctcatctgttacaaggaatctgtagaccagaggggtaaccagattatgagtgataaacgcaatgtgatcctttttagcgtcttcgacgagaaccggtcctggtacttgaccgagaatatacaaaggttccttcccaaccccgcaggcgttcagttggaagaccctgagtttcaggccagcaatattatgcactcaatcaacggctatgtgtttgatagtctccagctttctgtttgcctccatgaagtagcctattggtacatcttgtcaattggtgctcaaacagacttcctctccgtcttcttctccggctacacctttaagcacaagggcgtgtatgaggacactctcacactctttccattttctggagaaaccgtgttcatgagcatggagaatccaggcctttggatcttgggttgccacaacagtgattttcgcaatcggggaatgactgctctcctcaaagtcagcagctgtgattggaacacaggcgactattacgaagattcttacgaggacataagtgcctactttgactccaagaataacgccattgagcccagatcattctcccagaatcctcccgtgcttaaaaggcatcagcgcgaaggtaccagaactactcttcagtctgatcaagaggagattgactatgacgacaccattagcgtggaaatgaagaaagagggtttcgatatctatgacgaagatgagaaccagtctccgcggagctttcagaagaagacgcgacactacttcattgcagcagtcgaaaggctttgggactacggtatgtcatcatcccctcatgtgttgcgcaatagagctcagagtggaagtgttccacagttcaagaaagtcgtctttcaagagtttacagatggcagcttcacacagcctctctatcggggcgagcttaacgaacatttgggactccttggtccctatatccgagccgaagtggaggacaacattatggttacctttaggaatcaagcctctcgcccctacagcttctactcctccctcatcagttatgaggaggatcagagacaaggcgctgaaccacggaagaactttgtgaaaccgaatgagacgaagacctacttctggaaagtacagcaccacatggcccccacaaaagacgaattcgattgcaaagcatgggcgtatttttcagacgttgacttggagaaagatgtacattcaggacttattggtcctttgttggtgtgtcacactaacactctcaatccagcccatggcaggcaggtgacagtccaggaattcgctcttttctttaccatctttgatgagaccaagtcctggtacttcacggaaaacatggagcgcaattgcagagccccctgtaacatacagatggaggaccctacctttaaggaaaattatcggttccacgcaatcaacggatacattatggatacactccctggccttgtgatggctcaggaccaacgaatcaggtggtacctcctcagcatgggttctaatgagaacatacactccattcacttttcaggacatgtgttcactgtccggaagaaagaagagtataagatggccctctacaatttgtatccaggcgtgtttgagaccgttgaaatgcttccctctaaagctggcatctggagagtagagtgcttgatcggagaacatcttcacgcaggtatgagcaccttgttcctcgtgtacagcaacaaatgtcagaatccacttggcatggccagtggacacattcgcgactttcagatcacagcatctggccagtatggacaatgggccccaaagttggctcgcctccattactccggtagcataaatgcgtggtccactaaagaacctttcagctggattaaggtcgatcttcttgcccccatgatcatccacggcattaagacacagggagcgaggcagaaattctcctccctctacatctcacagttcattattatgtatagtttggacggcaagaagtggcaaacttatagaggtaacagtactggaacagacatggtgttcttcggcaacgttgatagctctggcatcaaacacaacatctttaatcctcccataatagctcggtacatcagattgcatccgacccactacagcattaggagtacactccgaatggagcttatgggttgcgacttgaattcctgttcaatgccactcggaatggagtctaaagccatctctgatgcacagataaccgccagtagctactttacgaacatgtttgctacgtggtcaccctctaaggcaaggcttcatttgcaaggccggtctaatgcctggagacctcaggtgaacaacccgaaagaatggctccaggtggactttcagaagaccatgaaagtaacaggtgtcactactcagggagttaagtccttggatactagcatgtatgtgaaggagttccttatttcctcatcacaagatggccaccagtggaccctcttctttcagaatggtaaggtcaaagtgtttcagggcaatcaagacagcttcacacccgtggtgaacagtcttgatcctccactcttgacacgataccttcgaatccatccacagtcttgggagcaccagattgcattgcgcatggaagtacttggatgcgaggctcaggacctctac

SEQ ID NO: 1968 - protein, 1457 aa, synthetic construct
  REGION 1..1457: note = Variant of human B-domain deleted Factor VIII
MQIELSTCFFLCLLRFCFSATRRYYLGAVELSWDYMQSDLGELPVDARFPPRVPKSFPFNTSQVYKKTLFVEFTDHLFNIAKPRPPWMGLLGPTIQAEVYDTVVITLKNMASHPVSLHAVGVSYWKASEGAEYDDQTSQREKEDDKVFPGGSHTYVWQVLKENGPMASDPPCLTYSYLSHVDLVKDLNSGLIGALLVCREGSLAKEKTQTLAKFILLFAVFDEGKSWHSETKNSLMQDRDAASARAWPKMHTVNGYVNRTLPGLIGCHRKSVYWHVIGMGTTPEVHSIFLEGHTFLVRNHRQASLGISPITFLTAQTLLRDLGQFLLFCHIPSHQHDGMEAYVKVDSCPEEPQLRMKNNEEAEDYDDDLTDSEMDVVRFDDDNSPSIIQARSGAKKHPKTWVHYIAAEEEDWDYAPLVLAPDDRSYKSQYLNNGPQRIGRKYKKVRFMAYTDETFKTREAIQHESGILGPLLYGEVGDTLLIIFKNQASRPYNIYPHGITDVRPLYSRRLPKGVKHLKDFPILPGEIFKYKWTITVEDGPTKSDPRCLTRYYSSFVNWERDLASGLIGPLLICYKESVDQRGNQIMSDKRNVILFSVFDENRSWYLTENIQRFLPNPAGVQLEDPEFQASNIMHSINGYVFDSLQLSVCLHEVAYWYILSIGAQTDFLSVFFSGYTFKHKGVYEDTLTLFPFSGETVFMSMENPGLWILGCHNSDFRNRGMTALLKVSSCDWNTGDYYEDSYEDISAYFDSKNNAIEPRSFSQNPPVLKRHQREGTRTTLQSDQEEIDYDDTISVEMKKEGFDIYDEDENQSPRSFQKKTRHYFIAAVERLWDYGMSSSPHVLRNRAQSGSVPQFKKVVFQEFTDGSFTQPLYRGELNEHLGLLGPYIRAEVEDNIMVTFRNQASRPYSFYSSLISYEEDQRQGAEPRKNFVKPNETKTYFWKVQHHMAPTKDEFDCKAWAYFSDVDLEKDVHSGLIGPLLVCHTNTLNPAHGRQVTVQEFALFFTIFDETKSWYFTENMERNCRAPCNIQMEDPTFKENYRFHAINGYIMDTLPGLVMAQDQRIRWYLLSMGSNENIHSIHFSGHVFTVRKKEEYKMALYNLYPGVFETVEMLPSKAGIWRVECLIGEHLHAGMSTLFLVYSNKCQNPLGMASGHIRDFQITASGQYGQWAPKLARLHYSGSINAWSTKEPFSWIKVDLLAPMIIHGIKTQGARQKFSSLYISQFIIMYSLDGKKWQTYRGNSTGTDMVFFGNVDSSGIKHNIFNPPIIARYIRLHPTHYSIRSTLRMELMGCDLNSCSMPLGMESKAISDAQITASSYFTNMFATWSPSKARLHLQGRSNAWRPQVNNPKEWLQVDFQKTMKVTGVTTQGVKSLDTSMYVKEFLISSSQDGHQWTLFFQNGKVKVFQGNQDSFTPVVNSLDPPLLTRYLRIHPQSWEHQIALRMEVLGCEAQDLY

SEQ ID NO: 1969 - DNA, 4371 bp, synthetic construct
  misc_feature 1..4371: note = Variant of human B-domain deleted Factor VIII
  source 1..4371: mol_type = other DNA
atgcagattgaactgtctacctgcttcttcctctgtttgctgaggttctgctttagcgccactagacggtactaccttggcgctgtggagctgtcctgggactatatgcagagtgatttgggagagcttcccgtcgacgcacgatttcctcctcgcgttccaaagtcatttccctttaacacaagccaggtgtacaagaagacgctcttcgtcgaattcaccgatcacctgttcaatatcgccaaacccagaccaccatggatgggtcttttggggcctaccatacaagcggaggtgtatgacacagttgttatcactctcaagaacatggcttctcatccggtaagtcttcacgcagtgggcgtgtcctactggaaagcttcagaaggagccgagtatgatgatcagacatcccagagggagaaagaagacgacaaggtatttccaggtgggtctcatacctatgtgtggcaagtgctcaaagagaatggccctatggcaagcgatccgccgtgtttgacttacagctacctttcacacgttgacctcgtcaaggacctcaactccgggttgattggagccttgttggtatgcagggaaggatctcttgccaaagagaagacacagaccctggccaagtttatccttctctttgctgtgttcgatgagggcaaaagttggcatagcgaaacgaagaattccctcatgcaggatcgcgacgcagccagcgccagagattggcccaagatgcacactgtgaacggatatgtcaataggacgcttcctggcttgattgggtgtcatcggaaaagtgtctactggcacgtgatcggaatggggacaacaccagaggtccactccatatttctcgaaggccataccttccttgttcgaaaccacagacaggcatccttggggatctctcccattacctttctcactgcccaaacgctccttcgtgacttgggtcagttccttctcttttgccatatcccgtcacaccagcatgatggtatggaagcttatgtgaaagtcgacagttgtcctgaggagccacagttgcgcatgaagaataatgaagaagccgaggattacgacgacgatctcaccgattctgagatggacgtggtgaggtttgatgacgacaactctccctccatcattcaagctcggagcggggcgaagaaacaccccaagacttgggtccactatatagcggcggaagaggaggattgggattacgctcctcttgtattggcaccagatgaccgctcatacaaaagccagtacctcaacaacggaccgcagagaattggccggaagtataagaaagtgcgatttatggcctatacagacgaaacctttaagacaagggaggccatccagcatgagagtgggattttgggacctcttctttacggcgaagttggtgataccctcctcatcatcttcaagaatcaagcttctcgcccctataacatttacccacacgggatcactgacgttaggcctttgtatagcagaagacttcccaaaggcgtgaagcatctcaaagacttccccattttgccaggcgagatctttaagtacaaatggaccattacagtggaagatggaccgactaaatcagaccctcgatgccttacgcggtactattcctccttcgtgaattgggagagagatttggcaagcggactcataggaccactcctcatctgttacaaggaatctgtagaccagaggggtaaccagattatgagtgataaacgcaatgtgatcctttttagcgtcttcgacgagaaccggtcctggtacttgaccgagaatatacaaaggttccttcccaaccccgcagaggttcagttggaagaccctgagtttcaggccagcaatattatgcactcaatcaacggctatgtgtttgatagtctccagctttctgtttgcctccatgaagtagcctattggtacatcttgtcaattggtgctcaaacagacttcctctccgtcttcttctccggctacacctttaagcacaagggcgtgtatgaggacactctcacactctttccattttctggagaaaccgtgttcatgagcatggagaatccaggcctttggatcttgggttgccacaacagtgattttcgcaatcggggaatgactgctctcctcaaagtcagcagctgtgattggaacacaggcgactattacgaagattcttacgaggacataagtgcctactttgactccaagaataacgccattgagcccagatcattctcccagaatcctcccgtgcttaaaaggcatcagcgcgaaggtaccagaactactcttcagtctgatcaagaggagattgactatgacgacaccattagcgtggaaatgaagagcgagggtttcgatatctatgacgaagatgagaaccagtctccgcggagctttcagaagaagacgcgacactacttcattgcagcagtcgaaaggctttgggactacggtatgtcatcatcccctcatgtgttgcgcaatagagctcagagtggaagtgttccacagttcaagaaagtcgtctttcaagagtttacagatggcagcttcacacagcctctctatcggggcgagcttaacgaacatttgggactccttggtccctatatccgagccgaagtggaggacaacattatggttacctttaggaatcaagcctctcgcccctacagcttctactcctccctcatcagttatgaggaggatcagagacaaggcgctgaaccacggaagaactttgtgaaaccgaatgagacgaagacctacttctggaaagtacagcaccacatggcccccacaaaagacgaattcgattgcaaagcatgggcgtatttttcagacgttgacttggagaaagatgtacattcaggacttattggtcctttgttggtgtgtcacactaacactctcaatccagcccatggcaggcaggtgacagtccaggaattcgctcttttctttaccatctttgatgagaccaagtcctggtacttcacggaaaacatggagcgcaattgcagagccccctgtaacatacagatggaggaccctacctttaaggaaaattatcggttccacgcaatcaacggatacattatggatacactccctggccttgtgatggctcaggaccaacgaatcaggtggtacctcctcagcatgggttctaatgagaacatacactccattcacttttcaggacatgtgttcactgtccggaagaaagaagagtataagatggccctctacaatttgtatccaggcgtgtttgagaccgttgaaatgcttccctctaaagctggcatctggagagtagagtgcttgatcggagaacatcttcacgcaggtatgagcaccttgttcctcgtgtacagcaacaaatgtcagaatccacttggcatggccagtggacacattcgcgactttcagatcacagcatctggccagtatggacaatgggccccaaagttggctcgcctccattactccggtagcataaatgcgtggtccactaaagaacctttcagctggattaaggtcgatcttcttgcccccatgatcatccacggcattaagacacagggagcgaggcagaaattctcctccctctacatctcacagttcattattatgtatagtttggacggcaagaagtggcaaacttatagaggtaacagtactggaacagacatggtgttcttcggcaacgttgatagctctggcatcaaacacaacatctttaatcctcccataatagctcggtacatcagattgcatccgacccactacagcattaggagtacactccgaatggagcttatgggttgcgacttgaattcctgttcaatgccactcggaatggagtctaaagccatctctgatgcacagataaccgccagtagctactttacgaacatgtttgctacgtggtcaccctctaaggcaaggcttcatttgcaaggccggtctaatgcctggagacctcaggtgaacaacccgaaagaatggctccaggtggactttcagaagaccatgaaagtaacaggtgtcactactcagggagttaagtccttggatactagcatgtatgtgaaggagttccttatttcctcatcacaagatggccaccagtggaccctcttctttcagaatggtaaggtcaaagtgtttcagggcaatcaagacagcttcacacccgtggtgaacagtcttgatcctccactcttgacacgataccttcgaatccatccacagtcttgggagcaccagattgcattgcgcatggaagtacttggatgcgaggctcaggacctctac

SEQ ID NO: 1970 - protein, 1457 aa, synthetic construct
  REGION 1..1457: note = Variant of human B-domain deleted Factor VIII
MQIELSTCFFLCLLRFCFSATRRYYLGAVELSWDYMQSDLGELPVDARFPPRVPKSFPFNTSQVYKKTLFVEFTDHLFNIAKPRPPWMGLLGPTIQAEVYDTVVITLKNMASHPVSLHAVGVSYWKASEGAEYDDQTSQREKEDDKVFPGGSHTYVWQVLKENGPMASDPPCLTYSYLSHVDLVKDLNSGLIGALLVCREGSLAKEKTQTLAKFILLFAVFDEGKSWHSETKNSLMQDRDAASARDWPKMHTVNGYVNRTLPGLIGCHRKSVYWHVIGMGTTPEVHSIFLEGHTFLVRNHRQASLGISPITFLTAQTLLRDLGQFLLFCHIPSHQHDGMEAYVKVDSCPEEPQLRMKNNEEAEDYDDDLTDSEMDVVRFDDDNSPSIIQARSGAKKHPKTWVHYIAAEEEDWDYAPLVLAPDDRSYKSQYLNNGPQRIGRKYKKVRFMAYTDETFKTREAIQHESGILGPLLYGEVGDTLLIIFKNQASRPYNIYPHGITDVRPLYSRRLPKGVKHLKDFPILPGEIFKYKWTITVEDGPTKSDPRCLTRYYSSFVNWERDLASGLIGPLLICYKESVDQRGNQIMSDKRNVILFSVFDENRSWYLTENIQRFLPNPAEVQLEDPEFQASNIMHSINGYVFDSLQLSVCLHEVAYWYILSIGAQTDFLSVFFSGYTFKHKGVYEDTLTLFPFSGETVFMSMENPGLWILGCHNSDFRNRGMTALLKVSSCDWNTGDYYEDSYEDISAYFDSKNNAIEPRSFSQNPPVLKRHQREGTRTTLQSDQEEIDYDDTISVEMKSEGFDIYDEDENQSPRSFQKKTRHYFIAAVERLWDYGMSSSPHVLRNRAQSGSVPQFKKVVFQEFTDGSFTQPLYRGELNEHLGLLGPYIRAEVEDNIMVTFRNQASRPYSFYSSLISYEEDQRQGAEPRKNFVKPNETKTYFWKVQHHMAPTKDEFDCKAWAYFSDVDLEKDVHSGLIGPLLVCHTNTLNPAHGRQVTVQEFALFFTIFDETKSWYFTENMERNCRAPCNIQMEDPTFKENYRFHAINGYIMDTLPGLVMAQDQRIRWYLLSMGSNENIHSIHFSGHVFTVRKKEEYKMALYNLYPGVFETVEMLPSKAGIWRVECLIGEHLHAGMSTLFLVYSNKCQNPLGMASGHIRDFQITASGQYGQWAPKLARLHYSGSINAWSTKEPFSWIKVDLLAPMIIHGIKTQGARQKFSSLYISQFIIMYSLDGKKWQTYRGNSTGTDMVFFGNVDSSGIKHNIFNPPIIARYIRLHPTHYSIRSTLRMELMGCDLNSCSMPLGMESKAISDAQITASSYFTNMFATWSPSKARLHLQGRSNAWRPQVNNPKEWLQVDFQKTMKVTGVTTQGVKSLDTSMYVKEFLISSSQDGHQWTLFFQNGKVKVFQGNQDSFTPVVNSLDPPLLTRYLRIHPQSWEHQIALRMEVLGCEAQDLY

SEQ ID NO: 1971 - DNA, 4371 bp, synthetic construct
  misc_feature 1..4371: note = Variant of human B-domain deleted Factor VIII
  source 1..4371: mol_type = other DNA
atgcagattgaactgtctacctgcttcttcctctgtttgctgaggttctgctttagcgccactagacggtactaccttggcgctgtggagctgtcctgggactatatgcagagtgatttgggagagcttcccgtcgacgcacgatttcctcctcgcgttccaaagtcatttccctttaacacaagccaggtgtacaagaagacgctcttcgtcgaattcaccgatcacctgttcaatatcgccaaacccagaccaccatggatgggtcttttggggcctaccatacaagcggaggtgtatgacacagttgttatcactctcaagaacatggcttctcatccggtaagtcttcacgcagtgggcgtgtcctactggaaagcttcagaaggagccgagtatgatgatcagacatcccagagggagaaagaagacgacaaggtatttccaggtgggtctcatacctatgtgtggcaagtgctcaaagagaatggccctatggcaagcgatccgccgtgtttgacttacagctacctttcacacgttgacctcgtcaaggacctcaactccgggttgattggagccttgttggtatgcagggaaggatctcttgccaaagagaagacacagaccctggccaagtttatccttctctttgctgtgttcgatgagggcaaaagttggcatagcgaaacgaagaattccctcatgcaggatcgcgacgcagccagcgccagagcttggcccaagatgcacactgtgaacggatatgtcaataggacgcttcctggcttgattgggtgtcatcggaaaagtgtctactggcacgtgatcggaatggggacaacaccagaggtccactccatatttctcgaaggccataccttccttgttcgaaaccacagacaggcatccttggggatctctcccattacctttctcactgcccaaacgctccttcgtgacttgggtcagttccttctcttttgccatatcccgtcacaccagcatgatggtatggaagcttatgtgaaagtcgacagttgtcctgaggagccacagttgcgcatgaagaataatgaagaagccgaggattacgacgacgatctcaccgattctgagatggacgtggtgaggtttgatgacgacaactctccctccatcattcaagctcggagcggggcgaagaaacaccccaagacttgggtccactatatagcggcggaagaggaggattgggattacgctcctcttgtattggcaccagatgaccgctcatacaaaagccagtacctcaacaacggaccgcagagaattggccggaagtataagaaagtgcgatttatggcctatacagacgaaacctttaagacaagggaggccatccagcatgagagtgggattttgggacctcttctttacggcgaagttggtgataccctcctcatcatcttcaagaatcaagcttctcgcccctataacatttacccacacgggatcactgacgttaggcctttgtatagcagaagacttcccaaaggcgtgaagcatctcaaagacttccccattttgccaggcgagatctttaagtacaaatggaccattacaccagaagatggaccgactaaatcagaccctcgatgccttacgcggtactattcctccgaagtgaattgggagagagatttggcaagcggactcataggaccactcctcatctgttacaaggaatctgtagaccagaggggtaaccagattatgagtgataaacgcaatgtgatcctttttagcgtcttcgacgagaaccggtcctggtacttgaccgagaatatacaaaggttccttcccaaccccgcagaggttcagttggaagaccctgagtttcaggccagcaatattatgcactcaatcaacggctatgtgtttgatagtctccagctttctgtttgcctccatgaagtagcctattggtacatcttgtcaattggtgctcaaacagacttcctctccgtcttcttctccggctacacctttaagcacaagggcgtgtatgaggacactctcacactctttccattttctggagaaaccgtgttcatgagcatggagaatccaggcctttggatcttgggttgccacaacagtgattttcgcaatcggggaatgactgctctcctcaaagtcagcagctgtgattggaacacaggcgactattacgaagattcttacgaggacataagtgcctactttgactccaagaataacgccattgagcccagatcattctcccagaatcctcccgtgcttaaaaggcatcagcgcgaaggtaccagaactactcttcagtctgatcaagaggagattgactatgacgacaccattagcgtggaaatgaagaaggaggatttcgatatctatgacgaagatgagaaccagtctccgcggagctttcagaagaagacgcgacactacttcattgcagcagtcgaaaggctttgggactacggtatgtcatcatcccctcatgtgttgcgcaatagagctcagagtggaagtgttccacagttcaagaaagtcgtctttcaagagtttacagatggcagcttcacacagcctctctatcggggcgagcttaacgaacatttgggactccttggtccctatatccgagccgaagtggaggacaacattatggttacctttaggaatcaagcctctcgcccctacagcttctactcctccctcatcagttatgaggaggatcagagacaaggcgctgaaccacggaagaactttgtgaaaccgaatgagacgaagacctacttctggaaagtacagcaccacatggcccccacaaaagacgaattcgattgcaaagcatgggcgtatttttcagacgttgacttggagaaagatgtacattcaggacttattggtcctttgttggtgtgtcacactaacactctcaatccagcccatggcaggcaggtgacagtccaggaattcgctcttttctttaccatctttgatgagaccaagtcctggtacttcacggaaaacatggagcgcaattgcagagccccctgtaacatacagatggaggaccctacctttaaggaaaattatcggttccacgcaatcaacggatacattatggatacactccctggccttgtgatggctcaggaccaacgaatcaggtggtacctcctcagcatgggttctaatgagaacatacactccattcacttttcaggacatgtgttcactgtccggaagaaagaagagtataagatggccctctacaatttgtatccaggcgtgtttgagaccgttgaaatgcttccctctaaagctggcatctggagagtagagtgcttgatcggagaacatcttcacgcaggtatgagcaccttgttcctcgtgtacagcaacaaatgtcagaatccacttggcatggccagtggacacattcgcgactttcagatcacagcatctggccagtatggacaatgggccccaaagttggctcgcctccattactccggtagcataaatgcgtggtccactaaagaacctttcagctggattaaggtcgatcttcttgcccccatgatcatccacggcattaagacacagggagcgaggcagaaattctcctccctctacatctcacagttcattattatgtatagtttggacggcaagaagtggcaaacttatagaggtaacagtactggaacagacatggtgttcttcggcaacgttgatagctctggcatcaaacacaacatctttaatcctcccataatagctcggtacatcagattgcatccgacccactacagcattaggagtacactccgaatggagcttatgggttgcgacttgaattcctgttcaatgccactcggaatggagtctaaagccatctctgatgcacagataaccgccagtagctactttacgaacatgtttgctacgtggtcaccctctaaggcaaggcttcatttgcaaggccggtctaatgcctggagacctcaggtgaacaacccgaaagaatggctccaggtggactttcagaagaccatgaaagtaacaggtgtcactactcagggagttaagtccttggatactagcatgtatgtgaaggagttccttatttcctcatcacaagatggccaccagtggaccctcttctttcagaatggtaaggtcaaagtgtttcagggcaatcaagacagcttcacacccgtggtgaacagtcttgatcctccactcttgacacgataccttcgaatccatccacagtcttgggagcaccagattgcattgcgcatggaagtacttggatgcgaggctcaggacctctac

SEQ ID NO: 1972 - protein, 1457 aa, synthetic construct
  REGION 1..1457: note = Variant of human B-domain deleted Factor VIII
MQIELSTCFFLCLLRFCFSATRRYYLGAVELSWDYMQSDLGELPVDARFPPRVPKSFPFNTSQVYKKTLFVEFTDHLFNIAKPRPPWMGLLGPTIQAEVYDTVVITLKNMASHPVSLHAVGVSYWKASEGAEYDDQTSQREKEDDKVFPGGSHTYVWQVLKENGPMASDPPCLTYSYLSHVDLVKDLNSGLIGALLVCREGSLAKEKTQTLAKFILLFAVFDEGKSWHSETKNSLMQDRDAASARAWPKMHTVNGYVNRTLPGLIGCHRKSVYWHVIGMGTTPEVHSIFLEGHTFLVRNHRQASLGISPITFLTAQTLLRDLGQFLLFCHIPSHQHDGMEAYVKVDSCPEEPQLRMKNNEEAEDYDDDLTDSEMDVVRFDDDNSPSIIQARSGAKKHPKTWVHYIAAEEEDWDYAPLVLAPDDRSYKSQYLNNGPQRIGRKYKKVRFMAYTDETFKTREAIQHESGILGPLLYGEVGDTLLIIFKNQASRPYNIYPHGITDVRPLYSRRLPKGVKHLKDFPILPGEIFKYKWTITPEDGPTKSDPRCLTRYYSSEVNWERDLASGLIGPLLICYKESVDQRGNQIMSDKRNVILFSVFDENRSWYLTENIQRFLPNPAEVQLEDPEFQASNIMHSINGYVFDSLQLSVCLHEVAYWYILSIGAQTDFLSVFFSGYTFKHKGVYEDTLTLFPFSGETVFMSMENPGLWILGCHNSDFRNRGMTALLKVSSCDWNTGDYYEDSYEDISAYFDSKNNAIEPRSFSQNPPVLKRHQREGTRTTLQSDQEEIDYDDTISVEMKKEDFDIYDEDENQSPRSFQKKTRHYFIAAVERLWDYGMSSSPHVLRNRAQSGSVPQFKKVVFQEFTDGSFTQPLYRGELNEHLGLLGPYIRAEVEDNIMVTFRNQASRPYSFYSSLISYEEDQRQGAEPRKNFVKPNETKTYFWKVQHHMAPTKDEFDCKAWAYFSDVDLEKDVHSGLIGPLLVCHTNTLNPAHGRQVTVQEFALFFTIFDETKSWYFTENMERNCRAPCNIQMEDPTFKENYRFHAINGYIMDTLPGLVMAQDQRIRWYLLSMGSNENIHSIHFSGHVFTVRKKEEYKMALYNLYPGVFETVEMLPSKAGIWRVECLIGEHLHAGMSTLFLVYSNKCQNPLGMASGHIRDFQITASGQYGQWAPKLARLHYSGSINAWSTKEPFSWIKVDLLAPMIIHGIKTQGARQKFSSLYISQFIIMYSLDGKKWQTYRGNSTGTDMVFFGNVDSSGIKHNIFNPPIIARYIRLHPTHYSIRSTLRMELMGCDLNSCSMPLGMESKAISDAQITASSYFTNMFATWSPSKARLHLQGRSNAWRPQVNNPKEWLQVDFQKTMKVTGVTTQGVKSLDTSMYVKEFLISSSQDGHQWTLFFQNGKVKVFQGNQDSFTPVVNSLDPPLLTRYLRIHPQSWEHQIALRMEVLGCEAQDLY

SEQ ID NO: 1973 - DNA, 4371 bp, synthetic construct
  misc_feature 1..4371: note = Variant of human B-domain deleted Factor VIII
  source 1..4371: mol_type = other DNA
atgcagattgaactgtctacctgcttcttcctctgtttgctgaggttctgctttagcgccactagacggtactaccttggcgctgtggagctgtcctgggactatatgcagagtgatttgggagagcttcccgtcgacgcacgatttcctcctcgcgttccaaagtcatttccctttaacacaagccaggtgtacaagaagacgctcttcgtcgaattcaccgatcacctgttcaatatcgccaaacccagaccaccatggatgggtcttttggggcctaccatacaagcggaggtgtatgacacagttgttatcactctcaagaacatggcttctcatccggtaagtcttcacgcagtgggcgtgtcctactggaaagcttcagaaggagccgagtatgatgatcagacatcccagagggagaaagaagacgacaaggtatttccaggtgggtctcatacctatgtgtggcaagtgctcaaagagaatggccctatggcaagcgatccgccgtgtttgacttacagctacctttcacacgttgacctcgtcaaggacctcaactccgggttgattggagccttgttggtatgcagggaaggatctcttgccaaagagaagacacagaccctggccaagtttatccttctctttgctgtgttcgatgagggcaaaagttggcatagcgaaacgaagaattccctcatgcaggatcgcgacgcagccagcgccagagcttggcccaagatgcacactgtgaacggatatgtcaataggacgcttcctggcttgattgggtgtcatcggaaaagtgtctactggcacgtgatcggaatggggacaacaccagaggtccactccatatttctcgaaggccataccttccttgttcgaaaccacagacaggcatccttggggatctctcccattacctttctcactgcccaaacgctccttcgtgacttgggtcagttccttctcttttgccatatcccgtcacaccagcatgatggtatggaagcttatgtgaaagtcgacagttgtcctgaggagccacagttgcgcatgaagaataatgaagaagccgaggattacgacgacgatctcaccgattctgagatggacgtggtgaggtttgatgacgacaactctccctccatcattcaagctcggagcggggcgaagaaacaccccaagacttgggtccactatatagcggcggaagaggaggattgggattacgctcctcttgtattggcaccagatgaccgctcatacaaaagccagtacctcaacaacggaccgcagagaattggccggaagtataagaaagtgcgatttatggcctatacagacgaaacctttaagacaagggaggccatccagcatgagagtgggattttgggacctcttctttacggcgaagttggtgataccctcctcatcatcttcaagaatcaagcttctcgcccctataacatttacccacacgggatcactgacgttaggcctttgtatagcagaagacttcccaaaggcgtgaagcatctcaaagacttccccattttgccaggcgagatctttaagtacaaatggaccattacagtggaagatggaccgactaaatcagaccctcgatgccttacgcggtactattcctccttcgtgaattgggagagagatttggcaagcggactcataggaccactcctcatctgttacaaggaatctgtagaccagaggggtaaccagattatgagtgataaacgcaatgtgatcctttttagcgtcttcgacgagaaccggtcctggtacttgaccgagaatatacaaaggttccttcccaaccccgcagaggttcagttggaagaccctgagtttcaggccagcaatattatgcactcaatcaacggctatgtgtttgatagtctccagctttctgtttgcctccatgaagtagcctattggtacatcttgtcaattggtgctcaaacagacttcctctccgtcttcttctccggctacacctttaagcacaagggcgtgtatgaggacactctcacactctttccattttctggagaaaccgtgttcatgagcatggagaatccaggcctttggatcttgggttgccacaacagtgattttcgcaatcggggaatgactgctctcctcaaagtcagcagctgtgattggaacacaggcgactattacgaagattcttacgaggacataagtgcctactttgactccaagaataacgccattgagcccagatcattctcccagaatcctcccgtgcttaaaaggcatcagcgcgaaggtaccagaactactcttcagtctgatcaagaggagattgactatgacgacaccattagcgtggaaatgaagaaggaggatttcgatatctatgacgaagatgagaaccagtctccgcggagctttcagaagaagacgcgacactacttcattgcagcagtcgaaaggctttgggactacggtatgtcatcaaagcctcatgtgttgcgcaatagagctcagagtggaagtgttccacagttcaagaaagtcgtctttcaagagtttacagatggcagcttcacacagcctctctatcggggcgagcttaacgaacatttgggactccttggtccctatatccgagccgaagtggaggacaacattatggttacctttaggaatcaagcctctcgcccctacagcttctactcctccctcatcagttatgaggaggatcagagacaaggcgctgaaccacggaagaactttgtgaaaccgaatgagacgaagacctacttctggaaagtacagcaccacatggcccccacaaaagacgaattcgattgcaaagcatgggcgtatttttcagacgttgacttggagaaagatgtacattcaggacttattggtcctttgttggtgtgtcacactaacactctcaatccagcccatggcaggcaggtgacagtccaggaattcgctcttttctttaccatctttgatgagaccaagtcctggtacttcacggaaaacatggagcgcaattgcagagccccctgtaacatacagatggaggaccctacctttaaggaaaattatcggttccacgcaatcaacggatacattatggatacactccctggccttgtgatggctcaggaccaacgaatcaggtggtacctcctcagcatgggttctaatgagaacatacactccattcacttttcaggacatgtgttcactgtccggaagaaagaagagtataagatggccctctacaatttgtatccaggcgtgtttgagaccgttgaaatgcttccctctaaagctggcatctggagagtagagtgcttgatcggagaacatcttcacgcaggtatgagcaccttgttcctcgtgtacagcaacaaatgtcagaatccacttggcatggccagtggacacattcgcgactttcagatcacagcatctggccagtatggacaatgggccccaaagttggctcgcctccattactccggtagcataaatgcgtggtccactaaagaacctttcagctggattaaggtcgatcttcttgcccccatgatcatccacggcattaagacacagggagcgaggcagaaattctcctccctctacatctcacagttcattattatgtatagtttggacggcaagaagtggcaaacttatagaggtaacagtactggaacagacatggtgttcttcggcaacgttgatagctctggcatcaaacacaacatctttaatcctcccataatagctcggtacatcagattgcatccgacccactacagcattaggagtacactccgaatggagcttatgggttgcgacttgaattcctgttcaatgccactcggaatggagtctaaagccatctctgatgcacagataaccgccagtagctactttacgaacatgtttgctacgtggtcaccctctaaggcaaggcttcatttgcaaggccggtctaatgcctggagacctcaggtgaacaacccgaaagaatggctccaggtggactttcagaagaccatgaaagtaacaggtgtcactactcagggagttaagtccttggatactagcatgtatgtgaaggagttccttatttcctcatcacaagatggccaccagtggaccctcttctttcagaatggtaaggtcaaagtgtttcagggcaatcaagacagcttcacacccgtggtgaacagtcttgatcctccactcttgacacgataccttcgaatccatccacagtcttgggagcaccagattgcattgcgcatggaagtacttggatgcgaggctcaggacctctac

SEQ ID NO: 1974 - protein, 1457 aa, synthetic construct
  REGION 1..1457: note = Variant of human B-domain deleted Factor VIII
MQIELSTCFFLCLLRFCFSATRRYYLGAVELSWDYMQSDLGELPVDARFPPRVPKSFPFNTSQVYKKTLFVEFTDHLFNIAKPRPPWMGLLGPTIQAEVYDTVVITLKNMASHPVSLHAVGVSYWKASEGAEYDDQTSQREKEDDKVFPGGSHTYVWQVLKENGPMASDPPCLTYSYLSHVDLVKDLNSGLIGALLVCREGSLAKEKTQTLAKFILLFAVFDEGKSWHSETKNSLMQDRDAASARAWPKMHTVNGYVNRTLPGLIGCHRKSVYWHVIGMGTTPEVHSIFLEGHTFLVRNHRQASLGISPITFLTAQTLLRDLGQFLLFCHIPSHQHDGMEAYVKVDSCPEEPQLRMKNNEEAEDYDDDLTDSEMDVVRFDDDNSPSIIQARSGAKKHPKTWVHYIAAEEEDWDYAPLVLAPDDRSYKSQYLNNGPQRIGRKYKKVRFMAYTDETFKTREAIQHESGILGPLLYGEVGDTLLIIFKNQASRPYNIYPHGITDVRPLYSRRLPKGVKHLKDFPILPGEIFKYKWTITVEDGPTKSDPRCLTRYYSSFVNWERDLASGLIGPLLICYKESVDQRGNQIMSDKRNVILFSVFDENRSWYLTENIQRFLPNPAEVQLEDPEFQASNIMHSINGYVFDSLQLSVCLHEVAYWYILSIGAQTDFLSVFFSGYTFKHKGVYEDTLTLFPFSGETVFMSMENPGLWILGCHNSDFRNRGMTALLKVSSCDWNTGDYYEDSYEDISAYFDSKNNAIEPRSFSQNPPVLKRHQREGTRTTLQSDQEEIDYDDTISVEMKKEDFDIYDEDENQSPRSFQKKTRHYFIAAVERLWDYGMSSKPHVLRNRAQSGSVPQFKKVVFQEFTDGSFTQPLYRGELNEHLGLLGPYIRAEVEDNIMVTFRNQASRPYSFYSSLISYEEDQRQGAEPRKNFVKPNETKTYFWKVQHHMAPTKDEFDCKAWAYFSDVDLEKDVHSGLIGPLLVCHTNTLNPAHGRQVTVQEFALFFTIFDETKSWYFTENMERNCRAPCNIQMEDPTFKENYRFHAINGYIMDTLPGLVMAQDQRIRWYLLSMGSNENIHSIHFSGHVFTVRKKEEYKMALYNLYPGVFETVEMLPSKAGIWRVECLIGEHLHAGMSTLFLVYSNKCQNPLGMASGHIRDFQITASGQYGQWAPKLARLHYSGSINAWSTKEPFSWIKVDLLAPMIIHGIKTQGARQKFSSLYISQFIIMYSLDGKKWQTYRGNSTGTDMVFFGNVDSSGIKHNIFNPPIIARYIRLHPTHYSIRSTLRMELMGCDLNSCSMPLGMESKAISDAQITASSYFTNMFATWSPSKARLHLQGRSNAWRPQVNNPKEWLQVDFQKTMKVTGVTTQGVKSLDTSMYVKEFLISSSQDGHQWTLFFQNGKVKVFQGNQDSFTPVVNSLDPPLLTRYLRIHPQSWEHQIALRMEVLGCEAQDLY

SEQ ID NO: 1975 - DNA, 4371 bp, synthetic construct
  misc_feature 1..4371: note = Variant of human B-domain deleted Factor VIII
  source 1..4371: mol_type = other DNA
atgcagattgaactgtctacctgcttcttcctctgtttgctgaggttctgctttagcgccactagacggtactaccttggcgctgtggagctgtcctgggactatatgcagagtgatttgggagagcttcccgtcgacgcacgatttcctcctcgcgttccaaagtcatttccctttaacacaagccaggtgtacaagaagacgctcttcgtcgaattcaccgatcacctgttcaatatcgccaaacccagaccaccatggatgggtcttttggggcctaccatacaagcggaggtgtatgacacagttgttatcactctcaagaacatggcttctcatccggtaagtcttcacgcagtgggcgtgtcctactggaaagcttcagaaggagccgagtatgatgatcagacatcccagagggagaaagaagacgacaaggtatttccaggtgggtctcatacctatgtgtggcaagtgctcaaagagaatggccctatggcaagcgatccgccgtgtttgacttacagctacctttcacacgttgacctcgtcaaggacctcaactccgggttgattggagccttgttggtatgcagggaaggatctcttgccaaagagaagacacagaccctggccaagtttatccttctctttgctgtgttcgatgagggcaaaagttggcatagcgaaacgaagaattccctcatgcaggatcgcgacgcagccagcgccagagcttggcccaagatgcacactgtgaacggatatgtcaataggacgcttcctggcttgattgggtgtcatcggaaaagtgtctactggcacgtgatcggaatggggacaacaccagaggtccactccatatttctcgaaggccataccttccttgttcgaaaccacagacaggcatccttggggatctctcccattacctttctcactgcccaaacgctccttcgtgacttgggtcagttccttctcttttgccatatcccgtcacaccagcatgatggtatggaagcttatgtgaaagtcgacagttgtcctgaggagccacagttgcgcatgaagaataatgaagaagccgaggattacgacgacgatctcaccgattctgagatggacgtggtgaggtttgatgacgacaactctccctccatcattcaagctcggagcggggcgaagaaacaccccaagacttgggtccactatatagcggcggaagaggaggattgggattacgctcctcttgtattggcaccagatgaccgctcatacaaaagccagtacctcaacaacggaccgcagagaattggccggaagtataagaaagtgcgatttatggcctatacagacgaaacctttaagacaagggaggccatccagcatgagagtgggattttgggacctcttctttacggcgaagttggtgataccctcctcatcatcttcaagaatcaagcttctcgcccctataacatttacccacacgggatcactgacgttaggcctttgtatagcagaagacttcccaaaggcgtgaagcatctcaaagacttccccattttgccaggcgagatctttaagtacaaatggaccattacagtggaagatggaccgactaaatcagaccctcgatgccttacgcggtactattcctccttcgtgaattgggagagagatttggcaagcggactcataggaccactcctcatctgttacaaggaatctgtagaccagaggggtaaccagattatgagtgataaacgcaatgtgatcctttttagcgtcttcgacgagaaccggtcctggtacttgaccgagaatatacaaaggttccttcccaaccccgcagaggttcagttggaagaccctgagtttcaggccagcaatattatgcactcaatcaacggctatgtgtttgatagtctccagctttctgtttgcctccatgaagtagcctattggtacatcttgtcaattggtgctcaaacagacttcctctccgtcttcttctccggctacacctttaagcacaagggcgtgtatgaggacactctcacactctttccattttctggagaaaccgtgttcatgagcatggagaatccaggcctttggatcttgggttgccacaacagtgattttcgcaatcggggaatgactgctctcctcaaagtcagcagctgtgattggaacacaggcgactattacgaagattcttacgaggacataagtgcctactttgactccaagaataacgccattgagcccagatcattctcccagaatcctcccgtgcttaaaaggcatcagcgcgaaggtaccagaactactcttcagtctgatcaagaggagattgactatgacgacaccattagcgtggaaatgaagagcgaggatttcgatatccaggacgaagatgagaaccagtctccgcggagctttcagaagaagacgcgacactacttcattgcagcagtcgaaaggctttgggactacggtatgtcatcaagtcctcatgtgttgcgcaatagagctcagagtggaagtgttccacagttcaagaaagtcgtctttcaagagtttacagatggcagcttcacacagcctctctatcggggcgagcttaacgaacatttgggactccttggtccctatatccgagccgaagtggaggacaacattatggttacctttaggaatcaagcctctcgcccctacagcttctactcctccctcatcagttatgaggaggatcagagacaaggcgctgaaccacggaagaactttgtgaaaccgaatgagacgaagacctacttctggaaagtacagcaccacatggcccccacaaaagacgaattcgattgcaaagcatgggcgtatttttcagacgttgacttggagaaagatgtacattcaggacttattggtcctttgttggtgtgtcacactaacactctcaatccagcccatggcaggcaggtgacagtccaggaattcgctcttttctttaccatctttgatgagaccaagtcctggtacttcacggaaaacatggagcgcaattgcagagccccctgtaacatacagatggaggaccctacctttaaggaaaattatcggttccacgcaatcaacggatacattatggatacactccctggccttgtgatggctcaggaccaacgaatcaggtggtacctcctcagcatgggttctaatgagaacatacactccattcacttttcaggacatgtgttcactgtccggaagaaagaagagtataagatggccctctacaatttgtatccaggcgtgtttgagaccgttgaaatgcttccctctaaagctggcatctggagagtagagtgcttgatcggagaacatcttcacgcaggtatgagcaccttgttcctcgtgtacagcaacaaatgtcagaatccacttggcatggccagtggacacattcgcgactttcagatcacagcatctggccagtatggacaatgggccccaaagttggctcgcctccattactccggtagcataaatgcgtggtccactaaagaacctttcagctggattaaggtcgatcttcttgcccccatgatcatccacggcattaagacacagggagcgaggcagaaattctcctccctctacatctcacagttcattattatgtatagtttggacggcaagaagtggcaaacttatagaggtaacagtactggaacagacatggtgttcttcggcaacgttgatagctctggcatcaaacacaacatctttaatcctcccataatagctcggtacatcagattgcatccgacccactacagcattaggagtacactccgaatggagcttatgggttgcgacttgaattcctgttcaatgccactcggaatggagtctaaagccatctctgatgcacagataaccgccagtagctactttacgaacatgtttgctacgtggtcaccctctaaggcaaggcttcatttgcaaggccggtctaatgcctggagacctcaggtgaacaacccgaaagaatggctccaggtggactttcagaagaccatgaaagtaacaggtgtcactactcagggagttaagtccttggatactagcatgtatgtgaaggagttccttatttcctcatcacaagatggccaccagtggaccctcttctttcagaatggtaaggtcaaagtgtttcagggcaatcaagacagcttcacacccgtggtgaacagtcttgatcctccactcttgacacgataccttcgaatccatccacagtcttgggagcaccagattgcattgcgcatggaagtacttggatgcgaggctcaggacctctac

SEQ ID NO: 1976 - protein, 1457 aa, synthetic construct
  REGION 1..1457: note = Variant of human B-domain deleted Factor VIII
MQIELSTCFFLCLLRFCFSATRRYYLGAVELSWDYMQSDLGELPVDARFPPRVPKSFPFNTSQVYKKTLFVEFTDHLFNIAKPRPPWMGLLGPTIQAEVYDTVVITLKNMASHPVSLHAVGVSYWKASEGAEYDDQTSQREKEDDKVFPGGSHTYVWQVLKENGPMASDPPCLTYSYLSHVDLVKDLNSGLIGALLVCREGSLAKEKTQTLAKFILLFAVFDEGKSWHSETKNSLMQDRDAASARAWPKMHTVNGYVNRTLPGLIGCHRKSVYWHVIGMGTTPEVHSIFLEGHTFLVRNHRQASLGISPITFLTAQTLLRDLGQFLLFCHIPSHQHDGMEAYVKVDSCPEEPQLRMKNNEEAEDYDDDLTDSEMDVVRFDDDNSPSIIQARSGAKKHPKTWVHYIAAEEEDWDYAPLVLAPDDRSYKSQYLNNGPQRIGRKYKKVRFMAYTDETFKTREAIQHESGILGPLLYGEVGDTLLIIFKNQASRPYNIYPHGITDVRPLYSRRLPKGVKHLKDFPILPGEIFKYKWTITVEDGPTKSDPRCLTRYYSSFVNWERDLASGLIGPLLICYKESVDQRGNQIMSDKRNVILFSVFDENRSWYLTENIQRFLPNPAEVQLEDPEFQASNIMHSINGYVFDSLQLSVCLHEVAYWYILSIGAQTDFLSVFFSGYTFKHKGVYEDTLTLFPFSGETVFMSMENPGLWILGCHNSDFRNRGMTALLKVSSCDWNTGDYYEDSYEDISAYFDSKNNAIEPRSFSQNPPVLKRHQREGTRTTLQSDQEEIDYDDTISVEMKSEDFDIQDEDENQSPRSFQKKTRHYFIAAVERLWDYGMSSSPHVLRNRAQSGSVPQFKKVVFQEFTDGSFTQPLYRGELNEHLGLLGPYIRAEVEDNIMVTFRNQASRPYSFYSSLISYEEDQRQGAEPRKNFVKPNETKTYFWKVQHHMAPTKDEFDCKAWAYFSDVDLEKDVHSGLIGPLLVCHTNTLNPAHGRQVTVQEFALFFTIFDETKSWYFTENMERNCRAPCNIQMEDPTFKENYRFHAINGYIMDTLPGLVMAQDQRIRWYLLSMGSNENIHSIHFSGHVFTVRKKEEYKMALYNLYPGVFETVEMLPSKAGIWRVECLIGEHLHAGMSTLFLVYSNKCQNPLGMASGHIRDFQITASGQYGQWAPKLARLHYSGSINAWSTKEPFSWIKVDLLAPMIIHGIKTQGARQKFSSLYISQFIIMYSLDGKKWQTYRGNSTGTDMVFFGNVDSSGIKHNIFNPPIIARYIRLHPTHYSIRSTLRMELMGCDLNSCSMPLGMESKAISDAQITASSYFTNMFATWSPSKARLHLQGRSNAWRPQVNNPKEWLQVDFQKTMKVTGVTTQGVKSLDTSMYVKEFLISSSQDGHQWTLFFQNGKVKVFQGNQDSFTPVVNSLDPPLLTRYLRIHPQSWEHQIALRMEVLGCEAQDLY

SEQ ID NO: 1977 - DNA, 4371 bp, synthetic construct
  misc_feature 1..4371: note = Variant of human B-domain deleted Factor VIII
  source 1..4371: mol_type = other DNA
atgcagattgaactgtctacctgcttcttcctctgtttgctgaggttctgctttagcgccactagacggtactaccttggcgctgtggagctgtcctgggactatatgcagagtgatttgggagagcttcccgtcgacgcacgatttcctcctcgcgttccaaagtcatttccctttaacacaagccaggtgtacaagaagacgctcttcgtcgaattcaccgatcacctgttcaatatcgccaaacccagaccaccatggatgggtcttttggggcctaccatacaagcggaggtgtatgacacagttgttatcactctcaagaacatggcttctcatccggtaagtcttcacgcagtgggcgtgtcctactggaaagcttcagaaggagccgagtatgatgatcagacatcccagagggagaaagaagacgacaaggtatttccaggtgggtctcatacctatgtgtggcaagtgctcaaagagaatggccctatggcaagcgatccgccgtgtttgacttacagctacctttcacacgttgacctcgtcaaggacctcaactccgggttgattggagccttgttggtatgcagggaaggatctcttgccaaagagaagacacagaccctggccaagtttatccttctctttgctgtgttcgatgagggcaaaagttggcatagcgaaacgaagaattccctcatgcaggatcgcgacgcagccagcgccagagcttggcccaagatgcacactgtgaacggatatgtcaataggacgcttcctggcttgattgggtgtcatcggaaaagtgtctactggcacgtgatcggaatggggacaacaccagaggtccactccatatttctcgaaggccataccttccttgttcgaaaccacagacaggcatccttggggatctctcccattacctttctcactgcccaaacgctccttcgtgacttgggtcagttccttctcttttgccatatcccgtcacaccagcatgatggtatggaagcttatgtgaaagtcgacagttgtcctgaggagccacagttgcgcatgaagaataatgaagaagccgaggattacgacgacgatctcaccgattctgagatggacgtggtgaggtttgatgacgacaactctccctccatcattcaagctcggagcggggcgaagaaacaccccaagacttgggtccactatatagcggcggaagaggaggattgggattacgctcctcttgtattggcaccagatgaccgctcatacaaaagccagtacctcaacaacggaccgcagagaattggccggaagtataagaaagtgcgatttatggcctatacagacgaaacctttaagacaagggaggccatccagcatgagagtgggattttgggacctcttctttacggcgaagttggtgataccctcctcatcatcttcaagaatcaagcttctcgcccctataacatttacccacacgggatcactgacgttaggcctttgtatagcagaagacttcccaaaggcgtgaagcatctcaaagacttccccattttgccaggcgagatctttaagtacaaatggaccattacaccagaagatggaccgactaaatcagaccctcgatgccttacgcggtactattcctccttcgtgaattgggagagagatttggcaagcggactcataggaccactcctcatctgttacaaggaatctgtagaccagaggggtaaccagattatgagtgataaacgcaatgtgatcctttttagcgtcttcgacgagaaccggtcctggtacttgaccgagaatatacaaaggttccttcccaaccccgcaggcgttcagttggaagaccctgagtttcaggccagcaatattatgcactcaatcaacggctatgtgtttgatagtctccagctttctgtttgcctccatgaagtagcctattggtacatcttgtcaattggtgctcaaacagacttcctctccgtcttcttctccggctacacctttaagcacaagggcgtgtatgaggacactctcacactctttccattttctggagaaaccgtgttcatgagcatggagaatccaggcctttggatcttgggttgccacaacagtgattttcgcaatcggggaatgactgctctcctcaaagtcagcagctgtgattggaacacaggcgactattacgaagattcttacgaggacataagtgcctactttgactccaagaataacgccattgagcccagatcattctcccagaatcctcccgtgcttaaaaggcatcagcgcgaaggtaccagaactactcttcagtctgatcaagaggagattgactatgacgacaccattagcgtggaaatgaagaaagagggtttcgatatccaggacgaagatgagaaccagtctccgcggagctttcagaagaagacgcgacactacttcattgcagcagtcgaaaggctttgggactacggtatgtcatcatcccctcatgtgttgcgcaatagagctcagagtggaagtgttccacagttcaagaaagtcgtctttcaagagtttacagatggcagcttcacacagcctctctatcggggcgagcttaacgaacatttgggactccttggtccctatatccgagccgaagtggaggacaacattatggttacctttaggaatcaagcctctcgcccctacagcttctactcctccctcatcagttatgaggaggatcagagacaaggcgctgaaccacggaagaactttgtgaaaccgaatgagacgaagacctacttctggaaagtacagcaccacatggcccccacaaaagacgaattcgattgcaaagcatgggcgtatttttcagacgttgacttggagaaagatgtacattcaggacttattggtcctttgttggtgtgtcacactaacactctcaatccagcccatggcaggcaggtgacagtccaggaattcgctcttttctttaccatctttgatgagaccaagtcctggtacttcacggaaaacatggagcgcaattgcagagccccctgtaacatacagatggaggaccctacctttaaggaaaattatcggttccacgcaatcaacggatacattatggatacactccctggccttgtgatggctcaggaccaacgaatcaggtggtacctcctcagcatgggttctaatgagaacatacactccattcacttttcaggacatgtgttcactgtccggaagaaagaagagtataagatggccctctacaatttgtatccaggcgtgtttgagaccgttgaaatgcttccctctaaagctggcatctggagagtagagtgcttgatcggagaacatcttcacgcaggtatgagcaccttgttcctcgtgtacagcaacaaatgtcagaatccacttggcatggccagtggacacattcgcgactttcagatcacagcatctggccagtatggacaatgggccccaaagttggctcgcctccattactccggtagcataaatgcgtggtccactaaagaacctttcagctggattaaggtcgatcttcttgcccccatgatcatccacggcattaagacacagggagcgaggcagaaattctcctccctctacatctcacagttcattattatgtatagtttggacggcaagaagtggcaaacttatagaggtaacagtactggaacagacatggtgttcttcggcaacgttgatagctctggcatcaaacacaacatctttaatcctcccataatagctcggtacatcagattgcatccgacccactacagcattaggagtacactccgaatggagcttatgggttgcgacttgaattcctgttcaatgccactcggaatggagtctaaagccatctctgatgcacagataaccgccagtagctactttacgaacatgtttgctacgtggtcaccctctaaggcaaggcttcatttgcaaggccggtctaatgcctggagacctcaggtgaacaacccgaaagaatggctccaggtggactttcagaagaccatgaaagtaacaggtgtcactactcagggagttaagtccttggatactagcatgtatgtgaaggagttccttatttcctcatcacaagatggccaccagtggaccctcttctttcagaatggtaaggtcaaagtgtttcagggcaatcaagacagcttcacacccgtggtgaacagtcttgatcctccactcttgacacgataccttcgaatccatccacagtcttgggagcaccagattgcattgcgcatggaagtacttggatgcgaggctcaggacctctac

SEQ ID NO: 1978 - protein, 1457 aa, synthetic construct
  REGION 1..1457: note = Variant of human B-domain deleted Factor VIII
MQIELSTCFFLCLLRFCFSATRRYYLGAVELSWDYMQSDLGELPVDARFPPRVPKSFPFNTSQVYKKTLFVEFTDHLFNIAKPRPPWMGLLGPTIQAEVYDTVVITLKNMASHPVSLHAVGVSYWKASEGAEYDDQTSQREKEDDKVFPGGSHTYVWQVLKENGPMASDPPCLTYSYLSHVDLVKDLNSGLIGALLVCREGSLAKEKTQTLAKFILLFAVFDEGKSWHSETKNSLMQDRDAASARAWPKMHTVNGYVNRTLPGLIGCHRKSVYWHVIGMGTTPEVHSIFLEGHTFLVRNHRQASLGISPITFLTAQTLLRDLGQFLLFCHIPSHQHDGMEAYVKVDSCPEEPQLRMKNNEEAEDYDDDLTDSEMDVVRFDDDNSPSIIQARSGAKKHPKTWVHYIAAEEEDWDYAPLVLAPDDRSYKSQYLNNGPQRIGRKYKKVRFMAYTDETFKTREAIQHESGILGPLLYGEVGDTLLIIFKNQASRPYNIYPHGITDVRPLYSRRLPKGVKHLKDFPILPGEIFKYKWTITPEDGPTKSDPRCLTRYYSSFVNWERDLASGLIGPLLICYKESVDQRGNQIMSDKRNVILFSVFDENRSWYLTENIQRFLPNPAGVQLEDPEFQASNIMHSINGYVFDSLQLSVCLHEVAYWYILSIGAQTDFLSVFFSGYTFKHKGVYEDTLTLFPFSGETVFMSMENPGLWILGCHNSDFRNRGMTALLKVSSCDWNTGDYYEDSYEDISAYFDSKNNAIEPRSFSQNPPVLKRHQREGTRTTLQSDQEEIDYDDTISVEMKKEGFDIQDEDENQSPRSFQKKTRHYFIAAVERLWDYGMSSSPHVLRNRAQSGSVPQFKKVVFQEFTDGSFTQPLYRGELNEHLGLLGPYIRAEVEDNIMVTFRNQASRPYSFYSSLISYEEDQRQGAEPRKNFVKPNETKTYFWKVQHHMAPTKDEFDCKAWAYFSDVDLEKDVHSGLIGPLLVCHTNTLNPAHGRQVTVQEFALFFTIFDETKSWYFTENMERNCRAPCNIQMEDPTFKENYRFHAINGYIMDTLPGLVMAQDQRIRWYLLSMGSNENIHSIHFSGHVFTVRKKEEYKMALYNLYPGVFETVEMLPSKAGIWRVECLIGEHLHAGMSTLFLVYSNKCQNPLGMASGHIRDFQITASGQYGQWAPKLARLHYSGSINAWSTKEPFSWIKVDLLAPMIIHGIKTQGARQKFSSLYISQFIIMYSLDGKKWQTYRGNSTGTDMVFFGNVDSSGIKHNIFNPPIIARYIRLHPTHYSIRSTLRMELMGCDLNSCSMPLGMESKAISDAQITASSYFTNMFATWSPSKARLHLQGRSNAWRPQVNNPKEWLQVDFQKTMKVTGVTTQGVKSLDTSMYVKEFLISSSQDGHQWTLFFQNGKVKVFQGNQDSFTPVVNSLDPPLLTRYLRIHPQSWEHQIALRMEVLGCEAQDLY

SEQ ID NO: 1979 - DNA, 4371 bp, synthetic construct
  misc_feature 1..4371: note = Variant of human B-domain deleted Factor VIII
  source 1..4371: mol_type = other DNA
atgcagattgaactgtctacctgcttcttcctctgtttgctgaggttctgctttagcgccactagacggtactaccttggcgctgtggagctgtcctgggactatatgcagagtgatttgggagagcttcccgtcgacgcacgatttcctcctcgcgttccaaagtcatttccctttaacacaagccaggtgtacaagaagacgctcttcgtcgaattcaccgatcacctgttcaatatcgccaaacccagaccaccatggatgggtcttttggggcctaccatacaagcggaggtgtatgacacagttgttatcactctcaagaacatggcttctcatccggtaagtcttcacgcagtgggcgtgtcctactggaaagcttcagaaggagccgagtatgatgatcagacatcccagagggagaaagaagacgacaaggtatttccaggtgggtctcatacctatgtgtggcaagtgctcaaagagaatggccctatggcaagcgatccgccgtgtttgacttacagctacctttcacacgttgacctcgtcaaggacctcaactccgggttgattggagccttgttggtatgcagggaaggatctcttgccaaagagaagacacagaccctggccaagtttatccttctctttgctgtgttcgatgagggcaaaagttggcatagcgaaacgaagaattccctcatgcaggatcgcgacgcagccagcgccagagcttggcccaagatgcacactgtgaacggatatgtcaataggacgcttcctggcttgattgggtgtcatcggaaaagtgtctactggcacgtgatcggaatggggacaacaccagaggtccactccatatttctcgaaggccataccttccttgttcgaaaccacagacaggcatccttggggatctctcccattacctttctcactgcccaaacgctccttcgtgacttgggtcagttccttctcttttgccatatcccgtcacaccagcatgatggtatggaagcttatgtgaaagtcgacagttgtcctgaggagccacagttgcgcatgaagaataatgaagaagccgaggattacgacgacgatctcaccgattctgagatggacgtggtgaggtttgatgacgacaactctccctccatcattcaagctcggagcggggcgaagaaacaccccaagacttgggtccactatatagcggcggaagaggaggattgggattacgctcctcttgtattggcaccagatgaccgctcatacaaaagccagtacctcaacaacggaccgcagagaattggccggaagtataagaaagtgcgatttatggcctatacagacgaaacctttaagacaagggaggccatccagcatgagagtgggattttgggacctcttctttacggcgaagttggtgataccctcctcatcatcttcaagaatcaagcttctcgcccctataacatttacccacacgggatcactgacgttaggcctttgtatagcagaagacttcccaaaggcgtgaagcatctcaaagacttccccattttgccaggcgagatctttaagtacaaatggaccattacagtggaagatggaccgactaaatcagaccctcgatgccttacgcggtactattcctccgaagtgaattgggagagagatttggcaagcggactcataggaccactcctcatctgttacaaggaatctgtagaccagaggggtaaccagattatgagtgataaacgcaatgtgatcctttttagcgtcttcgacgagaaccggtcctggtacttgaccgagaatatacaaaggttccttcccaaccccgcagaggttcagttggaagaccctgagtttcaggccagcaatattatgcactcaatcaacggctatgtgtttgatagtctccagctttctgtttgcctccatgaagtagcctattggtacatcttgtcaattggtgctcaaacagacttcctctccgtcttcttctccggctacacctttaagcacaagggcgtgtatgaggacactctcacactctttccattttctggagaaaccgtgttcatgagcatggagaatccaggcctttggatcttgggttgccacaacagtgattttcgcaatcggggaatgactgctctcctcaaagtcagcagctgtgattggaacacaggcgactattacgaagattcttacgaggacataagtgcctactttgactccaagaataacgccattgagcccagatcattctcccagaatcctcccgtgcttaaaaggcatcagcgcgaaggtaccagaactactcttcagtctgatcaagaggagattgactatgacgacaccattagcgtggaaatgaagagcgaggatttcgatatccaggacgaagatgagaaccagtctccgcggagctttcagaagaagacgcgacactacttcattgcagcagtcgaaaggctttgggactacggtatgtcatcaagtcctcatgtgttgcgcaatagagctcagagtggaagtgttccacagttcaagaaagtcgtctttcaagagtttacagatggcagcttcacacagcctctctatcggggcgagcttaacgaacatttgggactccttggtccctatatccgagccgaagtggaggacaacattatggttacctttaggaatcaagcctctcgcccctacagcttctactcctccctcatcagttatgaggaggatcagagacaaggcgctgaaccacggaagaactttgtgaaaccgaatgagacgaagacctacttctggaaagtacagcaccacatggcccccacaaaagacgaattcgattgcaaagcatgggcgtatttttcagacgttgacttggagaaagatgtacattcaggacttattggtcctttgttggtgtgtcacactaacactctcaatccagcccatggcaggcaggtgacagtccaggaattcgctcttttctttaccatctttgatgagaccaagtcctggtacttcacggaaaacatggagcgcaattgcagagccccctgtaacatacagatggaggaccctacctttaaggaaaattatcggttccacgcaatcaacggatacattatggatacactccctggccttgtgatggctcaggaccaacgaatcaggtggtacctcctcagcatgggttctaatgagaacatacactccattcacttttcaggacatgtgttcactgtccggaagaaagaagagtataagatggccctctacaatttgtatccaggcgtgtttgagaccgttgaaatgcttccctctaaagctggcatctggagagtagagtgcttgatcggagaacatcttcacgcaggtatgagcaccttgttcctcgtgtacagcaacaaatgtcagaatccacttggcatggccagtggacacattcgcgactttcagatcacagcatctggccagtatggacaatgggccccaaagttggctcgcctccattactccggtagcataaatgcgtggtccactaaagaacctttcagctggattaaggtcgatcttcttgcccccatgatcatccacggcattaagacacagggagcgaggcagaaattctcctccctctacatctcacagttcattattatgtatagtttggacggcaagaagtggcaaacttatagaggtaacagtactggaacagacatggtgttcttcggcaacgttgatagctctggcatcaaacacaacatctttaatcctcccataatagctcggtacatcagattgcatccgacccactacagcattaggagtacactccgaatggagcttatgggttgcgacttgaattcctgttcaatgccactcggaatggagtctaaagccatctctgatgcacagataaccgccagtagctactttacgaacatgtttgctacgtggtcaccctctaaggcaaggcttcatttgcaaggccggtctaatgcctggagacctcaggtgaacaacccgaaagaatggctccaggtggactttcagaagaccatgaaagtaacaggtgtcactactcagggagttaagtccttggatactagcatgtatgtgaaggagttccttatttcctcatcacaagatggccaccagtggaccctcttctttcagaatggtaaggtcaaagtgtttcagggcaatcaagacagcttcacacccgtggtgaacagtcttgatcctccactcttgacacgataccttcgaatccatccacagtcttgggagcaccagattgcattgcgcatggaagtacttggatgcgaggctcaggacctctac

SEQ ID NO: 1980 - protein, 1457 aa, synthetic construct
  REGION 1..1457: note = Variant of human B-domain deleted Factor VIII
MQIELSTCFFLCLLRFCFSATRRYYLGAVELSWDYMQSDLGELPVDARFPPRVPKSFPFNTSQVYKKTLFVEFTDHLFNIAKPRPPWMGLLGPTIQAEVYDTVVITLKNMASHPVSLHAVGVSYWKASEGAEYDDQTSQREKEDDKVFPGGSHTYVWQVLKENGPMASDPPCLTYSYLSHVDLVKDLNSGLIGALLVCREGSLAKEKTQTLAKFILLFAVFDEGKSWHSETKNSLMQDRDAASARAWPKMHTVNGYVNRTLPGLIGCHRKSVYWHVIGMGTTPEVHSIFLEGHTFLVRNHRQASLGISPITFLTAQTLLRDLGQFLLFCHIPSHQHDGMEAYVKVDSCPEEPQLRMKNNEEAEDYDDDLTDSEMDVVRFDDDNSPSIIQARSGAKKHPKTWVHYIAAEEEDWDYAPLVLAPDDRSYKSQYLNNGPQRIGRKYKKVRFMAYTDETFKTREAIQHESGILGPLLYGEVGDTLLIIFKNQASRPYNIYPHGITDVRPLYSRRLPKGVKHLKDFPILPGEIFKYKWTITVEDGPTKSDPRCLTRYYSSEVNWERDLASGLIGPLLICYKESVDQRGNQIMSDKRNVILFSVFDENRSWYLTENIQRFLPNPAEVQLEDPEFQASNIMHSINGYVFDSLQLSVCLHEVAYWYILSIGAQTDFLSVFFSGYTFKHKGVYEDTLTLFPFSGETVFMSMENPGLWILGCHNSDFRNRGMTALLKVSSCDWNTGDYYEDSYEDISAYFDSKNNAIEPRSFSQNPPVLKRHQREGTRTTLQSDQEEIDYDDTISVEMKSEDFDIQDEDENQSPRSFQKKTRHYFIAAVERLWDYGMSSSPHVLRNRAQSGSVPQFKKVVFQEFTDGSFTQPLYRGELNEHLGLLGPYIRAEVEDNIMVTFRNQASRPYSFYSSLISYEEDQRQGAEPRKNFVKPNETKTYFWKVQHHMAPTKDEFDCKAWAYFSDVDLEKDVHSGLIGPLLVCHTNTLNPAHGRQVTVQEFALFFTIFDETKSWYFTENMERNCRAPCNIQMEDPTFKENYRFHAINGYIMDTLPGLVMAQDQRIRWYLLSMGSNENIHSIHFSGHVFTVRKKEEYKMALYNLYPGVFETVEMLPSKAGIWRVECLIGEHLHAGMSTLFLVYSNKCQNPLGMASGHIRDFQITASGQYGQWAPKLARLHYSGSINAWSTKEPFSWIKVDLLAPMIIHGIKTQGARQKFSSLYISQFIIMYSLDGKKWQTYRGNSTGTDMVFFGNVDSSGIKHNIFNPPIIARYIRLHPTHYSIRSTLRMELMGCDLNSCSMPLGMESKAISDAQITASSYFTNMFATWSPSKARLHLQGRSNAWRPQVNNPKEWLQVDFQKTMKVTGVTTQGVKSLDTSMYVKEFLISSSQDGHQWTLFFQNGKVKVFQGNQDSFTPVVNSLDPPLLTRYLRIHPQSWEHQIALRMEVLGCEAQDLY

SEQ ID NO: 1981 - DNA, 4371 bp, synthetic construct
  misc_feature 1..4371: note = Variant of human B-domain deleted Factor VIII
  source 1..4371: mol_type = other DNA
atgcagattgaactgtctacctgcttcttcctctgtttgctgaggttctgctttagcgccactagacggtactaccttggcgctgtggagctgtcctgggactatatgcagagtgatttgggagagcttcccgtcgacgcacgatttcctcctcgcgttccaaagtcatttccctttaacacaagccaggtgtacaagaagacgctcttcgtcgaattcaccgatcacctgttcaatatcgccaaacccagaccaccatggatgggtcttttggggcctaccatacaagcggaggtgtatgacacagttgttatcactctcaagaacatggcttctcatccggtaagtcttcacgcagtgggcgtgtcctactggaaagcttcagaaggagccgagtatgatgatcagacatcccagagggagaaagaagacgacaaggtatttccaggtgggtctcatacctatgtgtggcaagtgctcaaagagaatggccctatggcaagcgatccgccgtgtttgacttacagctacctttcacacgttgacctcgtcaaggacctcaactccgggttgattggagccttgttggtatgcagggaaggatctcttgccaaagagaagacacagaccctggccaagtttatccttctctttgctgtgttcgatgagggcaaaagttggcatagcgaaacgaagaattccctcatgcaggatcgcgacgcagccagcgccagagcttggcccaagatgcacactgtgaacggatatgtcaataggacgcttcctggcttgattgggtgtcatcggaaaagtgtctactggcacgtgatcggaatggggacaacaccagaggtccactccatatttctcgaaggccataccttccttgttcgaaaccacagacaggcatccttggggatctctcccattacctttctcactgcccaaacgctccttcgtgacttgggtcagttccttctcttttgccatatcccgtcacaccagcatgatggtatggaagcttatgtgaaagtcgacagttgtcctgaggagccacagttgcgcatgaagaataatgaagaagccgaggattacgacgacgatctcaccgattctgagatggacgtggtgaggtttgatgacgacaactctccctccatcattcaagctcggagcggggcgaagaaacaccccaagacttgggtccactatatagcggcggaagaggaggattgggattacgctcctcttgtattggcaccagatgaccgctcatacaaaagccagtacctcaacaacggaccgcagagaattggccggaagtataagaaagtgcgatttatggcctatacagacgaaacctttaagacaagggaggccatccagcatgagagtgggattttgggacctcttctttacggcgaagttggtgataccctcctcatcatcttcaagaatcaagcttctcgcccctataacatttacccacacgggatcactgacgttaggcctttgtatagcagaagacttcccaaaggcgtgaagcatctcaaagacttccccattttgccaggcgagatctttaagtacaaatggaccattacagtggaagatggaccgactaaatcagaccctcgatgccttacgcggtactattcctccttcgtgaattgggagagagatttggcaagcggactcataggaccactcctcatctgttacaaggaatctgtagaccagaggggtaaccagattatgagtgataaacgcaatgtgatcctttttagcgtcttcgacgagaaccggtcctggtacttgaccgagaatatacaaaggttccttcccaaccccgcagaggttcagttggaagaccctgagtttcaggccagcaatattatgcactcaatcaacggctatgtgtttgatagtctccagctttctgtttgcctccatgaagtagcctattggtacatcttgtcaattggtgctcaaacagacttcctctccgtcttcttctccggctacacctttaagcacaagggcgtgtatgaggacactctcacactctttccattttctggagaaaccgtgttcatgagcatggagaatccaggcctttggatcttgggttgccacaacagtgattttcgcaatcggggaatgactgctctcctcaaagtcagcagctgtgattggaacacaggcgactattacgaagattcttacgaggacataagtgcctactttgactccaagaataacgccattgagcccagatcattctcccagaatcctcccgtgcttaaaaggcatcagcgcgaaggtaccagaactactcttcagtctgatcaagaggagattgactatgacgacaccattagcgtggaaatgaagaaagagggtttcgatatccaggacgaagatgagaaccagtctccgcggagctttcagaagaagacgcgacactacttcattgcagcagtcgaaaggctttgggactacggtatgtcatcatcccctcatgtgttgcgcaatagagctcagagtggaagtgttccacagttcaagaaagtcgtctttcaagagtttacagatggcagcttcacacagcctctctatcggggcgagcttaacgaacatttgggactccttggtccctatatccgagccgaagtggaggacaacattatggttacctttaggaatcaagcctctcgcccctacagcttctactcctccctcatcagttatgaggaggatcagagacaaggcgctgaaccacggaagaactttgtgaaaccgaatgagacgaagacctacttctggaaagtacagcaccacatggcccccacaaaagacgaattcgattgcaaagcatgggcgtatttttcagacgttgacttggagaaagatgtacattcaggacttattggtcctttgttggtgtgtcacactaacactctcaatccagcccatggcaggcaggtgacagtccaggaattcgctcttttctttaccatctttgatgagaccaagtcctggtacttcacggaaaacatggagcgcaattgcagagccccctgtaacatacagatggaggaccctacctttaaggaaaattatcggttccacgcaatcaacggatacattatggatacactccctggccttgtgatggctcaggaccaacgaatcaggtggtacctcctcagcatgggttctaatgagaacatacactccattcacttttcaggacatgtgttcactgtccggaagaaagaagagtataagatggccctctacaatttgtatccaggcgtgtttgagaccgttgaaatgcttccctctaaagctggcatctggagagtagagtgcttgatcggagaacatcttcacgcaggtatgagcaccttgttcctcgtgtacagcaacaaatgtcagaatccacttggcatggccagtggacacattcgcgactttcagatcacagcatctggccagtatggacaatgggccccaaagttggctcgcctccattactccggtagcataaatgcgtggtccactaaagaacctttcagctggattaaggtcgatcttcttgcccccatgatcatccacggcattaagacacagggagcgaggcagaaattctcctccctctacatctcacagttcattattatgtatagtttggacggcaagaagtggcaaacttatagaggtaacagtactggaacagacatggtgttcttcggcaacgttgatagctctggcatcaaacacaacatctttaatcctcccataatagctcggtacatcagattgcatccgacccactacagcattaggagtacactccgaatggagcttatgggttgcgacttgaattcctgttcaatgccactcggaatggagtctaaagccatctctgatgcacagataaccgccagtagctactttacgaacatgtttgctacgtggtcaccctctaaggcaaggcttcatttgcaaggccggtctaatgcctggagacctcaggtgaacaacccgaaagaatggctccaggtggactttcagaagaccatgaaagtaacaggtgtcactactcagggagttaagtccttggatactagcatgtatgtgaaggagttccttatttcctcatcacaagatggccaccagtggaccctcttctttcagaatggtaaggtcaaagtgtttcagggcaatcaagacagcttcacacccgtggtgaacagtcttgatcctccactcttgacacgataccttcgaatccatccacagtcttgggagcaccagattgcattgcgcatggaagtacttggatgcgaggctcaggacctctac

SEQ ID NO: 1982 - protein, 1457 aa, synthetic construct
  REGION 1..1457: note = Variant of human B-domain deleted Factor VIII
MQIELSTCFFLCLLRFCFSATRRYYLGAVELSWDYMQSDLGELPVDARFPPRVPKSFPFNTSQVYKKTLFVEFTDHLFNIAKPRPPWMGLLGPTIQAEVYDTVVITLKNMASHPVSLHAVGVSYWKASEGAEYDDQTSQREKEDDKVFPGGSHTYVWQVLKENGPMASDPPCLTYSYLSHVDLVKDLNSGLIGALLVCREGSLAKEKTQTLAKFILLFAVFDEGKSWHSETKNSLMQDRDAASARAWPKMHTVNGYVNRTLPGLIGCHRKSVYWHVIGMGTTPEVHSIFLEGHTFLVRNHRQASLGISPITFLTAQTLLRDLGQFLLFCHIPSHQHDGMEAYVKVDSCPEEPQLRMKNNEEAEDYDDDLTDSEMDVVRFDDDNSPSIIQARSGAKKHPKTWVHYIAAEEEDWDYAPLVLAPDDRSYKSQYLNNGPQRIGRKYKKVRFMAYTDETFKTREAIQHESGILGPLLYGEVGDTLLIIFKNQASRPYNIYPHGITDVRPLYSRRLPKGVKHLKDFPILPGEIFKYKWTITVEDGPTKSDPRCLTRYYSSFVNWERDLASGLIGPLLICYKESVDQRGNQIMSDKRNVILFSVFDENRSWYLTENIQRFLPNPAEVQLEDPEFQASNIMHSINGYVFDSLQLSVCLHEVAYWYILSIGAQTDFLSVFFSGYTFKHKGVYEDTLTLFPFSGETVFMSMENPGLWILGCHNSDFRNRGMTALLKVSSCDWNTGDYYEDSYEDISAYFDSKNNAIEPRSFSQNPPVLKRHQREGTRTTLQSDQEEIDYDDTISVEMKKEGFDIQDEDENQSPRSFQKKTRHYFIAAVERLWDYGMSSSPHVLRNRAQSGSVPQFKKVVFQEFTDGSFTQPLYRGELNEHLGLLGPYIRAEVEDNIMVTFRNQASRPYSFYSSLISYEEDQRQGAEPRKNFVKPNETKTYFWKVQHHMAPTKDEFDCKAWAYFSDVDLEKDVHSGLIGPLLVCHTNTLNPAHGRQVTVQEFALFFTIFDETKSWYFTENMERNCRAPCNIQMEDPTFKENYRFHAINGYIMDTLPGLVMAQDQRIRWYLLSMGSNENIHSIHFSGHVFTVRKKEEYKMALYNLYPGVFETVEMLPSKAGIWRVECLIGEHLHAGMSTLFLVYSNKCQNPLGMASGHIRDFQITASGQYGQWAPKLARLHYSGSINAWSTKEPFSWIKVDLLAPMIIHGIKTQGARQKFSSLYISQFIIMYSLDGKKWQTYRGNSTGTDMVFFGNVDSSGIKHNIFNPPIIARYIRLHPTHYSIRSTLRMELMGCDLNSCSMPLGMESKAISDAQITASSYFTNMFATWSPSKARLHLQGRSNAWRPQVNNPKEWLQVDFQKTMKVTGVTTQGVKSLDTSMYVKEFLISSSQDGHQWTLFFQNGKVKVFQGNQDSFTPVVNSLDPPLLTRYLRIHPQSWEHQIALRMEVLGCEAQDLY

SEQ ID NO: 1983 - DNA, 4371 bp, synthetic construct
  misc_feature 1..4371: note = Variant of human B-domain deleted Factor VIII
  source 1..4371: mol_type = other DNA
atgcagattgaactgtctacctgcttcttcctctgtttgctgaggttctgctttagcgccactagacggtactaccttggcgctgtggagctgtcctgggactatatgcagagtgatttgggagagcttcccgtcgacgcacgatttcctcctcgcgttccaaagtcatttccctttaacacaagccaggtgtacaagaagacgctcttcgtcgaattcaccgatcacctgttcaatatcgccaaacccagaccaccatggatgggtcttttggggcctaccatacaagcggaggtgtatgacacagttgttatcactctcaagaacatggcttctcatccggtaagtcttcacgcagtgggcgtgtcctactggaaagcttcagaaggagccgagtatgatgatcagacatcccagagggagaaagaagacgacaaggtatttccaggtgggtctcatacctatgtgtggcaagtgctcaaagagaatggccctatggcaagcgatccgccgtgtttgacttacagctacctttcacacgttgacctcgtcaaggacctcaactccgggttgattggagccttgttggtatgcagggaaggatctcttgccaaagagaagacacagaccctggccaagtttatccttctctttgctgtgttcgatgagggcaaaagttggcatagcgaaacgaagaattccctcatgcaggatcgcgacgcagccagcgccagagcttggcccaagatgcacactgtgaacggatatgtcaataggacgcttcctggcttgattgggtgtcatcggaaaagtgtctactggcacgtgatcggaatggggacaacaccagaggtccactccatatttctcgaaggccataccttccttgttcgaaaccacagacaggcatccttggggatctctcccattacctttctcactgcccaaacgctccttcgtgacttgggtcagttccttctcttttgccatatcccgtcacaccagcatgatggtatggaagcttatgtgaaagtcgacagttgtcctgaggagccacagttgcgcatgaagaataatgaagaagccgaggattacgacgacgatctcaccgattctgagatggacgtggtgaggtttgatgacgacaactctccctccatcattcaagctcggagcggggcgaagaaacaccccaagacttgggtccactatatagcggcggaagaggaggattgggattacgctcctcttgtattggcaccagatgaccgctcatacaaaagccagtacctcaacaacggaccgcagagaattggccggaagtataagaaagtgcgatttatggcctatacagacgaaacctttaagacaagggaggccatccagcatgagagtgggattttgggacctcttctttacggcgaagttggtgataccctcctcatcatcttcaagaatcaagcttctcgcccctataacatttacccacacgggatcactgacgttaggcctttgtatagcagaagacttcccaaaggcgtgaagcatctcaaagacttccccattttgccaggcgagatctttaagtacaaatggaccattacagtggaagatggaccgactaaatcagaccctcgatgccttacgcggtactattcctccgaagtgaattgggagagagatttggcaagcggactcataggaccactcctcatctgttacaaggaatctgtagaccagaggggtaaccagattatgagtgataaacgcaatgtgatcctttttagcgtcttcgacgagaaccggtcctggtacttgaccgagaatatacaaaggttccttcccaaccccgcagaggttcagttggaagaccctgagtttcaggccagcaatattatgcactcaatcaacggctatgtgtttgatagtctccagctttctgtttgcctccatgaagtagcctattggtacatcttgtcaattggtgctcaaacagacttcctctccgtcttcttctccggctacacctttaagcacaagggcgtgtatgaggacactctcacactctttccattttctggagaaaccgtgttcatgagcatggagaatccaggcctttggatcttgggttgccacaacagtgattttcgcaatcggggaatgactgctctcctcaaagtcagcagctgtgattggaacacaggcgactattacgaagattcttacgaggacataagtgcctactttgactccaagaataacgccattgagcccagatcattctcccagaatcctcccgtgcttaaaaggcatcagcgcgaaggtaccagaactactcttcagtctgatcaagaggagattgactatgacgacaccattagcgtggaaatgaagaaggaggatttcgatatctatgacgaagatgagaaccagtctccgcggagctttcagaagaagacgcgacactacttcattgcagcagtcgaaaggctttgggactacggtatgtcatcaagtcctcatgtgttgcgcaatagagctcagagtggaagtgttccacagttcaagaaagtcgtctttcaagagtttacagatggcagcttcacacagcctctctatcggggcgagcttaacgaacatttgggactccttggtccctatatccgagccgaagtggaggacaacattatggttacctttaggaatcaagcctctcgcccctacagcttctactcctccctcatcagttatgaggaggatcagagacaaggcgctgaaccacggaagaactttgtgaaaccgaatgagacgaagacctacttctggaaagtacagcaccacatggcccccacaaaagacgaattcgattgcaaagcatgggcgtatttttcagacgttgacttggagaaagatgtacattcaggacttattggtcctttgttggtgtgtcacactaacactctcaatccagcccatggcaggcaggtgacagtccaggaattcgctcttttctttaccatctttgatgagaccaagtcctggtacttcacggaaaacatggagcgcaattgcagagccccctgtaacatacagatggaggaccctacctttaaggaaaattatcggttccacgcaatcaacggatacattatggatacactccctggccttgtgatggctcaggaccaacgaatcaggtggtacctcctcagcatgggttctaatgagaacatacactccattcacttttcaggacatgtgttcactgtccggaagaaagaagagtataagatggccctctacaatttgtatccaggcgtgtttgagaccgttgaaatgcttccctctaaagctggcatctggagagtagagtgcttgatcggagaacatcttcacgcaggtatgagcaccttgttcctcgtgtacagcaacaaatgtcagaatccacttggcatggccagtggacacattcgcgactttcagatcacagcatctggccagtatggacaatgggccccaaagttggctcgcctccattactccggtagcataaatgcgtggtccactaaagaacctttcagctggattaaggtcgatcttcttgcccccatgatcatccacggcattaagacacagggagcgaggcagaaattctcctccctctacatctcacagttcattattatgtatagtttggacggcaagaagtggcaaacttatagaggtaacagtactggaacagacatggtgttcttcggcaacgttgatagctctggcatcaaacacaacatctttaatcctcccataatagctcggtacatcagattgcatccgacccactacagcattaggagtacactccgaatggagcttatgggttgcgacttgaattcctgttcaatgccactcggaatggagtctaaagccatctctgatgcacagataaccgccagtagctactttacgaacatgtttgctacgtggtcaccctctaaggcaaggcttcatttgcaaggccggtctaatgcctggagacctcaggtgaacaacccgaaagaatggctccaggtggactttcagaagaccatgaaagtaacaggtgtcactactcagggagttaagtccttggatactagcatgtatgtgaaggagttccttatttcctcatcacaagatggccaccagtggaccctcttctttcagaatggtaaggtcaaagtgtttcagggcaatcaagacagcttcacacccgtggtgaacagtcttgatcctccactcttgacacgataccttcgaatccatccacagtcttgggagcaccagattgcattgcgcatggaagtacttggatgcgaggctcaggacctctac

SEQ ID NO: 1984 - protein, 1457 aa, synthetic construct
  REGION 1..1457: note = Variant of human B-domain deleted Factor VIII
MQIELSTCFFLCLLRFCFSATRRYYLGAVELSWDYMQSDLGELPVDARFPPRVPKSFPFNTSQVYKKTLFVEFTDHLFNIAKPRPPWMGLLGPTIQAEVYDTVVITLKNMASHPVSLHAVGVSYWKASEGAEYDDQTSQREKEDDKVFPGGSHTYVWQVLKENGPMASDPPCLTYSYLSHVDLVKDLNSGLIGALLVCREGSLAKEKTQTLAKFILLFAVFDEGKSWHSETKNSLMQDRDAASARAWPKMHTVNGYVNRTLPGLIGCHRKSVYWHVIGMGTTPEVHSIFLEGHTFLVRNHRQASLGISPITFLTAQTLLRDLGQFLLFCHIPSHQHDGMEAYVKVDSCPEEPQLRMKNNEEAEDYDDDLTDSEMDVVRFDDDNSPSIIQARSGAKKHPKTWVHYIAAEEEDWDYAPLVLAPDDRSYKSQYLNNGPQRIGRKYKKVRFMAYTDETFKTREAIQHESGILGPLLYGEVGDTLLIIFKNQASRPYNIYPHGITDVRPLYSRRLPKGVKHLKDFPILPGEIFKYKWTITVEDGPTKSDPRCLTRYYSSEVNWERDLASGLIGPLLICYKESVDQRGNQIMSDKRNVILFSVFDENRSWYLTENIQRFLPNPAEVQLEDPEFQASNIMHSINGYVFDSLQLSVCLHEVAYWYILSIGAQTDFLSVFFSGYTFKHKGVYEDTLTLFPFSGETVFMSMENPGLWILGCHNSDFRNRGMTALLKVSSCDWNTGDYYEDSYEDISAYFDSKNNAIEPRSFSQNPPVLKRHQREGTRTTLQSDQEEIDYDDTISVEMKKEDFDIYDEDENQSPRSFQKKTRHYFIAAVERLWDYGMSSSPHVLRNRAQSGSVPQFKKVVFQEFTDGSFTQPLYRGELNEHLGLLGPYIRAEVEDNIMVTFRNQASRPYSFYSSLISYEEDQRQGAEPRKNFVKPNETKTYFWKVQHHMAPTKDEFDCKAWAYFSDVDLEKDVHSGLIGPLLVCHTNTLNPAHGRQVTVQEFALFFTIFDETKSWYFTENMERNCRAPCNIQMEDPTFKENYRFHAINGYIMDTLPGLVMAQDQRIRWYLLSMGSNENIHSIHFSGHVFTVRKKEEYKMALYNLYPGVFETVEMLPSKAGIWRVECLIGEHLHAGMSTLFLVYSNKCQNPLGMASGHIRDFQITASGQYGQWAPKLARLHYSGSINAWSTKEPFSWIKVDLLAPMIIHGIKTQGARQKFSSLYISQFIIMYSLDGKKWQTYRGNSTGTDMVFFGNVDSSGIKHNIFNPPIIARYIRLHPTHYSIRSTLRMELMGCDLNSCSMPLGMESKAISDAQITASSYFTNMFATWSPSKARLHLQGRSNAWRPQVNNPKEWLQVDFQKTMKVTGVTTQGVKSLDTSMYVKEFLISSSQDGHQWTLFFQNGKVKVFQGNQDSFTPVVNSLDPPLLTRYLRIHPQSWEHQIALRMEVLGCEAQDLY

SEQ ID NO: 1985 - DNA, 4371 bp, synthetic construct
  misc_feature 1..4371: note = Variant of human B-domain deleted Factor VIII
  source 1..4371: mol_type = other DNA
atgcagattgaactgtctacctgcttcttcctctgtttgctgaggttctgctttagcgccactagacggtactaccttggcgctgtggagctgtcctgggactatatgcagagtgatttgggagagcttcccgtcgacgcacgatttcctcctcgcgttccaaagtcatttccctttaacacaagccaggtgtacaagaagacgctcttcgtcgaattcaccgatcacctgttcaatatcgccaaacccagaccaccatggatgggtcttttggggcctaccatacaagcggaggtgtatgacacagttgttatcactctcaagaacatggcttctcatccggtaagtcttcacgcagtgggcgtgtcctactggaaagcttcagaaggagccgagtatgatgatcagacatcccagagggagaaagaagacgacaaggtatttccaggtgggtctcatacctatgtgtggcaagtgctcaaagagaatggccctatggcaagcgatccgccgtgtttgacttacagctacctttcacacgttgacctcgtcaaggacctcaactccgggttgattggagccttgttggtatgcagggaaggatctcttgccaaagagaagacacagaccctggccaagtttatccttctctttgctgtgttcgatgagggcaaaagttggcatagcgaaacgaagaattccctcatgcaggatcgcgacgcagccagcgccagagcttggcccaagatgcacactgtgaacggatatgtcaataggacgcttcctggcttgattgggtgtcatcggaaaagtgtctactggcacgtgatcggaatggggacaacaccagaggtccactccatatttctcgaaggccataccttccttgttcgaaaccacagacaggcatccttggggatctctcccattacctttctcactgcccaaacgctccttcgtgacttgggtcagttccttctcttttgccatatcccgtcacaccagcatgatggtatggaagcttatgtgaaagtcgacagttgtcctgaggagccacagttgcgcatgaagaataatgaagaagccgaggattacgacgacgatctcaccgattctgagatggacgtggtgaggtttgatgacgacaactctccctccatcattcaagctcggagcggggcgaagaaacaccccaagacttgggtccactatatagcggcggaagaggaggattgggattacgctcctcttgtattggcaccagatgaccgctcatacaaaagccagtacctcaacaacggaccgcagagaattggccggaagtataagaaagtgcgatttatggcctatacagacgaaacctttaagacaagggaggccatccagcatgagagtgggattttgggacctcttctttacggcgaagttggtgataccctcctcatcatcttcaagaatcaagcttctcgcccctataacatttacccacacgggatcactgacgttaggcctttgtatagcagaagacttcccaaaggcgtgaagcatctcaaagacttccccattttgccaggcgagatctttaagtacaaatggaccattacaccagaagatggaccgactaaatcagaccctcgatgccttacgcggtactattcctccttcgtgaattgggagagagatttggcaagcggactcataggaccactcctcatctgttacaaggaatctgtagaccagaggggtaaccagattatgagtgataaacgcaatgtgatcctttttagcgtcttcgacgagaaccggtcctggtacttgaccgagaatatacaaaggttccttcccaaccccgcagaggttcagttggaagaccctgagtttcaggccagcaatattatgcactcaatcaacggctatgtgtttgatagtctccagctttctgtttgcctccatgaagtagcctattggtacatcttgtcaattggtgctcaaacagacttcctctccgtcttcttctccggctacacctttaagcacaagggcgtgtatgaggacactctcacactctttccattttctggagaaaccgtgttcatgagcatggagaatccaggcctttggatcttgggttgccacaacagtgattttcgcaatcggggaatgactgctctcctcaaagtcagcagctgtgattggaacacaggcgactattacgaagattcttacgaggacataagtgcctactttgactccaagaataacgccattgagcccagatcattctcccagaatcctcccgtgcttaaaaggcatcagcgcgaaggtaccagaactactcttcagtctgatcaagaggagattgactatgacgacaccattagcgtggaaatgaagaaagagggtttcgatatctatgacgaagatgagaaccagtctccgcggagctttcagaagaagacgcgacactacttcattgcagcagtcgaaaggctttgggactacggtatgtcatcatcccctcatgtgttgcgcaatagagctcagagtggaagtgttccacagttcaagaaagtcgtctttcaagagtttacagatggcagcttcacacagcctctctatcggggcgagcttaacgaacatttgggactccttggtccctatatccgagccgaagtggaggacaacattatggttacctttaggaatcaagcctctcgcccctacagcttctactcctccctcatcagttatgaggaggatcagagacaaggcgctgaaccacggaagaactttgtgaaaccgaatgagacgaagacctacttctggaaagtacagcaccacatggcccccacaaaagacgaattcgattgcaaagcatgggcgtatttttcagacgttgacttggagaaagatgtacattcaggacttattggtcctttgttggtgtgtcacactaacactctcaatccagcccatggcaggcaggtgacagtccaggaattcgctcttttctttaccatctttgatgagaccaagtcctggtacttcacggaaaacatggagcgcaattgcagagccccctgtaacatacagatggaggaccctacctttaaggaaaattatcggttccacgcaatcaacggatacattatggatacactccctggccttgtgatggctcaggaccaacgaatcaggtggtacctcctcagcatgggttctaatgagaacatacactccattcacttttcaggacatgtgttcactgtccggaagaaagaagagtataagatggccctctacaatttgtatccaggcgtgtttgagaccgttgaaatgcttccctctaaagctggcatctggagagtagagtgcttgatcggagaacatcttcacgcaggtatgagcaccttgttcctcgtgtacagcaacaaatgtcagaatccacttggcatggccagtggacacattcgcgactttcagatcacagcatctggccagtatggacaatgggccccaaagttggctcgcctccattactccggtagcataaatgcgtggtccactaaagaacctttcagctggattaaggtcgatcttcttgcccccatgatcatccacggcattaagacacagggagcgaggcagaaattctcctccctctacatctcacagttcattattatgtatagtttggacggcaagaagtggcaaacttatagaggtaacagtactggaacagacatggtgttcttcggcaacgttgatagctctggcatcaaacacaacatctttaatcctcccataatagctcggtacatcagattgcatccgacccactacagcattaggagtacactccgaatggagcttatgggttgcgacttgaattcctgttcaatgccactcggaatggagtctaaagccatctctgatgcacagataaccgccagtagctactttacgaacatgtttgctacgtggtcaccctctaaggcaaggcttcatttgcaaggccggtctaatgcctggagacctcaggtgaacaacccgaaagaatggctccaggtggactttcagaagaccatgaaagtaacaggtgtcactactcagggagttaagtccttggatactagcatgtatgtgaaggagttccttatttcctcatcacaagatggccaccagtggaccctcttctttcagaatggtaaggtcaaagtgtttcagggcaatcaagacagcttcacacccgtggtgaacagtcttgatcctccactcttgacacgataccttcgaatccatccacagtcttgggagcaccagattgcattgcgcatggaagtacttggatgcgaggctcaggacctctac

SEQ ID NO: 1986 - protein, 1457 aa, synthetic construct
  REGION 1..1457: note = Variant of human B-domain deleted Factor VIII
MQIELSTCFFLCLLRFCFSATRRYYLGAVELSWDYMQSDLGELPVDARFPPRVPKSFPFNTSQVYKKTLFVEFTDHLFNIAKPRPPWMGLLGPTIQAEVYDTVVITLKNMASHPVSLHAVGVSYWKASEGAEYDDQTSQREKEDDKVFPGGSHTYVWQVLKENGPMASDPPCLTYSYLSHVDLVKDLNSGLIGALLVCREGSLAKEKTQTLAKFILLFAVFDEGKSWHSETKNSLMQDRDAASARAWPKMHTVNGYVNRTLPGLIGCHRKSVYWHVIGMGTTPEVHSIFLEGHTFLVRNHRQASLGISPITFLTAQTLLRDLGQFLLFCHIPSHQHDGMEAYVKVDSCPEEPQLRMKNNEEAEDYDDDLTDSEMDVVRFDDDNSPSIIQARSGAKKHPKTWVHYIAAEEEDWDYAPLVLAPDDRSYKSQYLNNGPQRIGRKYKKVRFMAYTDETFKTREAIQHESGILGPLLYGEVGDTLLIIFKNQASRPYNIYPHGITDVRPLYSRRLPKGVKHLKDFPILPGEIFKYKWTITPEDGPTKSDPRCLTRYYSSFVNWERDLASGLIGPLLICYKESVDQRGNQIMSDKRNVILFSVFDENRSWYLTENIQRFLPNPAEVQLEDPEFQASNIMHSINGYVFDSLQLSVCLHEVAYWYILSIGAQTDFLSVFFSGYTFKHKGVYEDTLTLFPFSGETVFMSMENPGLWILGCHNSDFRNRGMTALLKVSSCDWNTGDYYEDSYEDISAYFDSKNNAIEPRSFSQNPPVLKRHQREGTRTTLQSDQEEIDYDDTISVEMKKEGFDIYDEDENQSPRSFQKKTRHYFIAAVERLWDYGMSSSPHVLRNRAQSGSVPQFKKVVFQEFTDGSFTQPLYRGELNEHLGLLGPYIRAEVEDNIMVTFRNQASRPYSFYSSLISYEEDQRQGAEPRKNFVKPNETKTYFWKVQHHMAPTKDEFDCKAWAYFSDVDLEKDVHSGLIGPLLVCHTNTLNPAHGRQVTVQEFALFFTIFDETKSWYFTENMERNCRAPCNIQMEDPTFKENYRFHAINGYIMDTLPGLVMAQDQRIRWYLLSMGSNENIHSIHFSGHVFTVRKKEEYKMALYNLYPGVFETVEMLPSKAGIWRVECLIGEHLHAGMSTLFLVYSNKCQNPLGMASGHIRDFQITASGQYGQWAPKLARLHYSGSINAWSTKEPFSWIKVDLLAPMIIHGIKTQGARQKFSSLYISQFIIMYSLDGKKWQTYRGNSTGTDMVFFGNVDSSGIKHNIFNPPIIARYIRLHPTHYSIRSTLRMELMGCDLNSCSMPLGMESKAISDAQITASSYFTNMFATWSPSKARLHLQGRSNAWRPQVNNPKEWLQVDFQKTMKVTGVTTQGVKSLDTSMYVKEFLISSSQDGHQWTLFFQNGKVKVFQGNQDSFTPVVNSLDPPLLTRYLRIHPQSWEHQIALRMEVLGCEAQDLY

SEQ ID NO: 1987 - DNA, 4371 bp, synthetic construct
  misc_feature 1..4371: note = Variant of human B-domain deleted Factor VIII
  source 1..4371: mol_type = other DNA
atgcagattgaactgtctacctgcttcttcctctgtttgctgaggttctgctttagcgccactagacggtactaccttggcgctgtggagctgtcctgggactatatgcagagtgatttgggagagcttcccgtcgacgcacgatttcctcctcgcgttccaaagtcatttccctttaacacaagccaggtgtacaagaagacgctcttcgtcgaattcaccgatcacctgttcaatatcgccaaacccagaccaccatggatgggtcttttggggcctaccatacaagcggaggtgtatgacacagttgttatcactctcaagaacatggcttctcatccggtaagtcttcacgcagtgggcgtgtcctactggaaagcttcagaaggagccgagtatgatgatcagacatcccagagggagaaagaagacgacaaggtatttccaggtgggtctcatacctatgtgtggcaagtgctcaaagagaatggccctatggcaagcgatccgccgtgtttgacttacagctacctttcacacgttgacctcgtcaaggacctcaactccgggttgattggagccttgttggtatgcagggaaggatctcttgccaaagagaagacacagaccctggccaagtttatccttctctttgctgtgttcgatgagggcaaaagttggcatagcgaaacgaagaattccctcatgcaggatcgcgacgcagccagcgccagagcttggcccaagatgcacactgtgaacggatatgtcaataggacgcttcctggcttgattgggtgtcatcggaaaagtgtctactggcacgtgatcggaatggggacaacaccagaggtccactccatatttctcgaaggccataccttccttgttcgaaaccacagacaggcatccttggggatctctcccattacctttctcactgcccaaacgctccttcgtgacttgggtcagttccttctcttttgccatatcccgtcacaccagcatgatggtatggaagcttatgtgaaagtcgacagttgtcctgaggagccacagttgcgcatgaagaataatgaagaagccgaggattacgacgacgatctcaccgattctgagatggacgtggtgaggtttgatgacgacaactctccctccatcattcaagctcggagcggggcgaagaaacaccccaagacttgggtccactatatagcggcggaagaggaggattgggattacgctcctcttgtattggcaccagatgaccgctcatacaaaagccagtacctcaacaacggaccgcagagaattggccggaagtataagaaagtgcgatttatggcctatacagacgaaacctttaagacaagggaggccatccagcatgagagtgggattttgggacctcttctttacggcgaagttggtgataccctcctcatcatcttcaagaatcaagcttctcgcccctataacatttacccacacgggatcactgacgttaggcctttgtatagcagaagacttcccaaaggcgtgaagcatctcaaagacttccccattttgccaggcgagatctttaagtacaaatggaccattacagtggaagatggaccgactaaatcagaccctcgatgccttacgcggtactattcctccttcgtgaattgggagagagatttggcaagcggactcataggaccactcctcatctgttacaaggaatctgtagaccagaggggtaaccagattatgagtgataaacgcaatgtgatcctttttagcgtcttcgacgagaaccggtcctggtacttgaccgagaatatacaaaggttccttcccaaccccgcaggggttcagttggaagaccctgagtttcaggccagcaatattatgcactcaatcaacggctatgtgtttgatagtctccagctttctgtttgcctccatgaagtagcctattggtacatcttgtcaattggtgctcaaacagacttcctctccgtcttcttctccggctacacctttaagcacaagggcgtgtatgaggacactctcacactctttccattttctggagaaaccgtgttcatgagcatggagaatccaggcctttggatcttgggttgccacaacagtgattttcgcaatcggggaatgactgctctcctcaaagtcagcagctgtgattggaacacaggcgactattacgaagattcttacgaggacataagtgcctactttgactccaagaataacgccattgagcccagatcattctcccagaatcctcccgtgcttaaaaggcatcagcgcgaaggtaccagaactactcttcagtctgatcaagaggagattgactatgacgacaccattagcgtggaaatgaagaaagagggtttcgatatccaggacgaagatgagaaccagtctccgcggagctttcagaagaagacgcgacactacttcattgcagcagtcgaaaggctttgggactacggtatgtcatcaagtcctcatgtgttgcgcaatagagctcagagtggaagtgttccacagttcaagaaagtcgtctttcaagagtttacagatggcagcttcacacagcctctctatcggggcgagcttaacgaacatttgggactccttggtccctatatccgagccgaagtggaggacaacattatggttacctttaggaatcaagcctctcgcccctacagcttctactcctccctcatcagttatgaggaggatcagagacaaggcgctgaaccacggaagaactttgtgaaaccgaatgagacgaagacctacttctggaaagtacagcaccacatggcccccacaaaagacgaattcgattgcaaagcatgggcgtatttttcagacgttgacttggagaaagatgtacattcaggacttattggtcctttgttggtgtgtcacactaacactctcaatccagcccatggcaggcaggtgacagtccaggaattcgctcttttctttaccatctttgatgagaccaagtcctggtacttcacggaaaacatggagcgcaattgcagagccccctgtaacatacagatggaggaccctacctttaaggaaaattatcggttccacgcaatcaacggatacattatggatacactccctggccttgtgatggctcaggaccaacgaatcaggtggtacctcctcagcatgggttctaatgagaacatacactccattcacttttcaggacatgtgttcactgtccggaagaaagaagagtataagatggccctctacaatttgtatccaggcgtgtttgagaccgttgaaatgcttccctctaaagctggcatctggagagtagagtgcttgatcggagaacatcttcacgcaggtatgagcaccttgttcctcgtgtacagcaacaaatgtcagaatccacttggcatggccagtggacacattcgcgactttcagatcacagcatctggccagtatggacaatgggccccaaagttggctcgcctccattactccggtagcataaatgcgtggtccactaaagaacctttcagctggattaaggtcgatcttcttgcccccatgatcatccacggcattaagacacagggagcgaggcagaaattctcctccctctacatctcacagttcattattatgtatagtttggacggcaagaagtggcaaacttatagaggtaacagtactggaacagacatggtgttcttcggcaacgttgatagctctggcatcaaacacaacatctttaatcctcccataatagctcggtacatcagattgcatccgacccactacagcattaggagtacactccgaatggagcttatgggttgcgacttgaattcctgttcaatgccactcggaatggagtctaaagccatctctgatgcacagataaccgccagtagctactttacgaacatgtttgctacgtggtcaccctctaaggcaaggcttcatttgcaaggccggtctaatgcctggagacctcaggtgaacaacccgaaagaatggctccaggtggactttcagaagaccatgaaagtaacaggtgtcactactcagggagttaagtccttggatactagcatgtatgtgaaggagttccttatttcctcatcacaagatggccaccagtggaccctcttctttcagaatggtaaggtcaaagtgtttcagggcaatcaagacagcttcacacccgtggtgaacagtcttgatcctccactcttgacacgataccttcgaatccatccacagtcttgggagcaccagattgcattgcgcatggaagtacttggatgcgaggctcaggacctctac

SEQ ID NO: 1988 - protein, 1457 aa, synthetic construct
  REGION 1..1457: note = Variant of human B-domain deleted Factor VIII
MQIELSTCFFLCLLRFCFSATRRYYLGAVELSWDYMQSDLGELPVDARFPPRVPKSFPFNTSQVYKKTLFVEFTDHLFNIAKPRPPWMGLLGPTIQAEVYDTVVITLKNMASHPVSLHAVGVSYWKASEGAEYDDQTSQREKEDDKVFPGGSHTYVWQVLKENGPMASDPPCLTYSYLSHVDLVKDLNSGLIGALLVCREGSLAKEKTQTLAKFILLFAVFDEGKSWHSETKNSLMQDRDAASARAWPKMHTVNGYVNRTLPGLIGCHRKSVYWHVIGMGTTPEVHSIFLEGHTFLVRNHRQASLGISPITFLTAQTLLRDLGQFLLFCHIPSHQHDGMEAYVKVDSCPEEPQLRMKNNEEAEDYDDDLTDSEMDVVRFDDDNSPSIIQARSGAKKHPKTWVHYIAAEEEDWDYAPLVLAPDDRSYKSQYLNNGPQRIGRKYKKVRFMAYTDETFKTREAIQHESGILGPLLYGEVGDTLLIIFKNQASRPYNIYPHGITDVRPLYSRRLPKGVKHLKDFPILPGEIFKYKWTITVEDGPTKSDPRCLTRYYSSFVNWERDLASGLIGPLLICYKESVDQRGNQIMSDKRNVILFSVFDENRSWYLTENIQRFLPNPAGVQLEDPEFQASNIMHSINGYVFDSLQLSVCLHEVAYWYILSIGAQTDFLSVFFSGYTFKHKGVYEDTLTLFPFSGETVFMSMENPGLWILGCHNSDFRNRGMTALLKVSSCDWNTGDYYEDSYEDISAYFDSKNNAIEPRSFSQNPPVLKRHQREGTRTTLQSDQEEIDYDDTISVEMKKEGFDIQDEDENQSPRSFQKKTRHYFIAAVERLWDYGMSSSPHVLRNRAQSGSVPQFKKVVFQEFTDGSFTQPLYRGELNEHLGLLGPYIRAEVEDNIMVTFRNQASRPYSFYSSLISYEEDQRQGAEPRKNFVKPNETKTYFWKVQHHMAPTKDEFDCKAWAYFSDVDLEKDVHSGLIGPLLVCHTNTLNPAHGRQVTVQEFALFFTIFDETKSWYFTENMERNCRAPCNIQMEDPTFKENYRFHAINGYIMDTLPGLVMAQDQRIRWYLLSMGSNENIHSIHFSGHVFTVRKKEEYKMALYNLYPGVFETVEMLPSKAGIWRVECLIGEHLHAGMSTLFLVYSNKCQNPLGMASGHIRDFQITASGQYGQWAPKLARLHYSGSINAWSTKEPFSWIKVDLLAPMIIHGIKTQGARQKFSSLYISQFIIMYSLDGKKWQTYRGNSTGTDMVFFGNVDSSGIKHNIFNPPIIARYIRLHPTHYSIRSTLRMELMGCDLNSCSMPLGMESKAISDAQITASSYFTNMFATWSPSKARLHLQGRSNAWRPQVNNPKEWLQVDFQKTMKVTGVTTQGVKSLDTSMYVKEFLISSSQDGHQWTLFFQNGKVKVFQGNQDSFTPVVNSLDPPLLTRYLRIHPQSWEHQIALRMEVLGCEAQDLY

SEQ ID NO: 1989 - DNA, 4371 bp, synthetic construct
  misc_feature 1..4371: note = Variant of human B-domain deleted Factor VIII
  source 1..4371: mol_type = other DNA
atgcagattgaactgtctacctgcttcttcctctgtttgctgaggttctgctttagcgccactagacggtactaccttggcgctgtggagctgtcctgggactatatgcagagtgatttgggagagcttcccgtcgacgcacgatttcctcctcgcgttccaaagtcatttccctttaacacaagccaggtgtacaagaagacgctcttcgtcgaattcaccgatcacctgttcaatatcgccaaacccagaccaccatggatgggtcttttggggcctaccatacaagcggaggtgtatgacacagttgttatcactctcaagaacatggcttctcatccggtaagtcttcacgcagtgggcgtgtcctactggaaagcttcagaaggagccgagtatgatgatcagacatcccagagggagaaagaagacgacaaggtatttccaggtgggtctcatacctatgtgtggcaagtgctcaaagagaatggccctatggcaagcgatccgccgtgtttgacttacagctacctttcacacgttgacctcgtcaaggacctcaactccgggttgattggagccttgttggtatgcagggaaggatctcttgccaaagagaagacacagaccctggccaagtttatccttctctttgctgtgttcgatgagggcaaaagttggcatagcgaaacgaagaattccctcatgcaggatcgcgacgcagccagcgccagagcttggcccaagatgcacactgtgaacggatatgtcaataggacgcttcctggcttgattgggtgtcatcggaaaagtgtctactggcacgtgatcggaatggggacaacaccagaggtccactccatatttctcgaaggccataccttccttgttcgaaaccacagacaggcatccttggggatctctcccattacctttctcactgcccaaacgctccttcgtgacttgggtcagttccttctcttttgccatatcccgtcacaccagcatgatggtatggaagcttatgtgaaagtcgacagttgtcctgaggagccacagttgcgcatgaagaataatgaagaagccgaggattacgacgacgatctcaccgattctgagatggacgtggtgaggtttgatgacgacaactctccctccatcattcaagctcggagcggggcgaagaaacaccccaagacttgggtccactatatagcggcggaagaggaggattgggattacgctcctcttgtattggcaccagatgaccgctcatacaaaagccagtacctcaacaacggaccgcagagaattggccggaagtataagaaagtgcgatttatggcctatacagacgaaacctttaagacaagggaggccatccagcatgagagtgggattttgggacctcttctttacggcgaagttggtgataccctcctcatcatcttcaagaatcaagcttctcgcccctataacatttacccacacgggatcactgacgttaggcctttgtatagcagaagacttcccaaaggcgtgaagcatctcaaagacttccccattttgccaggcgagatctttaagtacaaatggaccattacaccagaagatggaccgactaaatcagaccctcgatgccttacgcggtactattcctccttcgtgaattgggagagagatttggcaagcggactcataggaccactcctcatctgttacaaggaatctgtagaccagaggggtaaccagattatgagtgataaacgcaatgtgatcctttttagcgtcttcgacgagaaccggtcctggtacttgaccgagaatatacaaaggttccttcccaaccccgcagaggttcagttggaagaccctgagtttcaggccagcaatattatgcactcaatcaacggctatgtgtttgatagtctccagctttctgtttgcctccatgaagtagcctattggtacatcttgtcaattggtgctcaaacagacttcctctccgtcttcttctccggctacacctttaagcacaagggcgtgtatgaggacactctcacactctttccattttctggagaaaccgtgttcatgagcatggagaatccaggcctttggatcttgggttgccacaacagtgattttcgcaatcggggaatgactgctctcctcaaagtcagcagctgtgattggaacacaggcgactattacgaagattcttacgaggacataagtgcctactttgactccaagaataacgccattgagcccagatcattctcccagaatcctcccgtgcttaaaaggcatcagcgcgaaggtaccagaactactcttcagtctgatcaagaggagattgactatgacgacaccattagcgtggaaatgaagagcgaggatttcgatatccaggacgaagatgagaaccagtctccgcggagctttcagaagaagacgcgacactacttcattgcagcagtcgaaaggctttgggactacggtatgtcatcatcccctcatgtgttgcgcaatagagctcagagtggaagtgttccacagttcaagaaagtcgtctttcaagagtttacagatggcagcttcacacagcctctctatcggggcgagcttaacgaacatttgggactccttggtccctatatccgagccgaagtggaggacaacattatggttacctttaggaatcaagcctctcgcccctacagcttctactcctccctcatcagttatgaggaggatcagagacaaggcgctgaaccacggaagaactttgtgaaaccgaatgagacgaagacctacttctggaaagtacagcaccacatggcccccacaaaagacgaattcgattgcaaagcatgggcgtatttttcagacgttgacttggagaaagatgtacattcaggacttattggtcctttgttggtgtgtcacactaacactctcaatccagcccatggcaggcaggtgacagtccaggaattcgctcttttctttaccatctttgatgagaccaagtcctggtacttcacggaaaacatggagcgcaattgcagagccccctgtaacatacagatggaggaccctacctttaaggaaaattatcggttccacgcaatcaacggatacattatggatacactccctggccttgtgatggctcaggaccaacgaatcaggtggtacctcctcagcatgggttctaatgagaacatacactccattcacttttcaggacatgtgttcactgtccggaagaaagaagagtataagatggccctctacaatttgtatccaggcgtgtttgagaccgttgaaatgcttccctctaaagctggcatctggagagtagagtgcttgatcggagaacatcttcacgcaggtatgagcaccttgttcctcgtgtacagcaacaaatgtcagaatccacttggcatggccagtggacacattcgcgactttcagatcacagcatctggccagtatggacaatgggccccaaagttggctcgcctccattactccggtagcataaatgcgtggtccactaaagaacctttcagctggattaaggtcgatcttcttgcccccatgatcatccacggcattaagacacagggagcgaggcagaaattctcctccctctacatctcacagttcattattatgtatagtttggacggcaagaagtggcaaacttatagaggtaacagtactggaacagacatggtgttcttcggcaacgttgatagctctggcatcaaacacaacatctttaatcctcccataatagctcggtacatcagattgcatccgacccactacagcattaggagtacactccgaatggagcttatgggttgcgacttgaattcctgttcaatgccactcggaatggagtctaaagccatctctgatgcacagataaccgccagtagctactttacgaacatgtttgctacgtggtcaccctctaaggcaaggcttcatttgcaaggccggtctaatgcctggagacctcaggtgaacaacccgaaagaatggctccaggtggactttcagaagaccatgaaagtaacaggtgtcactactcagggagttaagtccttggatactagcatgtatgtgaaggagttccttatttcctcatcacaagatggccaccagtggaccctcttctttcagaatggtaaggtcaaagtgtttcagggcaatcaagacagcttcacacccgtggtgaacagtcttgatcctccactcttgacacgataccttcgaatccatccacagtcttgggagcaccagattgcattgcgcatggaagtacttggatgcgaggctcaggacctctac

SEQ ID NO: 1990 - protein, 1457 aa, synthetic construct
  REGION 1..1457: note = Variant of human B-domain deleted Factor VIII
MQIELSTCFFLCLLRFCFSATRRYYLGAVELSWDYMQSDLGELPVDARFPPRVPKSFPFNTSQVYKKTLFVEFTDHLFNIAKPRPPWMGLLGPTIQAEVYDTVVITLKNMASHPVSLHAVGVSYWKASEGAEYDDQTSQREKEDDKVFPGGSHTYVWQVLKENGPMASDPPCLTYSYLSHVDLVKDLNSGLIGALLVCREGSLAKEKTQTLAKFILLFAVFDEGKSWHSETKNSLMQDRDAASARAWPKMHTVNGYVNRTLPGLIGCHRKSVYWHVIGMGTTPEVHSIFLEGHTFLVRNHRQASLGISPITFLTAQTLLRDLGQFLLFCHIPSHQHDGMEAYVKVDSCPEEPQLRMKNNEEAEDYDDDLTDSEMDVVRFDDDNSPSIIQARSGAKKHPKTWVHYIAAEEEDWDYAPLVLAPDDRSYKSQYLNNGPQRIGRKYKKVRFMAYTDETFKTREAIQHESGILGPLLYGEVGDTLLIIFKNQASRPYNIYPHGITDVRPLYSRRLPKGVKHLKDFPILPGEIFKYKWTITPEDGPTKSDPRCLTRYYSSFVNWERDLASGLIGPLLICYKESVDQRGNQIMSDKRNVILFSVFDENRSWYLTENIQRFLPNPAEVQLEDPEFQASNIMHSINGYVFDSLQLSVCLHEVAYWYILSIGAQTDFLSVFFSGYTFKHKGVYEDTLTLFPFSGETVFMSMENPGLWILGCHNSDFRNRGMTALLKVSSCDWNTGDYYEDSYEDISAYFDSKNNAIEPRSFSQNPPVLKRHQREGTRTTLQSDQEEIDYDDTISVEMKSEDFDIQDEDENQSPRSFQKKTRHYFIAAVERLWDYGMSSSPHVLRNRAQSGSVPQFKKVVFQEFTDGSFTQPLYRGELNEHLGLLGPYIRAEVEDNIMVTFRNQASRPYSFYSSLISYEEDQRQGAEPRKNFVKPNETKTYFWKVQHHMAPTKDEFDCKAWAYFSDVDLEKDVHSGLIGPLLVCHTNTLNPAHGRQVTVQEFALFFTIFDETKSWYFTENMERNCRAPCNIQMEDPTFKENYRFHAINGYIMDTLPGLVMAQDQRIRWYLLSMGSNENIHSIHFSGHVFTVRKKEEYKMALYNLYPGVFETVEMLPSKAGIWRVECLIGEHLHAGMSTLFLVYSNKCQNPLGMASGHIRDFQITASGQYGQWAPKLARLHYSGSINAWSTKEPFSWIKVDLLAPMIIHGIKTQGARQKFSSLYISQFIIMYSLDGKKWQTYRGNSTGTDMVFFGNVDSSGIKHNIFNPPIIARYIRLHPTHYSIRSTLRMELMGCDLNSCSMPLGMESKAISDAQITASSYFTNMFATWSPSKARLHLQGRSNAWRPQVNNPKEWLQVDFQKTMKVTGVTTQGVKSLDTSMYVKEFLISSSQDGHQWTLFFQNGKVKVFQGNQDSFTPVVNSLDPPLLTRYLRIHPQSWEHQIALRMEVLGCEAQDLY

SEQ ID NO: 1991 - DNA, 4371 bp, synthetic construct
  misc_feature 1..4371: note = Variant of human B-domain deleted Factor VIII
  source 1..4371: mol_type = other DNA
atgcagattgaactgtctacctgcttcttcctctgtttgctgaggttctgctttagcgccactagacggtactaccttggcgctgtggagctgtcctgggactatatgcagagtgatttgggagagcttcccgtcgacgcacgatttcctcctcgcgttccaaagtcatttccctttaacacaagccaggtgtacaagaagacgctcttcgtcgaattcaccgatcacctgttcaatatcgccaaacccagaccaccatggatgggtcttttggggcctaccatacaagcggaggtgtatgacacagttgttatcactctcaagaacatggcttctcatccggtaagtcttcacgcagtgggcgtgtcctactggaaagcttcagaaggagccgagtatgatgatcagacatcccagagggagaaagaagacgacaaggtatttccaggtgggtctcatacctatgtgtggcaagtgctcaaagagaatggccctatggcaagcgatccgccgtgtttgacttacagctacctttcacacgttgacctcgtcaaggacctcaactccgggttgattggagccttgttggtatgcagggaaggatctcttgccaaagagaagacacagaccctggccaagtttatccttctctttgctgtgttcgatgagggcaaaagttggcatagcgaaacgaagaattccctcatgcaggatcgcgacgcagccagcgccagagcttggcccaagatgcacactgtgaacggatatgtcaataggacgcttcctggcttgattgggtgtcatcggaaaagtgtctactggcacgtgatcggaatggggacaacaccagaggtccactccatatttctcgaaggccataccttccttgttcgaaaccacagacaggcatccttggggatctctcccattacctttctcactgcccaaacgctccttcgtgacttgggtcagttccttctcttttgccatatcccgtcacaccagcatgatggtatggaagcttatgtgaaagtcgacagttgtcctgaggagccacagttgcgcatgaagaataatgaagaagccgaggattacgacgacgatctcaccgattctgagatggacgtggtgaggtttgatgacgacaactctccctccatcattcaagctcggagcggggcgaagaaacaccccaagacttgggtccactatatagcggcggaagaggaggattgggattacgctcctcttgtattggcaccagatgaccgctcatacaaaagccagtacctcaacaacggaccgcagagaattggccggaagtataagaaagtgcgatttatggcctatacagacgaaacctttaagacaagggaggccatccagcatgagagtgggattttgggacctcttctttacggcgaagttggtgataccctcctcatcatcttcaagaatcaagcttctcgcccctataacatttacccacacgggatcactgacgttaggcctttgtatagcagaagacttcccaaaggcgtgaagcatctcaaagacttccccattttgccaggcgagatctttaagtacaaatggaccattacagtggaagatggaccgactaaatcagaccctcgatgccttacgcggtactattcctccgaagtgaattgggagagagatttggcaagcggactcataggaccactcctcatctgttacaaggaatctgtagaccagaggggtaaccagattatgagtgataaacgcaatgtgatcctttttagcgtcttcgacgagaaccggtcctggtacttgaccgagaatatacaaaggttccttcccaaccccgcagaggttcagttggaagaccctgagtttcaggccagcaatattatgcactcaatcaacggctatgtgtttgatagtctccagctttctgtttgcctccatgaagtagcctattggtacatcttgtcaattggtgctcaaacagacttcctctccgtcttcttctccggctacacctttaagcacaagggcgtgtatgaggacactctcacactctttccattttctggagaaaccgtgttcatgagcatggagaatccaggcctttggatcttgggttgccacaacagtgattttcgcaatcggggaatgactgctctcctcaaagtcagcagctgtgataagaacacaggcgactattacgaagattcttacgaggacataagtgcctactttgactccaagaataacgccattgagcccagatcattctcccagaatcctcccgtgcttaaaaggcatcagcgcgaaggtaccagaactactcttcagtctgatcaagaggagattgactatgacgacaccattagcgtggaaatgaagagcgagggtttcgatatccaggacgaagatgagaaccagtctccgcggagctttcagaagaagacgcgacactacttcattgcagcagtcgaaaggctttgggactacggtatgtcatcaagtcctcatgtgttgcgcaatagagctcagagtggaagtgttccacagttcaagaaagtcgtctttcaagagtttacagatggcagcttcacacagcctctctatcggggcgagcttaacgaacatttgggactccttggtccctatatccgagccgaagtggaggacaacattatggttacctttaggaatcaagcctctcgcccctacagcttctactcctccctcatcagttatgaggaggatcagagacaaggcgctgaaccacggaagaactttgtgaaaccgaatgagacgaagacctacttctggaaagtacagcaccacatggcccccacaaaagacgaattcgattgcaaagcatgggcgtatttttcagacgttgacttggagaaagatgtacattcaggacttattggtcctttgttggtgtgtcacactaacactctcaatccagcccatggcaggcaggtgacagtccaggaattcgctcttttctttaccatctttgatgagaccaagtcctggtacttcacggaaaacatggagcgcaattgcagagccccctgtaacatacagatggaggaccctacctttaaggaaaattatcggttccacgcaatcaacggatacattatggatacactccctggccttgtgatggctcaggaccaacgaatcaggtggtacctcctcagcatgggttctaatgagaacatacactccattcacttttcaggacatgtgttcactgtccggaagaaagaagagtataagatggccctctacaatttgtatccaggcgtgtttgagaccgttgaaatgcttccctctaaagctggcatctggagagtagagtgcttgatcggagaacatcttcacgcaggtatgagcaccttgttcctcgtgtacagcaacaaatgtcagaatccacttggcatggccagtggacacattcgcgactttcagatcacagcatctggccagtatggacaatgggccccaaagttggctcgcctccattactccggtagcataaatgcgtggtccactaaagaacctttcagctggattaaggtcgatcttcttgcccccatgatcatccacggcattaagacacagggagcgaggcagaaattctcctccctctacatctcacagttcattattatgtatagtttggacggcaagaagtggcaaacttatagaggtaacagtactggaacagacatggtgttcttcggcaacgttgatagctctggcatcaaacacaacatctttaatcctcccataatagctcggtacatcagattgcatccgacccactacagcattaggagtacactccgaatggagcttatgggttgcgacttgaattcctgttcaatgccactcggaatggagtctaaagccatctctgatgcacagataaccgccagtagctactttacgaacatgtttgctacgtggtcaccctctaaggcaaggcttcatttgcaaggccggtctaatgcctggagacctcaggtgaacaacccgaaagaatggctccaggtggactttcagaagaccatgaaagtaacaggtgtcactactcagggagttaagtccttggatactagcatgtatgtgaaggagttccttatttcctcatcacaagatggccaccagtggaccctcttctttcagaatggtaaggtcaaagtgtttcagggcaatcaagacagcttcacacccgtggtgaacagtcttgatcctccactcttgacacgataccttcgaatccatccacagtcttgggagcaccagattgcattgcgcatggaagtacttggatgcgaggctcaggacctctac

SEQ ID NO: 1992 - protein, 1457 aa, synthetic construct
  REGION 1..1457: note = Variant of human B-domain deleted Factor VIII
MQIELSTCFFLCLLRFCFSATRRYYLGAVELSWDYMQSDLGELPVDARFPPRVPKSFPFNTSQVYKKTLFVEFTDHLFNIAKPRPPWMGLLGPTIQAEVYDTVVITLKNMASHPVSLHAVGVSYWKASEGAEYDDQTSQREKEDDKVFPGGSHTYVWQVLKENGPMASDPPCLTYSYLSHVDLVKDLNSGLIGALLVCREGSLAKEKTQTLAKFILLFAVFDEGKSWHSETKNSLMQDRDAASARAWPKMHTVNGYVNRTLPGLIGCHRKSVYWHVIGMGTTPEVHSIFLEGHTFLVRNHRQASLGISPITFLTAQTLLRDLGQFLLFCHIPSHQHDGMEAYVKVDSCPEEPQLRMKNNEEAEDYDDDLTDSEMDVVRFDDDNSPSIIQARSGAKKHPKTWVHYIAAEEEDWDYAPLVLAPDDRSYKSQYLNNGPQRIGRKYKKVRFMAYTDETFKTREAIQHESGILGPLLYGEVGDTLLIIFKNQASRPYNIYPHGITDVRPLYSRRLPKGVKHLKDFPILPGEIFKYKWTITVEDGPTKSDPRCLTRYYSSEVNWERDLASGLIGPLLICYKESVDQRGNQIMSDKRNVILFSVFDENRSWYLTENIQRFLPNPAEVQLEDPEFQASNIMHSINGYVFDSLQLSVCLHEVAYWYILSIGAQTDFLSVFFSGYTFKHKGVYEDTLTLFPFSGETVFMSMENPGLWILGCHNSDFRNRGMTALLKVSSCDKNTGDYYEDSYEDISAYFDSKNNAIEPRSFSQNPPVLKRHQREGTRTTLQSDQEEIDYDDTISVEMKSEGFDIQDEDENQSPRSFQKKTRHYFIAAVERLWDYGMSSSPHVLRNRAQSGSVPQFKKVVFQEFTDGSFTQPLYRGELNEHLGLLGPYIRAEVEDNIMVTFRNQASRPYSFYSSLISYEEDQRQGAEPRKNFVKPNETKTYFWKVQHHMAPTKDEFDCKAWAYFSDVDLEKDVHSGLIGPLLVCHTNTLNPAHGRQVTVQEFALFFTIFDETKSWYFTENMERNCRAPCNIQMEDPTFKENYRFHAINGYIMDTLPGLVMAQDQRIRWYLLSMGSNENIHSIHFSGHVFTVRKKEEYKMALYNLYPGVFETVEMLPSKAGIWRVECLIGEHLHAGMSTLFLVYSNKCQNPLGMASGHIRDFQITASGQYGQWAPKLARLHYSGSINAWSTKEPFSWIKVDLLAPMIIHGIKTQGARQKFSSLYISQFIIMYSLDGKKWQTYRGNSTGTDMVFFGNVDSSGIKHNIFNPPIIARYIRLHPTHYSIRSTLRMELMGCDLNSCSMPLGMESKAISDAQITASSYFTNMFATWSPSKARLHLQGRSNAWRPQVNNPKEWLQVDFQKTMKVTGVTTQGVKSLDTSMYVKEFLISSSQDGHQWTLFFQNGKVKVFQGNQDSFTPVVNSLDPPLLTRYLRIHPQSWEHQIALRMEVLGCEAQDLY

SEQ ID NO: 1993 - DNA, 4371 bp, synthetic construct
  misc_feature 1..4371: note = Variant of human B-domain deleted Factor VIII
  source 1..4371: mol_type = other DNA
atgcagattgaactgtctacctgcttcttcctctgtttgctgaggttctgctttagcgccactagacggtactaccttggcgctgtggagctgtcctgggactatatgcagagtgatttgggagagcttcccgtcgacgcacgatttcctcctcgcgttccaaagtcatttccctttaacacaagccaggtgtacaagaagacgctcttcgtcgaattcaccgatcacctgttcaatatcgccaaacccagaccaccatggatgggtcttttggggcctaccatacaagcggaggtgtatgacacagttgttatcactctcaagaacatggcttctcatccggtaagtcttcacgcagtgggcgtgtcctactggaaagcttcagaaggagccgagtatgatgatcagacatcccagagggagaaagaagacgacaaggtatttccaggtgggtctcatacctatgtgtggcaagtgctcaaagagaatggccctatggcaagcgatccgccgtgtttgacttacagctacctttcacacgttgacctcgtcaaggacctcaactccgggttgattggagccttgttggtatgcagggaaggatctcttgccaaagagaagacacagaccctggccaagtttatccttctctttgctgtgttcgatgagggcaaaagttggcatagcgaaacgaagaattccctcatgcaggatcgcgacgcagccagcgccagagcttggcccaagatgcacactgtgaacggatatgtcaataggacgcttcctggcttgattgggtgtcatcggaaaagtgtctactggcacgtgatcggaatggggacaacaccagaggtccactccatatttctcgaaggccataccttccttgttcgaaaccacagacaggcatccttggggatctctcccattacctttctcactgcccaaacgctccttcgtgacttgggtcagttccttctcttttgccatatcccgtcacaccagcatgatggtatggaagcttatgtgaaagtcgacagttgtcctgaggagccacagttgcgcatgaagaataatgaagaagccgaggattacgacgacgatctcaccgattctgagatggacgtggtgaggtttgatgacgacaactctccctccatcattcaagctcggagcggggcgaagaaacaccccaagacttgggtccactatatagcggcggaagaggaggattgggattacgctcctcttgtattggcaccagatgaccgctcatacaaaagccagtacctcaacaacggaccgcagagaattggccggaagtataagaaagtgcgatttatggcctatacagacgaaacctttaagacaagggaggccatccagcatgagagtgggattttgggacctcttctttacggcgaagttggtgataccctcctcatcatcttcaagaatcaagcttctcgcccctataacatttacccacacgggatcactgacgttaggcctttgtatagcagaagacttcccaaaggcgtgaagcatctcaaagacttccccattttgccaggcgagatctttaagtacaaatggaccattacagtggaagatggaccgactaaatcagaccctcgatgccttacgcggtactattcctccttcgtgaattgggagagagatttggcaagcggactcataggaccactcctcatctgttacaaggaatctgtagaccagaggggtaaccagattatgagtgataaacgcaatgtgatcctttttagcgtcttcgacgagaaccggtcctggtacttgaccgagaatatacaaaggttccttcccaaccccgcaggcgttcagttggaagaccctgagtttcaggccagcaatattatgcactcaatcaacggctatgtgtttgatagtctccagctttctgtttgcctccatgaagtagcctattggtacatcttgtcaattggtgctcaaacagacttcctctccgtcttcttctccggctacacctttaagcacaagggcgtgtatgaggacactctcacactctttccattttctggagaaaccgtgttcatgagcatggagaatccaggcctttggatcttgggttgccacaacagtgattttcgcaatcggggaatgactgctctcctcaaagtcagcagctgtgattggaacacaggcgactattacgaagattcttacgaggacataagtgcctactttgactccaagaataacgccattgagcccagatcattctcccagaatcctcccgtgcttaaaaggcatcagcgcgaaggtaccagaactactcttcagtctgatcaagaggagattgactatgacgacaccattagcgtggaaatgaagaaggaggatttcgatatctatgacgaagatgagaaccagtctccgcggagctttcagaagaagacgcgacactacttcattgcagcagtcgaaaggctttgggactacggtatgtcatcatcccctcatgtgttgcgcaatagagctcagagtggaagtgttccacagttcaagaaagtcgtctttcaagagtttacagatggcagcttcacacagcctctctatcggggcgagcttaacgaacatttgggactccttggtccctatatccgagccgaagtggaggacaacattatggttacctttaggaatcaagcctctcgcccctacagcttctactcctccctcatcagttatgaggaggatcagagacaaggcgctgaaccacggaagaactttgtgaaaccgaatgagacgaagacctacttctggaaagtacagcaccacatggcccccacaaaagacgaattcgattgcaaagcatgggcgtatttttcagacgttgacttggagaaagatgtacattcaggacttattggtcctttgttggtgtgtcacactaacactctcaatccagcccatggcaggcaggtgacagtccaggaattcgctcttttctttaccatctttgatgagaccaagtcctggtacttcacggaaaacatggagcgcaattgcagagccccctgtaacatacagatggaggaccctacctttaaggaaaattatcggttccacgcaatcaacggatacattatggatacactccctggccttgtgatggctcaggaccaacgaatcaggtggtacctcctcagcatgggttctaatgagaacatacactccattcacttttcaggacatgtgttcactgtccggaagaaagaagagtataagatggccctctacaatttgtatccaggcgtgtttgagaccgttgaaatgcttccctctaaagctggcatctggagagtagagtgcttgatcggagaacatcttcacgcaggtatgagcaccttgttcctcgtgtacagcaacaaatgtcagaatccacttggcatggccagtggacacattcgcgactttcagatcacagcatctggccagtatggacaatgggccccaaagttggctcgcctccattactccggtagcataaatgcgtggtccactaaagaacctttcagctggattaaggtcgatcttcttgcccccatgatcatccacggcattaagacacagggagcgaggcagaaattctcctccctctacatctcacagttcattattatgtatagtttggacggcaagaagtggcaaacttatagaggtaacagtactggaacagacatggtgttcttcggcaacgttgatagctctggcatcaaacacaacatctttaatcctcccataatagctcggtacatcagattgcatccgacccaccatagcattaggagtacactccgaatggagcttatgggttgcgacttgaattcctgttcaatgccactcggaatggagtctaaagccatctctgatgcacagataaccgccagtagctactttacgaacatgtttgctacgtggtcaccctctaaggcaaggcttcatttgcaaggccggtctaatgcctggagacctcaggtgaacaacccgaaagaatggctccaggtggactttcagaagaccatgaaagtaacaggtgtcactactcagggagttaagtccttggatactagcatgtatgtgaaggagttccttatttcctcatcacaagatggccaccagtggaccctcttctttcagaatggtaaggtcaaagtgtttcagggcaatcaagacagcttcacacccgtggtgaacagtcttgatcctccactcttgacacgataccttcgaatccatccacagtcttgggagcaccagattgcattgcgcatggaagtacttggatgcgaggctcaggacctctac

SEQ ID NO: 1994 - protein, 1457 aa, synthetic construct
  REGION 1..1457: note = Variant of human B-domain deleted Factor VIII
MQIELSTCFFLCLLRFCFSATRRYYLGAVELSWDYMQSDLGELPVDARFPPRVPKSFPFNTSQVYKKTLFVEFTDHLFNIAKPRPPWMGLLGPTIQAEVYDTVVITLKNMASHPVSLHAVGVSYWKASEGAEYDDQTSQREKEDDKVFPGGSHTYVWQVLKENGPMASDPPCLTYSYLSHVDLVKDLNSGLIGALLVCREGSLAKEKTQTLAKFILLFAVFDEGKSWHSETKNSLMQDRDAASARAWPKMHTVNGYVNRTLPGLIGCHRKSVYWHVIGMGTTPEVHSIFLEGHTFLVRNHRQASLGISPITFLTAQTLLRDLGQFLLFCHIPSHQHDGMEAYVKVDSCPEEPQLRMKNNEEAEDYDDDLTDSEMDVVRFDDDNSPSIIQARSGAKKHPKTWVHYIAAEEEDWDYAPLVLAPDDRSYKSQYLNNGPQRIGRKYKKVRFMAYTDETFKTREAIQHESGILGPLLYGEVGDTLLIIFKNQASRPYNIYPHGITDVRPLYSRRLPKGVKHLKDFPILPGEIFKYKWTITVEDGPTKSDPRCLTRYYSSFVNWERDLASGLIGPLLICYKESVDQRGNQIMSDKRNVILFSVFDENRSWYLTENIQRFLPNPAGVQLEDPEFQASNIMHSINGYVFDSLQLSVCLHEVAYWYILSIGAQTDFLSVFFSGYTFKHKGVYEDTLTLFPFSGETVFMSMENPGLWILGCHNSDFRNRGMTALLKVSSCDWNTGDYYEDSYEDISAYFDSKNNAIEPRSFSQNPPVLKRHQREGTRTTLQSDQEEIDYDDTISVEMKKEDFDIYDEDENQSPRSFQKKTRHYFIAAVERLWDYGMSSSPHVLRNRAQSGSVPQFKKVVFQEFTDGSFTQPLYRGELNEHLGLLGPYIRAEVEDNIMVTFRNQASRPYSFYSSLISYEEDQRQGAEPRKNFVKPNETKTYFWKVQHHMAPTKDEFDCKAWAYFSDVDLEKDVHSGLIGPLLVCHTNTLNPAHGRQVTVQEFALFFTIFDETKSWYFTENMERNCRAPCNIQMEDPTFKENYRFHAINGYIMDTLPGLVMAQDQRIRWYLLSMGSNENIHSIHFSGHVFTVRKKEEYKMALYNLYPGVFETVEMLPSKAGIWRVECLIGEHLHAGMSTLFLVYSNKCQNPLGMASGHIRDFQITASGQYGQWAPKLARLHYSGSINAWSTKEPFSWIKVDLLAPMIIHGIKTQGARQKFSSLYISQFIIMYSLDGKKWQTYRGNSTGTDMVFFGNVDSSGIKHNIFNPPIIARYIRLHPTHHSIRSTLRMELMGCDLNSCSMPLGMESKAISDAQITASSYFTNMFATWSPSKARLHLQGRSNAWRPQVNNPKEWLQVDFQKTMKVTGVTTQGVKSLDTSMYVKEFLISSSQDGHQWTLFFQNGKVKVFQGNQDSFTPVVNSLDPPLLTRYLRIHPQSWEHQIALRMEVLGCEAQDLY

SEQ ID NO: 1995 - DNA, 4371 bp, synthetic construct
  misc_feature 1..4371: note = Variant of human B-domain deleted Factor VIII
  source 1..4371: mol_type = other DNA
atgcagattgaactgtctacctgcttcttcctctgtttgctgaggttctgctttagcgccactagacggtactaccttggcgctgtggagctgtcctgggactatatgcagagtgatttgggagagcttcccgtcgacgcacgatttcctcctcgcgttccaaagtcatttccctttaacacaagccaggtgtacaagaagacgctcttcgtcgaattcaccgatcacctgttcaatatcgccaaacccagaccaccatggatgggtcttttggggcctaccatacaagcggaggtgtatgacacagttgttatcactctcaagaacatggcttctcatccggtaagtcttcacgcagtgggcgtgtcctactggaaagcttcagaaggagccgagtatgatgatcagacatcccagagggagaaagaagacgacaaggtatttccaggtgggtctcatacctatgtgtggcaagtgctcaaagagaatggccctatggcaagcgatccgccgtgtttgacttacagctacctttcacacgttgacctcgtcaaggacctcaactccgggttgattggagccttgttggtatgcagggaaggatctcttgccaaagagaagacacagaccctggccaagtttatccttctctttgctgtgttcgatgagggcaaaagttggcatagcgaaacgaagaattccctcatgcaggatcgcgacgcagccagcgccagagcttggcccaagatgcacactgtgaacggatatgtcaataggacgcttcctggcttgattgggtgtcatcggaaaagtgtctactggcacgtgatcggaatggggacaacaccagaggtccactccatatttctcgaaggccataccttccttgttcgaaaccacagacaggcatccttggggatctctcccattacctttctcactgcccaaacgctccttcgtgacttgggtcagttccttctcttttgccatatcccgtcacaccagcatgatggtatggaagcttatgtgaaagtcgacagttgtcctgaggagccacagttgcgcatgaagaataatgaagaagccgaggattacgacgacgatctcaccgattctgagatggacgtggtgaggtttgatgacgacaactctccctccatcattcaagctcggagcggggcgaagaaacaccccaagacttgggtccactatatagcggcggaagaggaggattgggattacgctcctcttgtattggcaccagatgaccgctcatacaaaagccagtacctcaacaacggaccgcagagaattggccggaagtataagaaagtgcgatttatggcctatacagacgaaacctttaagacaagggaggccatccagcatgagagtgggattttgggacctcttctttacggcgaagttggtgataccctcctcatcatcttcaagaatcaagcttctcgcccctataacatttacccacacgggatcactgacgttaggcctttgtatagcagaagacttcccaaaggcgtgaagcatctcaaagacttccccattttgccaggcgagatctttaagtacaaatggaccattacagtggaagatggaccgactaaatcagaccctcgatgccttacgcggtactattcctccttcgtgaattgggagagagatttggcaagcggactcataggaccactcctcatctgttacaaggaatctgtagaccagaggggtaaccagattatgagtgataaacgcaatgtgatcctttttagcgtcttcgacgagaaccggtcctggtacttgaccgagaatatacaaaggttccttcccaaccccgcaggcgttcagttggaagaccctgagtttcaggccagcaatattatgcactcaatcaacggctatgtgtttgatagtctccagctttctgtttgcctccatgaagtagcctattggtacatcttgtcaattggtgctcaaacagacttcctctccgtcttcttctccggctacacctttaagcacaagggcgtgtatgaggacactctcacactctttccattttctggagaaaccgtgttcatgagcatggagaatccaggcctttggatcttgggttgccacaacagtgattttcgcaatcggggaatgactgctctcctcaaagtcagcagctgtgattggaacacaggcgactattacgaagattcttacgaggacataagtgcctacctggactccaagaataacgccattgagcccagatcattctcccagaatcctcccgtgcttaaaaggcatcagcgcgaaggtaccagaactactcttcagtctgatcaagaggagattgactatgacgacaccattagcgtggaaatgaagaaggaggatttcgatatctatgacgaagatgagaaccagtctccgcggagctttcagaagaagacgcgacactacttcattgcagcagtcgaaaggctttgggactacggtatgtcatcatcccctcatgtgttgcgcaatagagctcagagtggaagtgttccacagttcaagaaagtcgtctttcaagagtttacagatggcagcttcacacagcctctctatcggggcgagcttaacgaacatttgggactccttggtccctatatccgagccgaagtggaggacaacattatggttacctttaggaatcaagcctctcgcccctacagcttctactcctccctcatcagttatgaggaggatcagagacaaggcgctgaaccacggaagaactttgtgaaaccgaatgagacgaagacctacttctggaaagtacagcaccacatggcccccacaaaagacgaattcgattgcaaagcatgggcgtatttttcagacgttgacttggagaaagatgtacattcaggacttattggtcctttgttggtgtgtcacactaacactctcaatccagcccatggcaggcaggtgacagtccaggaattcgctcttttctttaccatctttgatgagaccaagtcctggtacttcacggaaaacatggagcgcaattgcagagccccctgtaacatacagatggaggaccctacctttaaggaaaattatcggttccacgcaatcaacggatacattatggatacactccctggccttgtgatggctcaggaccaacgaatcaggtggtacctcctcagcatgggttctaatgagaacatacactccattcacttttcaggacatgtgttcactgtccggaagaaagaagagtataagatggccctctacaatttgtatccaggcgtgtttgagaccgttgaaatgcttccctctaaagctggcatctggagagtagagtgcttgatcggagaacatcttcacgcaggtatgagcaccttgttcctcgtgtacagcaacaaatgtcagaatccacttggcatggccagtggacacattcgcgactttcagatcacagcatctggccagtatggacaatgggccccaaagttggctcgcctccattactccggtagcataaatgcgtggtccactaaagaacctttcagctggattaaggtcgatcttcttgcccccatgatcatccacggcattaagacacagggagcgaggcagaaattctcctccctctacatctcacagttcattattatgtatagtttggacggcaagaagtggcaaacttatagaggtaacagtactggaacagacatggtgttcttcggcaacgttgatagctctggcatcaaacacaacatctttaatcctcccataatagctcggtacatcagattgcatccgacccactacagcattaggagtacactccgaatggagcttatgggttgcgacttgaattcctgttcaatgccactcggaatggagtctaaagccatctctgatgcacagataaccgccagtagctactttacgaacatgtttgctacgtggtcaccctctaaggcaaggcttcatttgcaaggccggtctaatgcctggagacctcaggtgaacaacccgaaagaatggctccaggtggactttcagaagaccatgaaagtaacaggtgtcactactcagggagttaagtccttggatactagcatgtatgtgaaggagttccttatttcctcatcacaagatggccaccagtggaccctcttctttcagaatggtaaggtcaaagtgtttcagggcaatcaagacagcttcacacccgtggtgaacagtcttgatcctccactcttgacacgataccttcgaatccatccacagtcttgggagcaccagattgcattgcgcatggaagtacttggatgcgaggctcaggacctctac

SEQ ID NO: 1996 - protein, 1457 aa, synthetic construct
  REGION 1..1457: note = Variant of human B-domain deleted Factor VIII
MQIELSTCFFLCLLRFCFSATRRYYLGAVELSWDYMQSDLGELPVDARFPPRVPKSFPFNTSQVYKKTLFVEFTDHLFNIAKPRPPWMGLLGPTIQAEVYDTVVITLKNMASHPVSLHAVGVSYWKASEGAEYDDQTSQREKEDDKVFPGGSHTYVWQVLKENGPMASDPPCLTYSYLSHVDLVKDLNSGLIGALLVCREGSLAKEKTQTLAKFILLFAVFDEGKSWHSETKNSLMQDRDAASARAWPKMHTVNGYVNRTLPGLIGCHRKSVYWHVIGMGTTPEVHSIFLEGHTFLVRNHRQASLGISPITFLTAQTLLRDLGQFLLFCHIPSHQHDGMEAYVKVDSCPEEPQLRMKNNEEAEDYDDDLTDSEMDVVRFDDDNSPSIIQARSGAKKHPKTWVHYIAAEEEDWDYAPLVLAPDDRSYKSQYLNNGPQRIGRKYKKVRFMAYTDETFKTREAIQHESGILGPLLYGEVGDTLLIIFKNQASRPYNIYPHGITDVRPLYSRRLPKGVKHLKDFPILPGEIFKYKWTITVEDGPTKSDPRCLTRYYSSFVNWERDLASGLIGPLLICYKESVDQRGNQIMSDKRNVILFSVFDENRSWYLTENIQRFLPNPAGVQLEDPEFQASNIMHSINGYVFDSLQLSVCLHEVAYWYILSIGAQTDFLSVFFSGYTFKHKGVYEDTLTLFPFSGETVFMSMENPGLWILGCHNSDFRNRGMTALLKVSSCDWNTGDYYEDSYEDISAYLDSKNNAIEPRSFSQNPPVLKRHQREGTRTTLQSDQEEIDYDDTISVEMKKEDFDIYDEDENQSPRSFQKKTRHYFIAAVERLWDYGMSSSPHVLRNRAQSGSVPQFKKVVFQEFTDGSFTQPLYRGELNEHLGLLGPYIRAEVEDNIMVTFRNQASRPYSFYSSLISYEEDQRQGAEPRKNFVKPNETKTYFWKVQHHMAPTKDEFDCKAWAYFSDVDLEKDVHSGLIGPLLVCHTNTLNPAHGRQVTVQEFALFFTIFDETKSWYFTENMERNCRAPCNIQMEDPTFKENYRFHAINGYIMDTLPGLVMAQDQRIRWYLLSMGSNENIHSIHFSGHVFTVRKKEEYKMALYNLYPGVFETVEMLPSKAGIWRVECLIGEHLHAGMSTLFLVYSNKCQNPLGMASGHIRDFQITASGQYGQWAPKLARLHYSGSINAWSTKEPFSWIKVDLLAPMIIHGIKTQGARQKFSSLYISQFIIMYSLDGKKWQTYRGNSTGTDMVFFGNVDSSGIKHNIFNPPIIARYIRLHPTHYSIRSTLRMELMGCDLNSCSMPLGMESKAISDAQITASSYFTNMFATWSPSKARLHLQGRSNAWRPQVNNPKEWLQVDFQKTMKVTGVTTQGVKSLDTSMYVKEFLISSSQDGHQWTLFFQNGKVKVFQGNQDSFTPVVNSLDPPLLTRYLRIHPQSWEHQIALRMEVLGCEAQDLY

SEQ ID NO: 1997 - DNA, 4371 bp, synthetic construct
  misc_feature 1..4371: note = Variant of human B-domain deleted Factor VIII
  source 1..4371: mol_type = other DNA
atgcagattgaactgtctacctgcttcttcctctgtttgctgaggttctgctttagcgccactagacggtactaccttggcgctgtggagctgtcctgggactatatgcagagtgatttgggagagcttcccgtcgacgcacgatttcctcctcgcgttccaaagtcatttccctttaacacaagccaggtgtacaagaagacgctcttcgtcgaattcaccgatcacctgttcaatatcgccaaacccagaccaccatggatgggtcttttggggcctaccatacaagcggaggtgtatgacacagttgttatcactctcaagaacatggcttctcatccggtaagtcttcacgcagtgggcgtgtcctactggaaagcttcagaaggagccgagtatgatgatcagacatcccagagggagaaagaagacgacaaggtatttccaggtgggtctcatacctatgtgtggcaagtgctcaaagagaatggccctatggcaagcgatccgccgtgtttgacttacagctacctttcacacgttgacctcgtcaaggacctcaactccgggttgattggagccttgttggtatgcagggaaggatctcttgccaaagagaagacacagaccctggccaagtttatccttctctttgctgtgttcgatgagggcaaaagttggcatagcgaaacgaagaattccctcatgcaggatcgcgacgcagccagcgccagagcttggcccaagatgcacactgtgaacggatatgtcaataggacgcttcctggcttgattgggtgtcatcggaaaagtgtctactggcacgtgatcggaatggggacaacaccagaggtccactccatatttctcgaaggccataccttccttgttcgaaaccacagacaggcatccttggggatctctcccattacctttctcactgcccaaacgctccttcgtgacttgggtcagttccttctcttttgccatatcccgtcacaccagcatgatggtatggaagcttatgtgaaagtcgacagttgtcctgaggagccacagttgcgcatgaagaataatgaagaagccgaggattacgacgacgatctcaccgattctgagatggacgtggtgaggtttgatgacgacaactctccctccatcattcaagctcggagcggggcgaagaaacaccccaagacttgggtccactatatagcggcggaagaggaggattgggattacgctcctcttgtattggcaccagatgaccgctcatacaaaagccagtacctcaacaacggaccgcagagaattggccggaagtataagaaagtgcgatttatggcctatacagacgaaacctttaagacaagggaggccatccagcatgagagtgggattttgggacctcttctttacggcgaagttggtgataccctcctcatcatcttcaagaatcaagcttctcgcccctataacatttacccacacgggatcactgacgttaggcctttgtatagcagaagacttcccaaaggcgtgaagcatctcaaagacttccccattttgccaggcgagatctttaagtacaaatggaccattacagtggaagatggaccgactaaatcagaccctcgatgccttacgcggtactattcctccttcgtgaattgggagagagatttggcaagcggactcataggaccactcctcatctgttacaaggaatctgtagaccagaggggtaaccagattatgagtgataaacgcaatgtgatcctttttagcgtcttcgacgagaaccggtcctggtacttgaccgagaatatacaaaggttccatcccaaccccgcaggcgttcagttggaagaccctgagtttcaggccagcaatattatgcactcaatcaacggctatgtgtttgatagtctccagctttctgtttgcctccatgaagtagcctattggtacatcttgtcaattggtgctcaaacagacttcctctccgtcttcttctccggctacacctttaagcacaagggcgtgtatgaggacactctcacactctttccattttctggagaaaccgtgttcatgagcatggagaatccaggcctttggatcttgggttgccacaacagtgattttcgcaatcggggaatgactgctctcctcaaagtcagcagctgtgattggaacacaggcgactattacgaagattcttacgaggacataagtgcctactttgactccaagaataacgccattgagcccagatcattctcccagaatcctcccgtgcttaaaaggcatcagcgcgaaggtaccagaactactcttcagtctgatcaagaggagattgactatgacgacaccattagcgtggaaatgaagaaggaggatttcgatatctatgacgaagatgagaaccagtctccgcggagctttcagaagaagacgcgacactacttcattgcagcagtcgaaaggctttgggactacggtatgtcatcatcccctcatgtgttgcgcaatagagctcagagtggaagtgttccacagttcaagaaagtcgtctttcaagagtttacagatggcagcttcacacagcctctctatcggggcgagcttaacgaacatttgggactccttggtccctatatccgagccgaagtggaggacaacattatggttacctttaggaatcaagcctctcgcccctacagcttctactcctccctcatcagttatgaggaggatcagagacaaggcgctgaaccacggaagaactttgtgaaaccgaatgagacgaagacctacttctggaaagtacagcaccacatggcccccacaaaagacgaattcgattgcaaagcatgggcgtatttttcagacgttgacttggagaaagatgtacattcaggacttattggtcctttgttggtgtgtcacactaacactctcaatccagcccatggcaggcaggtgacagtccaggaattcgctcttttctttaccatctttgatgagaccaagtcctggtacttcacggaaaacatggagcgcaattgcagagccccctgtaacatacagatggaggaccctacctttaaggaaaattatcggttccacgcaatcaacggatacattatggatacactccctggccttgtgatggctcaggaccaacgaatcaggtggtacctcctcagcatgggttctaatgagaacatacactccattcacttttcaggacatgtgttcactgtccggaagaaagaagagtataagatggccctctacaatttgtatccaggcgtgtttgagaccgttgaaatgcttccctctaaagctggcatctggagagtagagtgcttgatcggagaacatcttcacgcaggtatgagcaccttgttcctcgtgtacagcaacaaatgtcagaatccacttggcatggccagtggacacattcgcgactttcagatcacagcatctggccagtatggacaatgggccccaaagttggctcgcctccattactccggtagcataaatgcgtggtccactaaagaacctttcagctggattaaggtcgatcttcttgcccccatgatcatccacggcattaagacacagggagcgaggcagaaattctcctccctctacatctcacagttcattattatgtatagtttggacggcaagaagtggcaaacttatagaggtaacagtactggaacagacatggtgttcttcggcaacgttgatagctctggcatcaaacacaacatctttaatcctcccataatagctcggtacatcagattgcatccgacccactacagcattaggagtacactccgaatggagcttatgggttgcgacttgaattcctgttcaatgccactcggaatggagtctaaagccatctctgatgcacagataaccgccagtagctactttacgaacatgtttgctacgtggtcaccctctaaggcaaggcttcatttgcaaggccggtctaatgcctggagacctcaggtgaacaacccgaaagaatggctccaggtggactttcagaagaccatgaaagtaacaggtgtcactactcagggagttaagtccttggatactagcatgtatgtgaaggagttccttatttcctcatcacaagatggccaccagtggaccctcttctttcagaatggtaaggtcaaagtgtttcagggcaatcaagacagcttcacacccgtggtgaacagtcttgatcctccactcttgacacgataccttcgaatccatccacagtcttgggagcaccagattgcattgcgcatggaagtacttggatgcgaggctcaggacctctac

SEQ ID NO: 1998 - protein, 1457 aa, synthetic construct
  REGION 1..1457: note = Variant of human B-domain deleted Factor VIII
MQIELSTCFFLCLLRFCFSATRRYYLGAVELSWDYMQSDLGELPVDARFPPRVPKSFPFNTSQVYKKTLFVEFTDHLFNIAKPRPPWMGLLGPTIQAEVYDTVVITLKNMASHPVSLHAVGVSYWKASEGAEYDDQTSQREKEDDKVFPGGSHTYVWQVLKENGPMASDPPCLTYSYLSHVDLVKDLNSGLIGALLVCREGSLAKEKTQTLAKFILLFAVFDEGKSWHSETKNSLMQDRDAASARAWPKMHTVNGYVNRTLPGLIGCHRKSVYWHVIGMGTTPEVHSIFLEGHTFLVRNHRQASLGISPITFLTAQTLLRDLGQFLLFCHIPSHQHDGMEAYVKVDSCPEEPQLRMKNNEEAEDYDDDLTDSEMDVVRFDDDNSPSIIQARSGAKKHPKTWVHYIAAEEEDWDYAPLVLAPDDRSYKSQYLNNGPQRIGRKYKKVRFMAYTDETFKTREAIQHESGILGPLLYGEVGDTLLIIFKNQASRPYNIYPHGITDVRPLYSRRLPKGVKHLKDFPILPGEIFKYKWTITVEDGPTKSDPRCLTRYYSSFVNWERDLASGLIGPLLICYKESVDQRGNQIMSDKRNVILFSVFDENRSWYLTENIQRFHPNPAGVQLEDPEFQASNIMHSINGYVFDSLQLSVCLHEVAYWYILSIGAQTDFLSVFFSGYTFKHKGVYEDTLTLFPFSGETVFMSMENPGLWILGCHNSDFRNRGMTALLKVSSCDWNTGDYYEDSYEDISAYFDSKNNAIEPRSFSQNPPVLKRHQREGTRTTLQSDQEEIDYDDTISVEMKKEDFDIYDEDENQSPRSFQKKTRHYFIAAVERLWDYGMSSSPHVLRNRAQSGSVPQFKKVVFQEFTDGSFTQPLYRGELNEHLGLLGPYIRAEVEDNIMVTFRNQASRPYSFYSSLISYEEDQRQGAEPRKNFVKPNETKTYFWKVQHHMAPTKDEFDCKAWAYFSDVDLEKDVHSGLIGPLLVCHTNTLNPAHGRQVTVQEFALFFTIFDETKSWYFTENMERNCRAPCNIQMEDPTFKENYRFHAINGYIMDTLPGLVMAQDQRIRWYLLSMGSNENIHSIHFSGHVFTVRKKEEYKMALYNLYPGVFETVEMLPSKAGIWRVECLIGEHLHAGMSTLFLVYSNKCQNPLGMASGHIRDFQITASGQYGQWAPKLARLHYSGSINAWSTKEPFSWIKVDLLAPMIIHGIKTQGARQKFSSLYISQFIIMYSLDGKKWQTYRGNSTGTDMVFFGNVDSSGIKHNIFNPPIIARYIRLHPTHYSIRSTLRMELMGCDLNSCSMPLGMESKAISDAQITASSYFTNMFATWSPSKARLHLQGRSNAWRPQVNNPKEWLQVDFQKTMKVTGVTTQGVKSLDTSMYVKEFLISSSQDGHQWTLFFQNGKVKVFQGNQDSFTPVVNSLDPPLLTRYLRIHPQSWEHQIALRMEVLGCEAQDLY

SEQ ID NO: 1999 - DNA, 4371 bp, synthetic construct
  misc_feature 1..4371: note = Variant of human B-domain deleted Factor VIII
  source 1..4371: mol_type = other DNA
atgcagattgaactgtctacctgcttcttcctctgtttgctgaggttctgctttagcgccactagacggtactaccttggcgctgtggagctgtcctgggactatatgcagagtgatttgggagagcttcccgtcgacgcacgatttcctcctcgcgttccaaagtcatttccctttaacacaagccaggtgtacaagaagacgctcttcgtcgaattcaccgatcacctgttcaatatcgccaaacccagaccaccatggatgggtcttttggggcctaccatacaagcggaggtgtatgacacagttgttatcactctcaagaacatggcttctcatccggtaagtcttcacgcagtgggcgtgtcctactggaaagcttcagaaggagccgagtatgatgatcagacatcccagagggagaaagaagacgacaaggtatttccaggtgggtctcatacctatgtgtggcaagtgctcaaagagaatggccctatggcaagcgatccgccgtgtttgacttacagctacctttcacacgttgacctcgtcaaggacctcaactccgggttgattggagccttgttggtatgcagggaaggatctcttgccaaagagaagacacagaccctggccaagtttatccttctctttgctgtgttcgatgagggcaaaagttggcatagcgaaacgaagaattccctcatgcaggatcgcgacgcagccagcgccagagcttggcccaagatgcacactgtgaacggatatgtcaataggacgcttcctggcttgattgggtgtcatcggaaaagtgtctactggcacgtgatcggaatggggacaacaccagaggtccactccatatttctcgaaggccataccttccttgttcgaaaccacagacaggcatccttggggatctctcccattacctttctcactgcccaaacgctccttcgtgacttgggtcagttccttctcttttgccatatcccgtcacaccagcatgatggtatggaagcttatgtgaaagtcgacagttgtcctgaggagccacagttgcgcatgaagaataatgaagaagccgaggattacgacgacgatctcaccgattctgagatggacgtggtgaggtttgatgacgacaactctccctccatcattcaagctcggagcggggcgaagaaacaccccaagacttgggtccactatatagcggcggaagaggaggattgggattacgctcctcttgtattggcaccagatgaccgctcatacaaaagccagtacctcaacaacggaccgcagagaattggccggaagtataagaaagtgcgatttatggcctatacagacgaaacctttaagacaagggaggccatccagcatgagagtgggattttgggacctcttctttacggcgaagttggtgataccctcctcatcatcttcaagaatcaagcttctcgcccctataacatttacccacacgggatcactgacgttaggcctttgtatagcagaagacttcccaaaggcgtgaagcatctcaaagacttccccattttgccaggcgagatctttaagtacaaatggaccattacagtggaagatggaccgactaaatcagaccctcgatgccttacgcggtactattcctccttcgtgaattgggagagagatttggcaagcggactcataggaccactcctcatctgttacaaggaatctgtagaccagaggggtaaccagattatgagtgataaacgcaatgtgatcctttttagcgtcttcgacgagaaccggtcctggtacttgaccgagaatatacaaaggttccttcccgatcccgcaggcgttcagttggaagaccctgagtttcaggccagcaatattatgcactcaatcaacggctatgtgtttgatagtctccagctttctgtttgcctccatgaagtagcctattggtacatcttgtcaattggtgctcaaacagacttcctctccgtcttcttctccggctacacctttaagcacaagggcgtgtatgaggacactctcacactctttccattttctggagaaaccgtgttcatgagcatggagaatccaggcctttggatcttgggttgccacaacagtgattttcgcaatcggggaatgactgctctcctcaaagtcagcagctgtgattggaacacaggcgactattacgaagattcttacgaggacataagtgcctactttgactccaagaataacgccattgagcccagatcattctcccagaatcctcccgtgcttaaaaggcatcagcgcgaaggtaccagaactactcttcagtctgatcaagaggagattgactatgacgacaccattagcgtggaaatgaagaaggaggatttcgatatctatgacgaagatgagaaccagtctccgcggagctttcagaagaagacgcgacactacttcattgcagcagtcgaaaggctttgggactacggtatgtcatcatcccctcatgtgttgcgcaatagagctcagagtggaagtgttccacagttcaagaaagtcgtctttcaagagtttacagatggcagcttcacacagcctctctatcggggcgagcttaacgaacatttgggactccttggtccctatatccgagccgaagtggaggacaacattatggttacctttaggaatcaagcctctcgcccctacagcttctactcctccctcatcagttatgaggaggatcagagacaaggcgctgaaccacggaagaactttgtgaaaccgaatgagacgaagacctacttctggaaagtacagcaccacatggcccccacaaaagacgaattcgattgcaaagcatgggcgtatttttcagacgttgacttggagaaagatgtacattcaggacttattggtcctttgttggtgtgtcacactaacactctcaatccagcccatggcaggcaggtgacagtccaggaattcgctcttttctttaccatctttgatgagaccaagtcctggtacttcacggaaaacatggagcgcaattgcagagccccctgtaacatacagatggaggaccctacctttaaggaaaattatcggttccacgcaatcaacggatacattatggatacactccctggccttgtgatggctcaggaccaacgaatcaggtggtacctcctcagcatgggttctaatgagaacatacactccattcacttttcaggacatgtgttcactgtccggaagaaagaagagtataagatggccctctacaatttgtatccaggcgtgtttgagaccgttgaaatgcttccctctaaagctggcatctggagagtagagtgcttgatcggagaacatcttcacgcaggtatgagcaccttgttcctcgtgtacagcaacaaatgtcagaatccacttggcatggccagtggacacattcgcgactttcagatcacagcatctggccagtatggacaatgggccccaaagttggctcgcctccattactccggtagcataaatgcgtggtccactaaagaacctttcagctggattaaggtcgatcttcttgcccccatgatcatccacggcattaagacacagggagcgaggcagaaattctcctccctctacatctcacagttcattattatgtatagtttggacggcaagaagtggcaaacttatagaggtaacagtactggaacagacatggtgttcttcggcaacgttgatagctctggcatcaaacacaacatctttaatcctcccataatagctcggtacatcagattgcatccgacccactacagcattaggagtacactccgaatggagcttatgggttgcgacttgaattcctgttcaatgccactcggaatggagtctaaagccatctctgatgcacagataaccgccagtagctactttacgaacatgtttgctacgtggtcaccctctaaggcaaggcttcatttgcaaggccggtctaatgcctggagacctcaggtgaacaacccgaaagaatggctccaggtggactttcagaagaccatgaaagtaacaggtgtcactactcagggagttaagtccttggatactagcatgtatgtgaaggagttccttatttcctcatcacaagatggccaccagtggaccctcttctttcagaatggtaaggtcaaagtgtttcagggcaatcaagacagcttcacacccgtggtgaacagtcttgatcctccactcttgacacgataccttcgaatccatccacagtcttgggagcaccagattgcattgcgcatggaagtacttggatgcgaggctcaggacctctac

SEQ ID NO: 2000 - protein, 1457 aa, synthetic construct
  REGION 1..1457: note = Variant of human B-domain deleted Factor VIII
MQIELSTCFFLCLLRFCFSATRRYYLGAVELSWDYMQSDLGELPVDARFPPRVPKSFPFNTSQVYKKTLFVEFTDHLFNIAKPRPPWMGLLGPTIQAEVYDTVVITLKNMASHPVSLHAVGVSYWKASEGAEYDDQTSQREKEDDKVFPGGSHTYVWQVLKENGPMASDPPCLTYSYLSHVDLVKDLNSGLIGALLVCREGSLAKEKTQTLAKFILLFAVFDEGKSWHSETKNSLMQDRDAASARAWPKMHTVNGYVNRTLPGLIGCHRKSVYWHVIGMGTTPEVHSIFLEGHTFLVRNHRQASLGISPITFLTAQTLLRDLGQFLLFCHIPSHQHDGMEAYVKVDSCPEEPQLRMKNNEEAEDYDDDLTDSEMDVVRFDDDNSPSIIQARSGAKKHPKTWVHYIAAEEEDWDYAPLVLAPDDRSYKSQYLNNGPQRIGRKYKKVRFMAYTDETFKTREAIQHESGILGPLLYGEVGDTLLIIFKNQASRPYNIYPHGITDVRPLYSRRLPKGVKHLKDFPILPGEIFKYKWTITVEDGPTKSDPRCLTRYYSSFVNWERDLASGLIGPLLICYKESVDQRGNQIMSDKRNVILFSVFDENRSWYLTENIQRFLPDPAGVQLEDPEFQASNIMHSINGYVFDSLQLSVCLHEVAYWYILSIGAQTDFLSVFFSGYTFKHKGVYEDTLTLFPFSGETVFMSMENPGLWILGCHNSDFRNRGMTALLKVSSCDWNTGDYYEDSYEDISAYFDSKNNAIEPRSFSQNPPVLKRHQREGTRTTLQSDQEEIDYDDTISVEMKKEDFDIYDEDENQSPRSFQKKTRHYFIAAVERLWDYGMSSSPHVLRNRAQSGSVPQFKKVVFQEFTDGSFTQPLYRGELNEHLGLLGPYIRAEVEDNIMVTFRNQASRPYSFYSSLISYEEDQRQGAEPRKNFVKPNETKTYFWKVQHHMAPTKDEFDCKAWAYFSDVDLEKDVHSGLIGPLLVCHTNTLNPAHGRQVTVQEFALFFTIFDETKSWYFTENMERNCRAPCNIQMEDPTFKENYRFHAINGYIMDTLPGLVMAQDQRIRWYLLSMGSNENIHSIHFSGHVFTVRKKEEYKMALYNLYPGVFETVEMLPSKAGIWRVECLIGEHLHAGMSTLFLVYSNKCQNPLGMASGHIRDFQITASGQYGQWAPKLARLHYSGSINAWSTKEPFSWIKVDLLAPMIIHGIKTQGARQKFSSLYISQFIIMYSLDGKKWQTYRGNSTGTDMVFFGNVDSSGIKHNIFNPPIIARYIRLHPTHYSIRSTLRMELMGCDLNSCSMPLGMESKAISDAQITASSYFTNMFATWSPSKARLHLQGRSNAWRPQVNNPKEWLQVDFQKTMKVTGVTTQGVKSLDTSMYVKEFLISSSQDGHQWTLFFQNGKVKVFQGNQDSFTPVVNSLDPPLLTRYLRIHPQSWEHQIALRMEVLGCEAQDLY

SEQ ID NO: 2001 - DNA, 4371 bp, synthetic construct
  misc_feature 1..4371: note = Variant of human B-domain deleted Factor VIII
  source 1..4371: mol_type = other DNA
atgcagattgaactgtctacctgcttcttcctctgtttgctgaggttctgctttagcgccactagacggtactaccttggcgctgtggagctgtcctgggactatatgcagagtgatttgggagagcttcccgtcgacgcacgatttcctcctcgcgttccaaagtcatttccctttaacacaagccaggtgtacaagaagacgctcttcgtcgaattcaccgatcacctgttcaatatcgccaaacccagaccaccatggatgggtcttttggggcctaccatacaagcggaggtgtatgacacagttgttatcactctcaagaacatggcttctcatccggtaagtcttcacgcagtgggcgtgtcctactggaaagcttcagaaggagccgagtatgatgatcagacatcccagagggagaaagaagacgacaaggtatttccaggtgggtctcatacctatgtgtggcaagtgctcaaagagaatggccctatggcaagcgatccgccgtgtttgacttacagctacctttcacacgttgacctcgtcaaggacctcaactccgggttgattggagccttgttggtatgcagggaaggatctcttgccaaagagaagacacagaccctggccaagtttatccttctctttgctgtgttcgatgagggcaaaagttggcatagcgaaacgaagaattccctcatgcaggatcgcgacgcagccagcgccagagcttggcccaagatgcacactgtgaacggatatgtcaataggacgcttcctggcttgattgggtgtcatcggaaaagtgtctactggcacgtgatcggaatggggacaacaccagaggtccactccatatttctcgaaggccataccttccttgttcgaaaccacagacaggcatccttggggatctctcccattacctttctcactgcccaaacgctccttcgtgacttgggtcagttccttctcttttgccatatcccgtcacaccagcatgatggtatggaagcttatgtgaaagtcgacagttgtcctgaggagccacagttgcgcatgaagaataatgaagaagccgaggattacgacgacgatctcaccgattctgagatggacgtggtgaggtttgatgacgacaactctccctccatcattcaagctcggagcggggcgaagaaacaccccaagacttgggtccactatatagcggcggaagaggaggattgggattacgctcctcttgtattggcaccagatgaccgctcatacaaaagccagtacctcaacaacggaccgcagagaattggccggaagtataagaaagtgcgatttatggcctatacagacgaaacctttaagacaagggaggccatccagcatgagagtgggattttgggacctcttctttacggcgaagttggtgataccctcctcatcatcttcaagaatcaagcttctcgcccctataacatttacccacacgggatcactgacgttaggcctttgtatagcagaagacttcccaaaggcgtgaagcatctcaaagacttccccattttgccaggcgagatctttaagtacaaatggaccattacagtggaagatggaccgactaaatcagaccctcgatgccttacgcggtactattcctccttcgtgaattgggagagagatttggcaagcggactcataggaccactcctcatctgttacaaggaatctgtagaccagaggggtaaccagattatgagtgataaacgcaatgtgatcctttttagcgtcttcgacgagaaccggtcctggtacttgaccgagaatatacaaaggttccttcccaaccccgcaggcgttaaattggaagaccctgagtttcaggccagcaatattatgcactcaatcaacggctatgtgtttgatagtctccagctttctgtttgcctccatgaagtagcctattggtacatcttgtcaattggtgctcaaacagacttcctctccgtcttcttctccggctacacctttaagcacaagggcgtgtatgaggacactctcacactctttccattttctggagaaaccgtgttcatgagcatggagaatccaggcctttggatcttgggttgccacaacagtgattttcgcaatcggggaatgactgctctcctcaaagtcagcagctgtgattggaacacaggcgactattacgaagattcttacgaggacataagtgcctactttgactccaagaataacgccattgagcccagatcattctcccagaatcctcccgtgcttaaaaggcatcagcgcgaaggtaccagaactactcttcagtctgatcaagaggagattgactatgacgacaccattagcgtggaaatgaagaaggaggatttcgatatctatgacgaagatgagaaccagtctccgcggagctttcagaagaagacgcgacactacttcattgcagcagtcgaaaggctttgggactacggtatgtcatcatcccctcatgtgttgcgcaatagagctcagagtggaagtgttccacagttcaagaaagtcgtctttcaagagtttacagatggcagcttcacacagcctctctatcggggcgagcttaacgaacatttgggactccttggtccctatatccgagccgaagtggaggacaacattatggttacctttaggaatcaagcctctcgcccctacagcttctactcctccctcatcagttatgaggaggatcagagacaaggcgctgaaccacggaagaactttgtgaaaccgaatgagacgaagacctacttctggaaagtacagcaccacatggcccccacaaaagacgaattcgattgcaaagcatgggcgtatttttcagacgttgacttggagaaagatgtacattcaggacttattggtcctttgttggtgtgtcacactaacactctcaatccagcccatggcaggcaggtgacagtccaggaattcgctcttttctttaccatctttgatgagaccaagtcctggtacttcacggaaaacatggagcgcaattgcagagccccctgtaacatacagatggaggaccctacctttaaggaaaattatcggttccacgcaatcaacggatacattatggatacactccctggccttgtgatggctcaggaccaacgaatcaggtggtacctcctcagcatgggttctaatgagaacatacactccattcacttttcaggacatgtgttcactgtccggaagaaagaagagtataagatggccctctacaatttgtatccaggcgtgtttgagaccgttgaaatgcttccctctaaagctggcatctggagagtagagtgcttgatcggagaacatcttcacgcaggtatgagcaccttgttcctcgtgtacagcaacaaatgtcagaatccacttggcatggccagtggacacattcgcgactttcagatcacagcatctggccagtatggacaatgggccccaaagttggctcgcctccattactccggtagcataaatgcgtggtccactaaagaacctttcagctggattaaggtcgatcttcttgcccccatgatcatccacggcattaagacacagggagcgaggcagaaattctcctccctctacatctcacagttcattattatgtatagtttggacggcaagaagtggcaaacttatagaggtaacagtactggaacagacatggtgttcttcggcaacgttgatagctctggcatcaaacacaacatctttaatcctcccataatagctcggtacatcagattgcatccgacccactacagcattaggagtacactccgaatggagcttatgggttgcgacttgaattcctgttcaatgccactcggaatggagtctaaagccatctctgatgcacagataaccgccagtagctactttacgaacatgtttgctacgtggtcaccctctaaggcaaggcttcatttgcaaggccggtctaatgcctggagacctcaggtgaacaacccgaaagaatggctccaggtggactttcagaagaccatgaaagtaacaggtgtcactactcagggagttaagtccttggatactagcatgtatgtgaaggagttccttatttcctcatcacaagatggccaccagtggaccctcttctttcagaatggtaaggtcaaagtgtttcagggcaatcaagacagcttcacacccgtggtgaacagtcttgatcctccactcttgacacgataccttcgaatccatccacagtcttgggagcaccagattgcattgcgcatggaagtacttggatgcgaggctcaggacctctac

SEQ ID NO: 2002 - protein, 1457 aa, synthetic construct
  REGION 1..1457: note = Variant of human B-domain deleted Factor VIII
MQIELSTCFFLCLLRFCFSATRRYYLGAVELSWDYMQSDLGELPVDARFPPRVPKSFPFNTSQVYKKTLFVEFTDHLFNIAKPRPPWMGLLGPTIQAEVYDTVVITLKNMASHPVSLHAVGVSYWKASEGAEYDDQTSQREKEDDKVFPGGSHTYVWQVLKENGPMASDPPCLTYSYLSHVDLVKDLNSGLIGALLVCREGSLAKEKTQTLAKFILLFAVFDEGKSWHSETKNSLMQDRDAASARAWPKMHTVNGYVNRTLPGLIGCHRKSVYWHVIGMGTTPEVHSIFLEGHTFLVRNHRQASLGISPITFLTAQTLLRDLGQFLLFCHIPSHQHDGMEAYVKVDSCPEEPQLRMKNNEEAEDYDDDLTDSEMDVVRFDDDNSPSIIQARSGAKKHPKTWVHYIAAEEEDWDYAPLVLAPDDRSYKSQYLNNGPQRIGRKYKKVRFMAYTDETFKTREAIQHESGILGPLLYGEVGDTLLIIFKNQASRPYNIYPHGITDVRPLYSRRLPKGVKHLKDFPILPGEIFKYKWTITVEDGPTKSDPRCLTRYYSSFVNWERDLASGLIGPLLICYKESVDQRGNQIMSDKRNVILFSVFDENRSWYLTENIQRFLPNPAGVKLEDPEFQASNIMHSINGYVFDSLQLSVCLHEVAYWYILSIGAQTDFLSVFFSGYTFKHKGVYEDTLTLFPFSGETVFMSMENPGLWILGCHNSDFRNRGMTALLKVSSCDWNTGDYYEDSYEDISAYFDSKNNAIEPRSFSQNPPVLKRHQREGTRTTLQSDQEEIDYDDTISVEMKKEDFDIYDEDENQSPRSFQKKTRHYFIAAVERLWDYGMSSSPHVLRNRAQSGSVPQFKKVVFQEFTDGSFTQPLYRGELNEHLGLLGPYIRAEVEDNIMVTFRNQASRPYSFYSSLISYEEDQRQGAEPRKNFVKPNETKTYFWKVQHHMAPTKDEFDCKAWAYFSDVDLEKDVHSGLIGPLLVCHTNTLNPAHGRQVTVQEFALFFTIFDETKSWYFTENMERNCRAPCNIQMEDPTFKENYRFHAINGYIMDTLPGLVMAQDQRIRWYLLSMGSNENIHSIHFSGHVFTVRKKEEYKMALYNLYPGVFETVEMLPSKAGIWRVECLIGEHLHAGMSTLFLVYSNKCQNPLGMASGHIRDFQITASGQYGQWAPKLARLHYSGSINAWSTKEPFSWIKVDLLAPMIIHGIKTQGARQKFSSLYISQFIIMYSLDGKKWQTYRGNSTGTDMVFFGNVDSSGIKHNIFNPPIIARYIRLHPTHYSIRSTLRMELMGCDLNSCSMPLGMESKAISDAQITASSYFTNMFATWSPSKARLHLQGRSNAWRPQVNNPKEWLQVDFQKTMKVTGVTTQGVKSLDTSMYVKEFLISSSQDGHQWTLFFQNGKVKVFQGNQDSFTPVVNSLDPPLLTRYLRIHPQSWEHQIALRMEVLGCEAQDLY

SEQ ID NO: 2003 - DNA, 4371 bp, synthetic construct
  misc_feature 1..4371: note = Variant of human B-domain deleted Factor VIII
  source 1..4371: mol_type = other DNA
atgcagattgaactgtctacctgcttcttcctctgtttgctgaggttctgctttagcgccactagacggtactaccttggcgctgtggagctgtcctgggactatatgcagagtgatttgggagagcttcccgtcgacgcacgatttcctcctcgcgttccaaagtcatttccctttaacacaagccaggtgtacaagaagacgctcttcgtcgaattcaccgatcacctgttcaatatcgccaaacccagaccaccatggatgggtcttttggggcctaccatacaagcggaggtgtatgacacagttgttatcactctcaagaacatggcttctcatccggtaagtcttcacgcagtgggcgtgtcctactggaaagcttcagaaggagccgagtatgatgatcagacatcccagagggagaaagaagacgacaaggtatttccaggtgggtctcatacctatgtgtggcaagtgctcaaagagaatggccctatggcaagcgatccgccgtgtttgacttacagctacctttcacacgttgacctcgtcaaggacctcaactccgggttgattggagccttgttggtatgcagggaaggatctcttgccaaagagaagacacagaccctggccaagtttatccttctctttgctgtgttcgatgagggcaaaagttggcatagcgaaacgaagaattccctcatgcaggatcgcgacgcagccagcgccagagcttggcccaagatgcacactgtgaacggatatgtcaataggacgcttcctggcttgattgggtgtcatcggaaaagtgtctactggcacgtgatcggaatggggacaacaccagaggtccactccatatttctcgaaggccataccttccttgttcgaaaccacagacaggcatccttggggatctctcccattacctttctcactgcccaaacgctccttcgtgacttgggtcagttccttctcttttgccatatcccgtcacaccagcatgatggtatggaagcttatgtgaaagtcgacagttgtcctgaggagccacagttgcgcatgaagaataatgaagaagccgaggattacgacgacgatctcaccgattctgagatggacgtggtgaggtttgatgacgacaactctccctccatcattcaagctcggagcggggcgaagaaacaccccaagacttgggtccactatatagcggcggaagaggaggattgggattacgctcctcttgtattggcaccagatgaccgctcatacaaaagccagtacctcaacaacggaccgcagagaattggccggaagtataagaaagtgcgatttatggcctatacagacgaaacctttaagacaagggaggccatccagcatgagagtgggattttgggacctcttctttacggcgaagttggtgataccctcctcatcatcttcaagaatcaagcttctcgcccctataacatttacccacacgggatcactgacgttaggcctttgtatagcagaagacttcccaaaggcgtgaagcatctcaaagacttccccattttgccaggcgagatctttaagtacaaatggaccattacagtggaagatggaccgactaaatcagaccctcgatgccttacgcggtactattcctccttcgtgaattgggagagagatttggcaagcggactcataggaccactcctcatctgttacaaggaatctgtagaccagaggggtaaccagattatgagtgataaacgcaatgtgatcctttttagcgtcttcgacgagaaccggtcctggtacttgaccgagaatatacaaaggttccttcccaaccccgcaggcgttcagttggaagaccctgagtttcaggccagcaatattatgcactcaatcaacggctatgtgtttgatagtctccagctttctgtttgcctccatgaagtagcctattggtacatcttgtcaattggtgctcaaacagacttcctctccgtcttcttctccggctacacctttaagcacaagggcgtgtatgaggacactctcacactctttccattttctggagaaaccgtgttcatgagcatggagaatccaggcctttggatcttgggttgccacaacagtgattttcgcaatcggggaatgactgctctcctcaaagtcagcagctgtgattggaacacaggcgactattacgaagattcttacgaggacataagtgcctactttgactccaagaataacgccattgagcccagatcattctcccagaatcctcccgtgcttaaaaggcatcagcgcgaaggtaccagaactactcttcagtctgatcaagaggagattgactatgacgacaccattagcgtggaaatgaagaaggaggatttcgatatctatgacgaagatgagaaccagtctccgcggagctttcagaagaagacgcgacactacttcattgcagcagtcgaaaggctttgggactacggtatgtcatcatcccctcatgtgttgcgcaatagagctcagagtggaagtgttccacagttcaagaaagtcgtctttcaagagtttacagatggcagcttcacacagcctctctatcggggcgagcttaacgaacatttgggactccttggtccctatatccgagccgaagtggaggacaacattatggttacctttaggaatcaagcctctcgcccctacagcttctactcctccctcatcagttatgaggaggatcagagacaaggcgctgaaccacggaagaactttgtgaaaccgaatgagacgaagacctacttctggaaagtacagcaccacatggcccccacaaaagacgaattcgattgcaaagcatgggcgtatttttcagacgttgacttggagaaagatgtacattcaggacttattggtcctttgttggtgtgtcacactaacactctcaatccagcccatggcaggcaggtgacagtccaggaattcgctcttttctttaccatctttgatgagaccaagtcctggtacttcacggaaaacatggagcgcaattgcagagccccctgtaacatacagatggaggaccctacctttaaggaaaattatcggttccacgcaatcaacggatacgaaatggatacactccctggccttgtgatggctcaggaccaacgaatcaggtggtacctcctcagcatgggttctaatgagaacatacactccattcacttttcaggacatgtgttcactgtccggaagaaagaagagtataagatggccctctacaatttgtatccaggcgtgtttgagaccgttgaaatgcttccctctaaagctggcatctggagagtagagtgcttgatcggagaacatcttcacgcaggtatgagcaccttgttcctcgtgtacagcaacaaatgtcagaatccacttggcatggccagtggacacattcgcgactttcagatcacagcatctggccagtatggacaatgggccccaaagttggctcgcctccattactccggtagcataaatgcgtggtccactaaagaacctttcagctggattaaggtcgatcttcttgcccccatgatcatccacggcattaagacacagggagcgaggcagaaattctcctccctctacatctcacagttcattattatgtatagtttggacggcaagaagtggcaaacttatagaggtaacagtactggaacagacatggtgttcttcggcaacgttgatagctctggcatcaaacacaacatctttaatcctcccataatagctcggtacatcagattgcatccgacccactacagcattaggagtacactccgaatggagcttatgggttgcgacttgaattcctgttcaatgccactcggaatggagtctaaagccatctctgatgcacagataaccgccagtagctactttacgaacatgtttgctacgtggtcaccctctaaggcaaggcttcatttgcaaggccggtctaatgcctggagacctcaggtgaacaacccgaaagaatggctccaggtggactttcagaagaccatgaaagtaacaggtgtcactactcagggagttaagtccttggatactagcatgtatgtgaaggagttccttatttcctcatcacaagatggccaccagtggaccctcttctttcagaatggtaaggtcaaagtgtttcagggcaatcaagacagcttcacacccgtggtgaacagtcttgatcctccactcttgacacgataccttcgaatccatccacagtcttgggagcaccagattgcattgcgcatggaagtacttggatgcgaggctcaggacctctac

SEQ ID NO: 2004 - protein, 1457 aa, synthetic construct
  REGION 1..1457: note = Variant of human B-domain deleted Factor VIII
MQIELSTCFFLCLLRFCFSATRRYYLGAVELSWDYMQSDLGELPVDARFPPRVPKSFPFNTSQVYKKTLFVEFTDHLFNIAKPRPPWMGLLGPTIQAEVYDTVVITLKNMASHPVSLHAVGVSYWKASEGAEYDDQTSQREKEDDKVFPGGSHTYVWQVLKENGPMASDPPCLTYSYLSHVDLVKDLNSGLIGALLVCREGSLAKEKTQTLAKFILLFAVFDEGKSWHSETKNSLMQDRDAASARAWPKMHTVNGYVNRTLPGLIGCHRKSVYWHVIGMGTTPEVHSIFLEGHTFLVRNHRQASLGISPITFLTAQTLLRDLGQFLLFCHIPSHQHDGMEAYVKVDSCPEEPQLRMKNNEEAEDYDDDLTDSEMDVVRFDDDNSPSIIQARSGAKKHPKTWVHYIAAEEEDWDYAPLVLAPDDRSYKSQYLNNGPQRIGRKYKKVRFMAYTDETFKTREAIQHESGILGPLLYGEVGDTLLIIFKNQASRPYNIYPHGITDVRPLYSRRLPKGVKHLKDFPILPGEIFKYKWTITVEDGPTKSDPRCLTRYYSSFVNWERDLASGLIGPLLICYKESVDQRGNQIMSDKRNVILFSVFDENRSWYLTENIQRFLPNPAGVQLEDPEFQASNIMHSINGYVFDSLQLSVCLHEVAYWYILSIGAQTDFLSVFFSGYTFKHKGVYEDTLTLFPFSGETVFMSMENPGLWILGCHNSDFRNRGMTALLKVSSCDWNTGDYYEDSYEDISAYFDSKNNAIEPRSFSQNPPVLKRHQREGTRTTLQSDQEEIDYDDTISVEMKKEDFDIYDEDENQSPRSFQKKTRHYFIAAVERLWDYGMSSSPHVLRNRAQSGSVPQFKKVVFQEFTDGSFTQPLYRGELNEHLGLLGPYIRAEVEDNIMVTFRNQASRPYSFYSSLISYEEDQRQGAEPRKNFVKPNETKTYFWKVQHHMAPTKDEFDCKAWAYFSDVDLEKDVHSGLIGPLLVCHTNTLNPAHGRQVTVQEFALFFTIFDETKSWYFTENMERNCRAPCNIQMEDPTFKENYRFHAINGYEMDTLPGLVMAQDQRIRWYLLSMGSNENIHSIHFSGHVFTVRKKEEYKMALYNLYPGVFETVEMLPSKAGIWRVECLIGEHLHAGMSTLFLVYSNKCQNPLGMASGHIRDFQITASGQYGQWAPKLARLHYSGSINAWSTKEPFSWIKVDLLAPMIIHGIKTQGARQKFSSLYISQFIIMYSLDGKKWQTYRGNSTGTDMVFFGNVDSSGIKHNIFNPPIIARYIRLHPTHYSIRSTLRMELMGCDLNSCSMPLGMESKAISDAQITASSYFTNMFATWSPSKARLHLQGRSNAWRPQVNNPKEWLQVDFQKTMKVTGVTTQGVKSLDTSMYVKEFLISSSQDGHQWTLFFQNGKVKVFQGNQDSFTPVVNSLDPPLLTRYLRIHPQSWEHQIALRMEVLGCEAQDLY

SEQ ID NO: 2005 - DNA, 4371 bp, synthetic construct
  misc_feature 1..4371: note = Variant of human B-domain deleted Factor VIII
  source 1..4371: mol_type = other DNA
atgcagattgaactgtctacctgcttcttcctctgtttgctgaggttctgctttagcgccactagacggtactaccttggcgctgtggagctgtcctgggactatatgcagagtgatttgggagagcttcccgtcgacgcacgatttcctcctcgcgttccaaagtcatttccctttaacacaagccaggtgtacaagaagacgctcttcgtcgaattcaccgatcacctgttcaatatcgccaaacccagaccaccatggatgggtcttttggggcctaccatacaagcggaggtgtatgacacagttgttatcactctcaagaacatggcttctcatccggtaagtcttcacgcagtgggcgtgtcctactggaaagcttcagaaggagccgagtatgatgatcagacatcccagagggagaaagaagacgacaaggtatttccaggtgggtctcatacctatgtgtggcaagtgctcaaagagaatggccctatggcaagcgatccgccgtgtttgacttacagctacctttcacacgttgacctcgtcaaggacctcaactccgggttgattggagccttgttggtatgcagggaaggatctcttgccaaagagaagacacagaccctggccaagtttatccttctctttgctgtgttcgatgagggcaaaagttggcatagcgaaacgaagaattccctcatgcaggatcgcgacgcagccagcgccagagcttggcccaagatgcacactgtgaacggatatgtcaataggacgcttcctggcttgattgggtgtcatcggaaaagtgtctactggcacgtgatcggaatggggacaacaccagaggtccactccatatttctcgaaggccataccttccttgttcgaaaccacagacaggcatccttggggatctctcccattacctttctcactgcccaaacgctccttcgtgacttgggtcagttccttctcttttgccatatcccgtcacaccagcatgatggtatggaagcttatgtgaaagtcgacagttgtcctgaggagccacagttgcgcatgaagaataatgaagaagccgaggattacgacgacgatctcaccgattctgagatggacgtggtgaggtttgatgacgacaactctccctccatcattcaagctcggagcggggcgaagaaacaccccaagacttgggtccactatatagcggcggaagaggaggattgggattacgctcctcttgtattggcaccagatgaccgctcatacaaaagccagtacctcaacaacggaccgcagagaattggccggaagtataagaaagtgcgatttatggcctatacagacgaaacctttaagacaagggaggccatccagcatgagagtgggattttgggacctcttctttacggcgaagttggtgataccctcctcatcatcttcaagaatcaagcttctcgcccctataacatttacccacacgggatcactgacgttaggcctttgtatagcagaagacttcccaaaggcgtgaagcatctcaaagacttccccattttgccaggcgagatctttaagtacaaatggaccattacagtggaagatggaccgactaaatcagaccctcgatgccttacgcggtactattcctccttcgtgaattgggagagagatttggcaagcggactcataggaccactcctcatctgttacaaggaatctgtagaccagaggggtaaccagattatgagtgataaacgcaatgtgatcctttttagcgtcttcgacgagaaccggtcctggtacttgaccgagaatcaccaaaggttccttcccaaccccgcaggcgttcagttggaagaccctgagtttcaggccagcaatattatgcactcaatcaacggctatgtgtttgatagtctccagctttctgtttgcctccatgaagtagcctattggtacatcttgtcaattggtgctcaaacagacttcctctccgtcttcttctccggctacacctttaagcacaagggcgtgtatgaggacactctcacactctttccattttctggagaaaccgtgttcatgagcatggagaatccaggcctttggatcttgggttgccacaacagtgattttcgcaatcggggaatgactgctctcctcaaagtcagcagctgtgattggaacacaggcgactattacgaagattcttacgaggacataagtgcctactttgactccaagaataacgccattgagcccagatcattctcccagaatcctcccgtgcttaaaaggcatcagcgcgaaggtaccagaactactcttcagtctgatcaagaggagattgactatgacgacaccattagcgtggaaatgaagaaggaggatttcgatatctatgacgaagatgagaaccagtctccgcggagctttcagaagaagacgcgacactacttcattgcagcagtcgaaaggctttgggactacggtatgtcatcatcccctcatgtgttgcgcaatagagctcagagtggaagtgttccacagttcaagaaagtcgtctttcaagagtttacagatggcagcttcacacagcctctctatcggggcgagcttaacgaacatttgggactccttggtccctatatccgagccgaagtggaggacaacattatggttacctttaggaatcaagcctctcgcccctacagcttctactcctccctcatcagttatgaggaggatcagagacaaggcgctgaaccacggaagaactttgtgaaaccgaatgagacgaagacctacttctggaaagtacagcaccacatggcccccacaaaagacgaattcgattgcaaagcatgggcgtatttttcagacgttgacttggagaaagatgtacattcaggacttattggtcctttgttggtgtgtcacactaacactctcaatccagcccatggcaggcaggtgacagtccaggaattcgctcttttctttaccatctttgatgagaccaagtcctggtacttcacggaaaacatggagcgcaattgcagagccccctgtaacatacagatggaggaccctacctttaaggaaaattatcggttccacgcaatcaacggatacattatggatacactccctggccttgtgatggctcaggaccaacgaatcaggtggtacctcctcagcatgggttctaatgagaacatacactccattcacttttcaggacatgtgttcactgtccggaagaaagaagagtataagatggccctctacaatttgtatccaggcgtgtttgagaccgttgaaatgcttccctctaaagctggcatctggagagtagagtgcttgatcggagaacatcttcacgcaggtatgagcaccttgttcctcgtgtacagcaacaaatgtcagaatccacttggcatggccagtggacacattcgcgactttcagatcacagcatctggccagtatggacaatgggccccaaagttggctcgcctccattactccggtagcataaatgcgtggtccactaaagaacctttcagctggattaaggtcgatcttcttgcccccatgatcatccacggcattaagacacagggagcgaggcagaaattctcctccctctacatctcacagttcattattatgtatagtttggacggcaagaagtggcaaacttatagaggtaacagtactggaacagacatggtgttcttcggcaacgttgatagctctggcatcaaacacaacatctttaatcctcccataatagctcggtacatcagattgcatccgacccactacagcattaggagtacactccgaatggagcttatgggttgcgacttgaattcctgttcaatgccactcggaatggagtctaaagccatctctgatgcacagataaccgccagtagctactttacgaacatgtttgctacgtggtcaccctctaaggcaaggcttcatttgcaaggccggtctaatgcctggagacctcaggtgaacaacccgaaagaatggctccaggtggactttcagaagaccatgaaagtaacaggtgtcactactcagggagttaagtccttggatactagcatgtatgtgaaggagttccttatttcctcatcacaagatggccaccagtggaccctcttctttcagaatggtaaggtcaaagtgtttcagggcaatcaagacagcttcacacccgtggtgaacagtcttgatcctccactcttgacacgataccttcgaatccatccacagtcttgggagcaccagattgcattgcgcatggaagtacttggatgcgaggctcaggacctctac

SEQ ID NO: 2006 - protein, 1457 aa, synthetic construct
  REGION 1..1457: note = Variant of human B-domain deleted Factor VIII
MQIELSTCFFLCLLRFCFSATRRYYLGAVELSWDYMQSDLGELPVDARFPPRVPKSFPFNTSQVYKKTLFVEFTDHLFNIAKPRPPWMGLLGPTIQAEVYDTVVITLKNMASHPVSLHAVGVSYWKASEGAEYDDQTSQREKEDDKVFPGGSHTYVWQVLKENGPMASDPPCLTYSYLSHVDLVKDLNSGLIGALLVCREGSLAKEKTQTLAKFILLFAVFDEGKSWHSETKNSLMQDRDAASARAWPKMHTVNGYVNRTLPGLIGCHRKSVYWHVIGMGTTPEVHSIFLEGHTFLVRNHRQASLGISPITFLTAQTLLRDLGQFLLFCHIPSHQHDGMEAYVKVDSCPEEPQLRMKNNEEAEDYDDDLTDSEMDVVRFDDDNSPSIIQARSGAKKHPKTWVHYIAAEEEDWDYAPLVLAPDDRSYKSQYLNNGPQRIGRKYKKVRFMAYTDETFKTREAIQHESGILGPLLYGEVGDTLLIIFKNQASRPYNIYPHGITDVRPLYSRRLPKGVKHLKDFPILPGEIFKYKWTITVEDGPTKSDPRCLTRYYSSFVNWERDLASGLIGPLLICYKESVDQRGNQIMSDKRNVILFSVFDENRSWYLTENHQRFLPNPAGVQLEDPEFQASNIMHSINGYVFDSLQLSVCLHEVAYWYILSIGAQTDFLSVFFSGYTFKHKGVYEDTLTLFPFSGETVFMSMENPGLWILGCHNSDFRNRGMTALLKVSSCDWNTGDYYEDSYEDISAYFDSKNNAIEPRSFSQNPPVLKRHQREGTRTTLQSDQEEIDYDDTISVEMKKEDFDIYDEDENQSPRSFQKKTRHYFIAAVERLWDYGMSSSPHVLRNRAQSGSVPQFKKVVFQEFTDGSFTQPLYRGELNEHLGLLGPYIRAEVEDNIMVTFRNQASRPYSFYSSLISYEEDQRQGAEPRKNFVKPNETKTYFWKVQHHMAPTKDEFDCKAWAYFSDVDLEKDVHSGLIGPLLVCHTNTLNPAHGRQVTVQEFALFFTIFDETKSWYFTENMERNCRAPCNIQMEDPTFKENYRFHAINGYIMDTLPGLVMAQDQRIRWYLLSMGSNENIHSIHFSGHVFTVRKKEEYKMALYNLYPGVFETVEMLPSKAGIWRVECLIGEHLHAGMSTLFLVYSNKCQNPLGMASGHIRDFQITASGQYGQWAPKLARLHYSGSINAWSTKEPFSWIKVDLLAPMIIHGIKTQGARQKFSSLYISQFIIMYSLDGKKWQTYRGNSTGTDMVFFGNVDSSGIKHNIFNPPIIARYIRLHPTHYSIRSTLRMELMGCDLNSCSMPLGMESKAISDAQITASSYFTNMFATWSPSKARLHLQGRSNAWRPQVNNPKEWLQVDFQKTMKVTGVTTQGVKSLDTSMYVKEFLISSSQDGHQWTLFFQNGKVKVFQGNQDSFTPVVNSLDPPLLTRYLRIHPQSWEHQIALRMEVLGCEAQDLY

SEQ ID NO: 2007 - DNA, 4371 bp, synthetic construct
  misc_feature 1..4371: note = Variant of human B-domain deleted Factor VIII
  source 1..4371: mol_type = other DNA
atgcagattgaactgtctacctgcttcttcctctgtttgctgaggttctgctttagcgccactagacggtactaccttggcgctgtggagctgtcctgggactatatgcagagtgatttgggagagcttcccgtcgacgcacgatttcctcctcgcgttccaaagtcatttccctttaacacaagccaggtgtacaagaagacgctcttcgtcgaattcaccgatcacctgttcaatatcgccaaacccagaccaccatggatgggtcttttggggcctaccatacaagcggaggtgtatgacacagttgttatcactctcaagaacatggcttctcatccggtaagtcttcacgcagtgggcgtgtcctactggaaagcttcagaaggagccgagtatgatgatcagacatcccagagggagaaagaagacgacaaggtatttccaggtgggtctcatacctatgtgtggcaagtgctcaaagagaatggccctatggcaagcgatccgccgtgtttgacttacagctacctttcacacgttgacctcgtcaaggacctcaactccgggttgattggagccttgttggtatgcagggaaggatctcttgccaaagagaagacacagaccctggccaagtttatccttctctttgctgtgttcgatgagggcaaaagttggcatagcgaaacgaagaattccctcatgcaggatcgcgacgcagccagcgccagagcttggcccaagatgcacactgtgaacggatatgtcaataggacgcttcctggcttgattgggtgtcatcggaaaagtgtctactggcacgtgatcggaatggggacaacaccagaggtccactccatatttctcgaaggccataccttccttgttcgaaaccacagacaggcatccttggggatctctcccattacctttctcactgcccaaacgctccttcgtgacttgggtcagttccttctcttttgccatatcccgtcacaccagcatgatggtatggaagcttatgtgaaagtcgacagttgtcctgaggagccacagttgcgcatgaagaataatgaagaagccgaggattacgacgacgatctcaccgattctgagatggacgtggtgaggtttgatgacgacaactctccctccatcattcaagctcggagcggggcgaagaaacaccccaagacttgggtccactatatagcggcggaagaggaggattgggattacgctcctcttgtattggcaccagatgaccgctcatacaaaagccagtacctcaacaacggaccgcagagaattggccggaagtataagaaagtgcgatttatggcctatacagacgaaacctttaagacaagggaggccatccagcatgagagtgggattttgggacctcttctttacggcgaagttggtgataccctcctcatcatcttcaagaatcaagcttctcgcccctataacatttacccacacgggatcactgacgttaggcctttgtatagcagaagacttcccaaaggcgtgaagcatctcaaagacttccccattttgccaggcgagatctttaagtacaaatggaccattacagtggaagatggaccgactaaatcagaccctcgatgccttacgcggtactattcctccttcgtgaattgggagagagatttggcaagcggactcataggaccactcctcatctgttacaaggaatctgtagaccagaggggtaaccagattatgagtgataaacgcaatgtgatcctttttagcgtcttcgacgagaaccggtcctggtacttgaccgagaatatagataggttccttcccaaccccgcaggcgttcagttggaagaccctgagtttcaggccagcaatattatgcactcaatcaacggctatgtgtttgatagtctccagctttctgtttgcctccatgaagtagcctattggtacatcttgtcaattggtgctcaaacagacttcctctccgtcttcttctccggctacacctttaagcacaagggcgtgtatgaggacactctcacactctttccattttctggagaaaccgtgttcatgagcatggagaatccaggcctttggatcttgggttgccacaacagtgattttcgcaatcggggaatgactgctctcctcaaagtcagcagctgtgattggaacacaggcgactattacgaagattcttacgaggacataagtgcctactttgactccaagaataacgccattgagcccagatcattctcccagaatcctcccgtgcttaaaaggcatcagcgcgaaggtaccagaactactcttcagtctgatcaagaggagattgactatgacgacaccattagcgtggaaatgaagaaggaggatttcgatatctatgacgaagatgagaaccagtctccgcggagctttcagaagaagacgcgacactacttcattgcagcagtcgaaaggctttgggactacggtatgtcatcatcccctcatgtgttgcgcaatagagctcagagtggaagtgttccacagttcaagaaagtcgtctttcaagagtttacagatggcagcttcacacagcctctctatcggggcgagcttaacgaacatttgggactccttggtccctatatccgagccgaagtggaggacaacattatggttacctttaggaatcaagcctctcgcccctacagcttctactcctccctcatcagttatgaggaggatcagagacaaggcgctgaaccacggaagaactttgtgaaaccgaatgagacgaagacctacttctggaaagtacagcaccacatggcccccacaaaagacgaattcgattgcaaagcatgggcgtatttttcagacgttgacttggagaaagatgtacattcaggacttattggtcctttgttggtgtgtcacactaacactctcaatccagcccatggcaggcaggtgacagtccaggaattcgctcttttctttaccatctttgatgagaccaagtcctggtacttcacggaaaacatggagcgcaattgcagagccccctgtaacatacagatggaggaccctacctttaaggaaaattatcggttccacgcaatcaacggatacattatggatacactccctggccttgtgatggctcaggaccaacgaatcaggtggtacctcctcagcatgggttctaatgagaacatacactccattcacttttcaggacatgtgttcactgtccggaagaaagaagagtataagatggccctctacaatttgtatccaggcgtgtttgagaccgttgaaatgcttccctctaaagctggcatctggagagtagagtgcttgatcggagaacatcttcacgcaggtatgagcaccttgttcctcgtgtacagcaacaaatgtcagaatccacttggcatggccagtggacacattcgcgactttcagatcacagcatctggccagtatggacaatgggccccaaagttggctcgcctccattactccggtagcataaatgcgtggtccactaaagaacctttcagctggattaaggtcgatcttcttgcccccatgatcatccacggcattaagacacagggagcgaggcagaaattctcctccctctacatctcacagttcattattatgtatagtttggacggcaagaagtggcaaacttatagaggtaacagtactggaacagacatggtgttcttcggcaacgttgatagctctggcatcaaacacaacatctttaatcctcccataatagctcggtacatcagattgcatccgacccactacagcattaggagtacactccgaatggagcttatgggttgcgacttgaattcctgttcaatgccactcggaatggagtctaaagccatctctgatgcacagataaccgccagtagctactttacgaacatgtttgctacgtggtcaccctctaaggcaaggcttcatttgcaaggccggtctaatgcctggagacctcaggtgaacaacccgaaagaatggctccaggtggactttcagaagaccatgaaagtaacaggtgtcactactcagggagttaagtccttggatactagcatgtatgtgaaggagttccttatttcctcatcacaagatggccaccagtggaccctcttctttcagaatggtaaggtcaaagtgtttcagggcaatcaagacagcttcacacccgtggtgaacagtcttgatcctccactcttgacacgataccttcgaatccatccacagtcttgggagcaccagattgcattgcgcatggaagtacttggatgcgaggctcaggacctctac

SEQ ID NO: 2008 - protein, 1457 aa, synthetic construct
  REGION 1..1457: note = Variant of human B-domain deleted Factor VIII
MQIELSTCFFLCLLRFCFSATRRYYLGAVELSWDYMQSDLGELPVDARFPPRVPKSFPFNTSQVYKKTLFVEFTDHLFNIAKPRPPWMGLLGPTIQAEVYDTVVITLKNMASHPVSLHAVGVSYWKASEGAEYDDQTSQREKEDDKVFPGGSHTYVWQVLKENGPMASDPPCLTYSYLSHVDLVKDLNSGLIGALLVCREGSLAKEKTQTLAKFILLFAVFDEGKSWHSETKNSLMQDRDAASARAWPKMHTVNGYVNRTLPGLIGCHRKSVYWHVIGMGTTPEVHSIFLEGHTFLVRNHRQASLGISPITFLTAQTLLRDLGQFLLFCHIPSHQHDGMEAYVKVDSCPEEPQLRMKNNEEAEDYDDDLTDSEMDVVRFDDDNSPSIIQARSGAKKHPKTWVHYIAAEEEDWDYAPLVLAPDDRSYKSQYLNNGPQRIGRKYKKVRFMAYTDETFKTREAIQHESGILGPLLYGEVGDTLLIIFKNQASRPYNIYPHGITDVRPLYSRRLPKGVKHLKDFPILPGEIFKYKWTITVEDGPTKSDPRCLTRYYSSFVNWERDLASGLIGPLLICYKESVDQRGNQIMSDKRNVILFSVFDENRSWYLTENIDRFLPNPAGVQLEDPEFQASNIMHSINGYVFDSLQLSVCLHEVAYWYILSIGAQTDFLSVFFSGYTFKHKGVYEDTLTLFPFSGETVFMSMENPGLWILGCHNSDFRNRGMTALLKVSSCDWNTGDYYEDSYEDISAYFDSKNNAIEPRSFSQNPPVLKRHQREGTRTTLQSDQEEIDYDDTISVEMKKEDFDIYDEDENQSPRSFQKKTRHYFIAAVERLWDYGMSSSPHVLRNRAQSGSVPQFKKVVFQEFTDGSFTQPLYRGELNEHLGLLGPYIRAEVEDNIMVTFRNQASRPYSFYSSLISYEEDQRQGAEPRKNFVKPNETKTYFWKVQHHMAPTKDEFDCKAWAYFSDVDLEKDVHSGLIGPLLVCHTNTLNPAHGRQVTVQEFALFFTIFDETKSWYFTENMERNCRAPCNIQMEDPTFKENYRFHAINGYIMDTLPGLVMAQDQRIRWYLLSMGSNENIHSIHFSGHVFTVRKKEEYKMALYNLYPGVFETVEMLPSKAGIWRVECLIGEHLHAGMSTLFLVYSNKCQNPLGMASGHIRDFQITASGQYGQWAPKLARLHYSGSINAWSTKEPFSWIKVDLLAPMIIHGIKTQGARQKFSSLYISQFIIMYSLDGKKWQTYRGNSTGTDMVFFGNVDSSGIKHNIFNPPIIARYIRLHPTHYSIRSTLRMELMGCDLNSCSMPLGMESKAISDAQITASSYFTNMFATWSPSKARLHLQGRSNAWRPQVNNPKEWLQVDFQKTMKVTGVTTQGVKSLDTSMYVKEFLISSSQDGHQWTLFFQNGKVKVFQGNQDSFTPVVNSLDPPLLTRYLRIHPQSWEHQIALRMEVLGCEAQDLY

SEQ ID NO: 2009 - DNA, 4371 bp, synthetic construct
  misc_feature 1..4371: note = Variant of human B-domain deleted Factor VIII
  source 1..4371: mol_type = other DNA
atgcagattgaactgtctacctgcttcttcctctgtttgctgaggttctgctttagcgccactagacggtactaccttggcgctgtggagctgtcctgggactatatgcagagtgatttgggagagcttcccgtcgacgcacgatttcctcctcgcgttccaaagtcatttccctttaacacaagccaggtgtacaagaagacgctcttcgtcgaattcaccgatcacctgttcaatatcgccaaacccagaccaccatggatgggtcttttggggcctaccatacaagcggaggtgtatgacacagttgttatcactctcaagaacatggcttctcatccggtaagtcttcacgcagtgggcgtgtcctactggaaagcttcagaaggagccgagtatgatgatcagacatcccagagggagaaagaagacgacaaggtatttccaggtgggtctcatacctatgtgtggcaagtgctcaaagagaatggccctatggcaagcgatccgccgtgtttgacttacagctacctttcacacgttgacctcgtcaaggacctcaactccgggttgattggagccttgttggtatgcagggaaggatctcttgccaaagagaagacacagaccctggccaagtttatccttctctttgctgtgttcgatgagggcaaaagttggcatagcgaaacgaagaattccctcatgcaggatcgcgacgcagccagcgccagagcttggcccaagatgcacactgtgaacggatatgtcaataggacgcttcctggcttgattgggtgtcatcggaaaagtgtctactggcacgtgatcggaatggggacaacaccagaggtccactccatatttctcgaaggccataccttccttgttcgaaaccacagacaggcatccttggggatctctcccattacctttctcactgcccaaacgctccttcgtgacttgggtcagttccttctcttttgccatatcccgtcacaccagcatgatggtatggaagcttatgtgaaagtcgacagttgtcctgaggagccacagttgcgcatgaagaataatgaagaagccgaggattacgacgacgatctcaccgattctgagatggacgtggtgaggtttgatgacgacaactctccctccatcattcaagctcggagcggggcgaagaaacaccccaagacttgggtccactatatagcggcggaagaggaggattgggattacgctcctcttgtattggcaccagatgaccgctcatacaaaagccagtacctcaacaacggaccgcagagaattggccggaagtataagaaagtgcgatttatggcctatacagacgaaacctttaagacaagggaggccatccagcatgagagtgggattttgggacctcttctttacggcgaagttggtgataccctcctcatcatcttcaagaatcaagcttctcgcccctataacatttacccacacgggatcactgacgttaggcctttgtatagcagaagacttcccaaaggcgtgaagcatctcaaagacttccccattttgccaggcgagatctttaagtacaaatggaccattacagtggaagatggaccgactaaatcagaccctcgatgccttacgcggtactattcctccttcgtgaattgggagagagatttggcaagcggactcataggaccactcctcatctgttacaaggaatctgtagaccagaggggtaaccagattatgagtgataaacgcaatgtgatcctttttagcgtcttcgacgagaaccggtcctggtacttgaccgagaatatacaaaggttccttcccaaccccgcaggcgttcagttggaagaccctgagtttcaggccagcaatattatgcactcaatcaacggctatgtgtttgatagtctccagctttctgtttgcctccatgaagtagcctattggtacatcttgtcaattggtgctcaaacagacttcctctccgtcttcttctccggctacacctttaagcacaagggcgtgtatgaggacactctcacactctttccattttctggagaaaccgtgttcatgagcatggagaatccaggcctttggatcttgggttgccacaacagtgattttcgcaatcggggaatgactgctctcctcaaagtcagcagctgtgattggaacacaggcgactattacgaagattcttacgaggacataagtgcctactttgactccaagaataacgccattgagcccagatcattctcccagaatcctcccgtgcttaaaaggcatcagcgcgaaggtaccagaactactcttcagtctgatcaagaggagattgactatgacgacaccattagcgtggaaatgaagaaggaggatttcgatatctatgacgaagatgagaaccagtctccgcggagctttcagaagaagacgcgacactacttcattgcagcagtcgaaaggctttgggactacggtatgtcatcatcccctcatgtgttgcgcaatagagctcagagtggaagtgttccacagttcaagaaagtcgtctttcaagagtttacagatggcagcttcacacagcctctctatcggggcgagcttaacgaacatttgggactccttggtccctatatccgagccgaagtggaggacaacattatggttacctttaggaatcaagcctctcgcccctacagcttctactcctccctcatcagttatgaggaggatcagagacaaggcgctgaaccacggaagaactttgtgaaaccgaatgagacgaagacctacttctggaaagtacagcaccacatggcccccacaaaagacgaattcgattgcaaagcatgggcgtatttttcagacgttgacttggagaaagatgtacattcaggacttattggtcctttgttggtgtgtcacactaacactctcaatccagcccatggcaggcaggtgacagtccaggaattcgctcttttctttaccatctttgatgagaccaagtcctggtacttcacggaaaacatggagcgcaattgcagagccccctgtaacatacagatggaggaccctacctttaaggaaaattatacgttccacgcaatcaacggatacattatggatacactccctggccttgtgatggctcaggaccaacgaatcaggtggtacctcctcagcatgggttctaatgagaacatacactccattcacttttcaggacatgtgttcactgtccggaagaaagaagagtataagatggccctctacaatttgtatccaggcgtgtttgagaccgttgaaatgcttccctctaaagctggcatctggagagtagagtgcttgatcggagaacatcttcacgcaggtatgagcaccttgttcctcgtgtacagcaacaaatgtcagaatccacttggcatggccagtggacacattcgcgactttcagatcacagcatctggccagtatggacaatgggccccaaagttggctcgcctccattactccggtagcataaatgcgtggtccactaaagaacctttcagctggattaaggtcgatcttcttgcccccatgatcatccacggcattaagacacagggagcgaggcagaaattctcctccctctacatctcacagttcattattatgtatagtttggacggcaagaagtggcaaacttatagaggtaacagtactggaacagacatggtgttcttcggcaacgttgatagctctggcatcaaacacaacatctttaatcctcccataatagctcggtacatcagattgcatccgacccactacagcattaggagtacactccgaatggagcttatgggttgcgacttgaattcctgttcaatgccactcggaatggagtctaaagccatctctgatgcacagataaccgccagtagctactttacgaacatgtttgctacgtggtcaccctctaaggcaaggcttcatttgcaaggccggtctaatgcctggagacctcaggtgaacaacccgaaagaatggctccaggtggactttcagaagaccatgaaagtaacaggtgtcactactcagggagttaagtccttggatactagcatgtatgtgaaggagttccttatttcctcatcacaagatggccaccagtggaccctcttctttcagaatggtaaggtcaaagtgtttcagggcaatcaagacagcttcacacccgtggtgaacagtcttgatcctccactcttgacacgataccttcgaatccatccacagtcttgggagcaccagattgcattgcgcatggaagtacttggatgcgaggctcaggacctctac

SEQ ID NO: 2010 - protein, 1457 aa, synthetic construct
  REGION 1..1457: note = Variant of human B-domain deleted Factor VIII
MQIELSTCFFLCLLRFCFSATRRYYLGAVELSWDYMQSDLGELPVDARFPPRVPKSFPFNTSQVYKKTLFVEFTDHLFNIAKPRPPWMGLLGPTIQAEVYDTVVITLKNMASHPVSLHAVGVSYWKASEGAEYDDQTSQREKEDDKVFPGGSHTYVWQVLKENGPMASDPPCLTYSYLSHVDLVKDLNSGLIGALLVCREGSLAKEKTQTLAKFILLFAVFDEGKSWHSETKNSLMQDRDAASARAWPKMHTVNGYVNRTLPGLIGCHRKSVYWHVIGMGTTPEVHSIFLEGHTFLVRNHRQASLGISPITFLTAQTLLRDLGQFLLFCHIPSHQHDGMEAYVKVDSCPEEPQLRMKNNEEAEDYDDDLTDSEMDVVRFDDDNSPSIIQARSGAKKHPKTWVHYIAAEEEDWDYAPLVLAPDDRSYKSQYLNNGPQRIGRKYKKVRFMAYTDETFKTREAIQHESGILGPLLYGEVGDTLLIIFKNQASRPYNIYPHGITDVRPLYSRRLPKGVKHLKDFPILPGEIFKYKWTITVEDGPTKSDPRCLTRYYSSFVNWERDLASGLIGPLLICYKESVDQRGNQIMSDKRNVILFSVFDENRSWYLTENIQRFLPNPAGVQLEDPEFQASNIMHSINGYVFDSLQLSVCLHEVAYWYILSIGAQTDFLSVFFSGYTFKHKGVYEDTLTLFPFSGETVFMSMENPGLWILGCHNSDFRNRGMTALLKVSSCDWNTGDYYEDSYEDISAYFDSKNNAIEPRSFSQNPPVLKRHQREGTRTTLQSDQEEIDYDDTISVEMKKEDFDIYDEDENQSPRSFQKKTRHYFIAAVERLWDYGMSSSPHVLRNRAQSGSVPQFKKVVFQEFTDGSFTQPLYRGELNEHLGLLGPYIRAEVEDNIMVTFRNQASRPYSFYSSLISYEEDQRQGAEPRKNFVKPNETKTYFWKVQHHMAPTKDEFDCKAWAYFSDVDLEKDVHSGLIGPLLVCHTNTLNPAHGRQVTVQEFALFFTIFDETKSWYFTENMERNCRAPCNIQMEDPTFKENYTFHAINGYIMDTLPGLVMAQDQRIRWYLLSMGSNENIHSIHFSGHVFTVRKKEEYKMALYNLYPGVFETVEMLPSKAGIWRVECLIGEHLHAGMSTLFLVYSNKCQNPLGMASGHIRDFQITASGQYGQWAPKLARLHYSGSINAWSTKEPFSWIKVDLLAPMIIHGIKTQGARQKFSSLYISQFIIMYSLDGKKWQTYRGNSTGTDMVFFGNVDSSGIKHNIFNPPIIARYIRLHPTHYSIRSTLRMELMGCDLNSCSMPLGMESKAISDAQITASSYFTNMFATWSPSKARLHLQGRSNAWRPQVNNPKEWLQVDFQKTMKVTGVTTQGVKSLDTSMYVKEFLISSSQDGHQWTLFFQNGKVKVFQGNQDSFTPVVNSLDPPLLTRYLRIHPQSWEHQIALRMEVLGCEAQDLY

SEQ ID NO: 2011 - DNA, 4371 bp, synthetic construct
  misc_feature 1..4371: note = Variant of human B-domain deleted Factor VIII
  source 1..4371: mol_type = other DNA
atgcagattgaactgtctacctgcttcttcctctgtttgctgaggttctgctttagcgccactagacggtactaccttggcgctgtggagctgtcctgggactatatgcagagtgatttgggagagcttcccgtcgacgcacgatttcctcctcgcgttccaaagtcatttccctttaacacaagccaggtgtacaagaagacgctcttcgtcgaattcaccgatcacctgttcaatatcgccaaacccagaccaccatggatgggtcttttggggcctaccatacaagcggaggtgtatgacacagttgttatcactctcaagaacatggcttctcatccggtaagtcttcacgcagtgggcgtgtcctactggaaagcttcagaaggagccgagtatgatgatcagacatcccagagggagaaagaagacgacaaggtatttccaggtgggtctcatacctatgtgtggcaagtgctcaaagagaatggccctatggcaagcgatccgccgtgtttgacttacagctacctttcacacgttgacctcgtcaaggacctcaactccgggttgattggagccttgttggtatgcagggaaggatctcttgccaaagagaagacacagaccctggccaagtttatccttctctttgctgtgttcgatgagggcaaaagttggcatagcgaaacgaagaattccctcatgcaggatcgcgacgcagccagcgccagagcttggcccaagatgcacactgtgaacggatatgtcaataggacgcttcctggcttgattgggtgtcatcggaaaagtgtctactggcacgtgatcggaatggggacaacaccagaggtccactccatatttctcgaaggccataccttccttgttcgaaaccacagacaggcatccttggggatctctcccattacctttctcactgcccaaacgctccttcgtgacttgggtcagttccttctcttttgccatatcccgtcacaccagcatgatggtatggaagcttatgtgaaagtcgacagttgtcctgaggagccacagttgcgcatgaagaataatgaagaagccgaggattacgacgacgatctcaccgattctgagatggacgtggtgaggtttgatgacgacaactctccctccatcattcaagctcggagcggggcgaagaaacaccccaagacttgggtccactatatagcggcggaagaggaggattgggattacgctcctcttgtattggcaccagatgaccgctcatacaaaagccagtacctcaacaacggaccgcagagaattggccggaagtataagaaagtgcgatttatggcctatacagacgaaacctttaagacaagggaggccatccagcatgagagtgggattttgggacctcttctttacggcgaagttggtgataccctcctcatcatcttcaagaatcaagcttctcgcccctataacatttacccacacgggatcactgacgttaggcctttgtatagcagaagacttcccaaaggcgtgaagcatctcaaagacttccccattttgccaggcgagatctttaagtacaaatggaccattacagtggaagatggaccgactaaatcagaccctcgatgccttacgcggtactattcctccttcgtgaattgggagagagatttggcaagcggactcataggaccactcctcatctgttacaaggaatctgtagaccagaggggtaaccagattatgagtgataaacgcaatgtgatcctttttagcgtcttcgacgagaaccggtcctggtacttgaccgagaatatacaaaggttccttccccagcccgcaggcgttcagttggaagaccctgagtttcaggccagcaatattatgcactcaatcaacggctatgtgtttgatagtctccagctttctgtttgcctccatgaagtagcctattggtacatcttgtcaattggtgctcaaacagacttcctctccgtcttcttctccggctacacctttaagcacaagggcgtgtatgaggacactctcacactctttccattttctggagaaaccgtgttcatgagcatggagaatccaggcctttggatcttgggttgccacaacagtgattttcgcaatcggggaatgactgctctcctcaaagtcagcagctgtgattggaacacaggcgactattacgaagattcttacgaggacataagtgcctactttgactccaagaataacgccattgagcccagatcattctcccagaatcctcccgtgcttaaaaggcatcagcgcgaaggtaccagaactactcttcagtctgatcaagaggagattgactatgacgacaccattagcgtggaaatgaagaaggaggatttcgatatctatgacgaagatgagaaccagtctccgcggagctttcagaagaagacgcgacactacttcattgcagcagtcgaaaggctttgggactacggtatgtcatcatcccctcatgtgttgcgcaatagagctcagagtggaagtgttccacagttcaagaaagtcgtctttcaagagtttacagatggcagcttcacacagcctctctatcggggcgagcttaacgaacatttgggactccttggtccctatatccgagccgaagtggaggacaacattatggttacctttaggaatcaagcctctcgcccctacagcttctactcctccctcatcagttatgaggaggatcagagacaaggcgctgaaccacggaagaactttgtgaaaccgaatgagacgaagacctacttctggaaagtacagcaccacatggcccccacaaaagacgaattcgattgcaaagcatgggcgtatttttcagacgttgacttggagaaagatgtacattcaggacttattggtcctttgttggtgtgtcacactaacactctcaatccagcccatggcaggcaggtgacagtccaggaattcgctcttttctttaccatctttgatgagaccaagtcctggtacttcacggaaaacatggagcgcaattgcagagccccctgtaacatacagatggaggaccctacctttaaggaaaattatcggttccacgcaatcaacggatacattatggatacactccctggccttgtgatggctcaggaccaacgaatcaggtggtacctcctcagcatgggttctaatgagaacatacactccattcacttttcaggacatgtgttcactgtccggaagaaagaagagtataagatggccctctacaatttgtatccaggcgtgtttgagaccgttgaaatgcttccctctaaagctggcatctggagagtagagtgcttgatcggagaacatcttcacgcaggtatgagcaccttgttcctcgtgtacagcaacaaatgtcagaatccacttggcatggccagtggacacattcgcgactttcagatcacagcatctggccagtatggacaatgggccccaaagttggctcgcctccattactccggtagcataaatgcgtggtccactaaagaacctttcagctggattaaggtcgatcttcttgcccccatgatcatccacggcattaagacacagggagcgaggcagaaattctcctccctctacatctcacagttcattattatgtatagtttggacggcaagaagtggcaaacttatagaggtaacagtactggaacagacatggtgttcttcggcaacgttgatagctctggcatcaaacacaacatctttaatcctcccataatagctcggtacatcagattgcatccgacccactacagcattaggagtacactccgaatggagcttatgggttgcgacttgaattcctgttcaatgccactcggaatggagtctaaagccatctctgatgcacagataaccgccagtagctactttacgaacatgtttgctacgtggtcaccctctaaggcaaggcttcatttgcaaggccggtctaatgcctggagacctcaggtgaacaacccgaaagaatggctccaggtggactttcagaagaccatgaaagtaacaggtgtcactactcagggagttaagtccttggatactagcatgtatgtgaaggagttccttatttcctcatcacaagatggccaccagtggaccctcttctttcagaatggtaaggtcaaagtgtttcagggcaatcaagacagcttcacacccgtggtgaacagtcttgatcctccactcttgacacgataccttcgaatccatccacagtcttgggagcaccagattgcattgcgcatggaagtacttggatgcgaggctcaggacctctac

SEQ ID NO: 2012 - protein, 1457 aa, synthetic construct
  REGION 1..1457: note = Variant of human B-domain deleted Factor VIII
MQIELSTCFFLCLLRFCFSATRRYYLGAVELSWDYMQSDLGELPVDARFPPRVPKSFPFNTSQVYKKTLFVEFTDHLFNIAKPRPPWMGLLGPTIQAEVYDTVVITLKNMASHPVSLHAVGVSYWKASEGAEYDDQTSQREKEDDKVFPGGSHTYVWQVLKENGPMASDPPCLTYSYLSHVDLVKDLNSGLIGALLVCREGSLAKEKTQTLAKFILLFAVFDEGKSWHSETKNSLMQDRDAASARAWPKMHTVNGYVNRTLPGLIGCHRKSVYWHVIGMGTTPEVHSIFLEGHTFLVRNHRQASLGISPITFLTAQTLLRDLGQFLLFCHIPSHQHDGMEAYVKVDSCPEEPQLRMKNNEEAEDYDDDLTDSEMDVVRFDDDNSPSIIQARSGAKKHPKTWVHYIAAEEEDWDYAPLVLAPDDRSYKSQYLNNGPQRIGRKYKKVRFMAYTDETFKTREAIQHESGILGPLLYGEVGDTLLIIFKNQASRPYNIYPHGITDVRPLYSRRLPKGVKHLKDFPILPGEIFKYKWTITVEDGPTKSDPRCLTRYYSSFVNWERDLASGLIGPLLICYKESVDQRGNQIMSDKRNVILFSVFDENRSWYLTENIQRFLPQPAGVQLEDPEFQASNIMHSINGYVFDSLQLSVCLHEVAYWYILSIGAQTDFLSVFFSGYTFKHKGVYEDTLTLFPFSGETVFMSMENPGLWILGCHNSDFRNRGMTALLKVSSCDWNTGDYYEDSYEDISAYFDSKNNAIEPRSFSQNPPVLKRHQREGTRTTLQSDQEEIDYDDTISVEMKKEDFDIYDEDENQSPRSFQKKTRHYFIAAVERLWDYGMSSSPHVLRNRAQSGSVPQFKKVVFQEFTDGSFTQPLYRGELNEHLGLLGPYIRAEVEDNIMVTFRNQASRPYSFYSSLISYEEDQRQGAEPRKNFVKPNETKTYFWKVQHHMAPTKDEFDCKAWAYFSDVDLEKDVHSGLIGPLLVCHTNTLNPAHGRQVTVQEFALFFTIFDETKSWYFTENMERNCRAPCNIQMEDPTFKENYRFHAINGYIMDTLPGLVMAQDQRIRWYLLSMGSNENIHSIHFSGHVFTVRKKEEYKMALYNLYPGVFETVEMLPSKAGIWRVECLIGEHLHAGMSTLFLVYSNKCQNPLGMASGHIRDFQITASGQYGQWAPKLARLHYSGSINAWSTKEPFSWIKVDLLAPMIIHGIKTQGARQKFSSLYISQFIIMYSLDGKKWQTYRGNSTGTDMVFFGNVDSSGIKHNIFNPPIIARYIRLHPTHYSIRSTLRMELMGCDLNSCSMPLGMESKAISDAQITASSYFTNMFATWSPSKARLHLQGRSNAWRPQVNNPKEWLQVDFQKTMKVTGVTTQGVKSLDTSMYVKEFLISSSQDGHQWTLFFQNGKVKVFQGNQDSFTPVVNSLDPPLLTRYLRIHPQSWEHQIALRMEVLGCEAQDLY

SEQ ID NO: 2013 - DNA, 4371 bp, synthetic construct
  misc_feature 1..4371: note = Variant of human B-domain deleted Factor VIII
  source 1..4371: mol_type = other DNA
atgcagattgaactgtctacctgcttcttcctctgtttgctgaggttctgctttagcgccactagacggtactaccttggcgctgtggagctgtcctgggactatatgcagagtgatttgggagagcttcccgtcgacgcacgatttcctcctcgcgttccaaagtcatttccctttaacacaagccaggtgtacaagaagacgctcttcgtcgaattcaccgatcacctgttcaatatcgccaaacccagaccaccatggatgggtcttttggggcctaccatacaagcggaggtgtatgacacagttgttatcactctcaagaacatggcttctcatccggtaagtcttcacgcagtgggcgtgtcctactggaaagcttcagaaggagccgagtatgatgatcagacatcccagagggagaaagaagacgacaaggtatttccaggtgggtctcatacctatgtgtggcaagtgctcaaagagaatggccctatggcaagcgatccgccgtgtttgacttacagctacctttcacacgttgacctcgtcaaggacctcaactccgggttgattggagccttgttggtatgcagggaaggatctcttgccaaagagaagacacagaccctggccaagtttatccttctctttgctgtgttcgatgagggcaaaagttggcatagcgaaacgaagaattccctcatgcaggatcgcgacgcagccagcgccagagcttggcccaagatgcacactgtgaacggatatgtcaataggacgcttcctggcttgattgggtgtcatcggaaaagtgtctactggcacgtgatcggaatggggacaacaccagaggtccactccatatttctcgaaggccataccttccttgttcgaaaccacagacaggcatccttggggatctctcccattacctttctcactgcccaaacgctccttcgtgacttgggtcagttccttctcttttgccatatcccgtcacaccagcatgatggtatggaagcttatgtgaaagtcgacagttgtcctgaggagccacagttgcgcatgaagaataatgaagaagccgaggattacgacgacgatctcaccgattctgagatggacgtggtgaggtttgatgacgacaactctccctccatcattcaagctcggagcggggcgaagaaacaccccaagacttgggtccactatatagcggcggaagaggaggattgggattacgctcctcttgtattggcaccagatgaccgctcatacaaaagccagtacctcaacaacggaccgcagagaattggccggaagtataagaaagtgcgatttatggcctatacagacgaaacctttaagacaagggaggccatccagcatgagagtgggattttgggacctcttctttacggcgaagttggtgataccctcctcatcatcttcaagaatcaagcttctcgcccctataacatttacccacacgggatcactgacgttaggcctttgtatagcagaagacttcccaaaggcgtgaagcatctcaaagacttccccattttgccaggcgagatctttaagtacaaatggaccattacagtggaagatggaccgactaaatcagaccctcgatgccttacgcggtactattcctccttcgtgaattgggagagagatttggcaagcggactcataggaccactcctcatctgttacaaggaatctgtagaccagaggggtaaccagattatgagtgataaacgcaatgtgatcctttttagcgtcttcgacgagaaccggtcctggtacttgaccgagaatatacaaaggttcaatcccaaccccgcaggcgttcagttggaagaccctgagtttcaggccagcaatattatgcactcaatcaacggctatgtgtttgatagtctccagctttctgtttgcctccatgaagtagcctattggtacatcttgtcaattggtgctcaaacagacttcctctccgtcttcttctccggctacacctttaagcacaagggcgtgtatgaggacactctcacactctttccattttctggagaaaccgtgttcatgagcatggagaatccaggcctttggatcttgggttgccacaacagtgattttcgcaatcggggaatgactgctctcctcaaagtcagcagctgtgattggaacacaggcgactattacgaagattcttacgaggacataagtgcctactttgactccaagaataacgccattgagcccagatcattctcccagaatcctcccgtgcttaaaaggcatcagcgcgaaggtaccagaactactcttcagtctgatcaagaggagattgactatgacgacaccattagcgtggaaatgaagaaggaggatttcgatatctatgacgaagatgagaaccagtctccgcggagctttcagaagaagacgcgacactacttcattgcagcagtcgaaaggctttgggactacggtatgtcatcatcccctcatgtgttgcgcaatagagctcagagtggaagtgttccacagttcaagaaagtcgtctttcaagagtttacagatggcagcttcacacagcctctctatcggggcgagcttaacgaacatttgggactccttggtccctatatccgagccgaagtggaggacaacattatggttacctttaggaatcaagcctctcgcccctacagcttctactcctccctcatcagttatgaggaggatcagagacaaggcgctgaaccacggaagaactttgtgaaaccgaatgagacgaagacctacttctggaaagtacagcaccacatggcccccacaaaagacgaattcgattgcaaagcatgggcgtatttttcagacgttgacttggagaaagatgtacattcaggacttattggtcctttgttggtgtgtcacactaacactctcaatccagcccatggcaggcaggtgacagtccaggaattcgctcttttctttaccatctttgatgagaccaagtcctggtacttcacggaaaacatggagcgcaattgcagagccccctgtaacatacagatggaggaccctacctttaaggaaaattatcggttccacgcaatcaacggatacattatggatacactccctggccttgtgatggctcaggaccaacgaatcaggtggtacctcctcagcatgggttctaatgagaacatacactccattcacttttcaggacatgtgttcactgtccggaagaaagaagagtataagatggccctctacaatttgtatccaggcgtgtttgagaccgttgaaatgcttccctctaaagctggcatctggagagtagagtgcttgatcggagaacatcttcacgcaggtatgagcaccttgttcctcgtgtacagcaacaaatgtcagaatccacttggcatggccagtggacacattcgcgactttcagatcacagcatctggccagtatggacaatgggccccaaagttggctcgcctccattactccggtagcataaatgcgtggtccactaaagaacctttcagctggattaaggtcgatcttcttgcccccatgatcatccacggcattaagacacagggagcgaggcagaaattctcctccctctacatctcacagttcattattatgtatagtttggacggcaagaagtggcaaacttatagaggtaacagtactggaacagacatggtgttcttcggcaacgttgatagctctggcatcaaacacaacatctttaatcctcccataatagctcggtacatcagattgcatccgacccactacagcattaggagtacactccgaatggagcttatgggttgcgacttgaattcctgttcaatgccactcggaatggagtctaaagccatctctgatgcacagataaccgccagtagctactttacgaacatgtttgctacgtggtcaccctctaaggcaaggcttcatttgcaaggccggtctaatgcctggagacctcaggtgaacaacccgaaagaatggctccaggtggactttcagaagaccatgaaagtaacaggtgtcactactcagggagttaagtccttggatactagcatgtatgtgaaggagttccttatttcctcatcacaagatggccaccagtggaccctcttctttcagaatggtaaggtcaaagtgtttcagggcaatcaagacagcttcacacccgtggtgaacagtcttgatcctccactcttgacacgataccttcgaatccatccacagtcttgggagcaccagattgcattgcgcatggaagtacttggatgcgaggctcaggacctctac

SEQ ID NO: 2014 - protein, 1457 aa, synthetic construct
  REGION 1..1457: note = Variant of human B-domain deleted Factor VIII
MQIELSTCFFLCLLRFCFSATRRYYLGAVELSWDYMQSDLGELPVDARFPPRVPKSFPFNTSQVYKKTLFVEFTDHLFNIAKPRPPWMGLLGPTIQAEVYDTVVITLKNMASHPVSLHAVGVSYWKASEGAEYDDQTSQREKEDDKVFPGGSHTYVWQVLKENGPMASDPPCLTYSYLSHVDLVKDLNSGLIGALLVCREGSLAKEKTQTLAKFILLFAVFDEGKSWHSETKNSLMQDRDAASARAWPKMHTVNGYVNRTLPGLIGCHRKSVYWHVIGMGTTPEVHSIFLEGHTFLVRNHRQASLGISPITFLTAQTLLRDLGQFLLFCHIPSHQHDGMEAYVKVDSCPEEPQLRMKNNEEAEDYDDDLTDSEMDVVRFDDDNSPSIIQARSGAKKHPKTWVHYIAAEEEDWDYAPLVLAPDDRSYKSQYLNNGPQRIGRKYKKVRFMAYTDETFKTREAIQHESGILGPLLYGEVGDTLLIIFKNQASRPYNIYPHGITDVRPLYSRRLPKGVKHLKDFPILPGEIFKYKWTITVEDGPTKSDPRCLTRYYSSFVNWERDLASGLIGPLLICYKESVDQRGNQIMSDKRNVILFSVFDENRSWYLTENIQRFNPNPAGVQLEDPEFQASNIMHSINGYVFDSLQLSVCLHEVAYWYILSIGAQTDFLSVFFSGYTFKHKGVYEDTLTLFPFSGETVFMSMENPGLWILGCHNSDFRNRGMTALLKVSSCDWNTGDYYEDSYEDISAYFDSKNNAIEPRSFSQNPPVLKRHQREGTRTTLQSDQEEIDYDDTISVEMKKEDFDIYDEDENQSPRSFQKKTRHYFIAAVERLWDYGMSSSPHVLRNRAQSGSVPQFKKVVFQEFTDGSFTQPLYRGELNEHLGLLGPYIRAEVEDNIMVTFRNQASRPYSFYSSLISYEEDQRQGAEPRKNFVKPNETKTYFWKVQHHMAPTKDEFDCKAWAYFSDVDLEKDVHSGLIGPLLVCHTNTLNPAHGRQVTVQEFALFFTIFDETKSWYFTENMERNCRAPCNIQMEDPTFKENYRFHAINGYIMDTLPGLVMAQDQRIRWYLLSMGSNENIHSIHFSGHVFTVRKKEEYKMALYNLYPGVFETVEMLPSKAGIWRVECLIGEHLHAGMSTLFLVYSNKCQNPLGMASGHIRDFQITASGQYGQWAPKLARLHYSGSINAWSTKEPFSWIKVDLLAPMIIHGIKTQGARQKFSSLYISQFIIMYSLDGKKWQTYRGNSTGTDMVFFGNVDSSGIKHNIFNPPIIARYIRLHPTHYSIRSTLRMELMGCDLNSCSMPLGMESKAISDAQITASSYFTNMFATWSPSKARLHLQGRSNAWRPQVNNPKEWLQVDFQKTMKVTGVTTQGVKSLDTSMYVKEFLISSSQDGHQWTLFFQNGKVKVFQGNQDSFTPVVNSLDPPLLTRYLRIHPQSWEHQIALRMEVLGCEAQDLY

SEQ ID NO: 2015 - DNA, 4371 bp, synthetic construct
  misc_feature 1..4371: note = Variant of human B-domain deleted Factor VIII
  source 1..4371: mol_type = other DNA
atgcagattgaactgtctacctgcttcttcctctgtttgctgaggttctgctttagcgccactagacggtactaccttggcgctgtggagctgtcctgggactatatgcagagtgatttgggagagcttcccgtcgacgcacgatttcctcctcgcgttccaaagtcatttccctttaacacaagccaggtgtacaagaagacgctcttcgtcgaattcaccgatcacctgttcaatatcgccaaacccagaccaccatggatgggtcttttggggcctaccatacaagcggaggtgtatgacacagttgttatcactctcaagaacatggcttctcatccggtaagtcttcacgcagtgggcgtgtcctactggaaagcttcagaaggagccgagtatgatgatcagacatcccagagggagaaagaagacgacaaggtatttccaggtgggtctcatacctatgtgtggcaagtgctcaaagagaatggccctatggcaagcgatccgccgtgtttgacttacagctacctttcacacgttgacctcgtcaaggacctcaactccgggttgattggagccttgttggtatgcagggaaggatctcttgccaaagagaagacacagaccctggccaagtttatccttctctttgctgtgttcgatgagggcaaaagttggcatagcgaaacgaagaattccctcatgcaggatcgcgacgcagccagcgccagagcttggcccaagatgcacactgtgaacggatatgtcaataggacgcttcctggcttgattgggtgtcatcggaaaagtgtctactggcacgtgatcggaatggggacaacaccagaggtccactccatatttctcgaaggccataccttccttgttcgaaaccacagacaggcatccttggggatctctcccattacctttctcactgcccaaacgctccttcgtgacttgggtcagttccttctcttttgccatatcccgtcacaccagcatgatggtatggaagcttatgtgaaagtcgacagttgtcctgaggagccacagttgcgcatgaagaataatgaagaagccgaggattacgacgacgatctcgccgattctgagatggacgtggtgaggtttgatgacgacaactctccctccatcattcaagctcggagcggggcgaagaaacaccccaagacttgggtccactatatagcggcggaagaggaggattgggattacgctcctcttgtattggcaccagatgaccgctcatacaaaagccagtacctcaacaacggaccgcagagaattggccggaagtataagaaagtgcgatttatggcctatacagacgaaacctttaagacaagggaggccatccagcatgagagtgggattttgggacctcttctttacggcgaagttggtgataccctcctcatcatcttcaagaatcaagcttctcgcccctataacatttacccacacgggatcactgacgttaggcctttgtatagcagaagacttcccaaaggcgtgaagcatctcaaagacttccccattttgccaggcgagatctttaagtacaaatggaccattacagtggaagatggaccgactaaatcagaccctcgatgccttacgcggtactattcctccttcgtgaattgggagagagatttggcaagcggactcataggaccactcctcatctgttacaaggaatctgtagaccagaggggtaaccagattatgagtgataaacgcaatgtgatcctttttagcgtcttcgacgagaaccggtcctggtacttgaccgagaatatacaaaggttcgcgcccaaccccgcaggcgttcagttggaagaccctgagtttcaggccagcaatattatgcactcaatcaacggctatgtgtttgatagtctccagctttctgtttgcctccatgaagtagcctattggtacatcttgtcaattggtgctcaaacagacttcctctccgtcttcttctccggctacacctttaagcacaagggcgtgtatgaggacactctcacactctttccattttctggagaaaccgtgttcatgagcatggagaatccaggcctttggatcttgggttgccacaacagtgattttcgcaatcggggaatgactgctctcctcaaagtcagcagctgtgattggaacacaggcgactattacgaagattcttacgaggacataagtgcctactttgactccaagaataacgccattgagcccagatcattctcccagaatcctcccgtgcttaaaaggcatcagcgcgaaggtaccagaactactcttcagtctgatcaagaggagattgactatgacgacaccattagcgtggaaatgaagaaggaggatttcgatatctatgacgaagatgagaaccagtctccgcggagctttcagaagaagacgcgacactacttcattgcagcagtcgaaaggctttgggactacggtatgtcatcatcccctcatgtgttgcgcaatagagctcagagtggaagtgttccacagttcaagaaagtcgtctttcaagagtttacagatggcagcttcacacagcctctctatcggggcgagcttaacgaacatttgggactccttggtccctatatccgagccgaagtggaggacaacattatggttacctttaggaatcaagcctctcgcccctacagcttctactcctccctcatcagttatgaggaggatcagagacaaggcgctgaaccacggaagaactttgtgaaaccgaatgagacgaagacctacttctggaaagtacagcaccacatggcccccacaaaagacgaattcgattgcaaagcatgggcgtatttttcagacgttgacttggagaaagatgtacattcaggacttattggtcctttgttggtgtgtcacactaacactctcaatccagcccatggcaggcaggtgacagtccaggaattcgctcttttctttaccatctttgatgagaccaagtcctggtacttcacggaaaacatggagcgcaattgcagagccccctgtaacatacagatggaggaccctacctttaaggaaaattatcggttccacgcaatcaacggatacattatggatacactccctggccttgtgatggctcaggaccaacgaatcaggtggtacctcctcagcatgggttctaatgagaacatacactccattcacttttcaggacatgtgttcactgtccggaagaaagaagagtataagatggccctctacaatttgtatccaggcgtgtttgagaccgttgaaatgcttccctctaaagctggcatctggagagtagagtgcttgatcggagaacatcttcacgcaggtatgagcaccttgttcctcgtgtacagcaacaaatgtcagaatccacttggcatggccagtggacacattcgcgactttcagatcacagcatctggccagtatggacaatgggccccaaagttggctcgcctccattactccggtagcataaatgcgtggtccactaaagaacctttcagctggattaaggtcgatcttcttgcccccatgatcatccacggcattaagacacagggagcgaggcagaaattctcctccctctacatctcacagttcattattatgtatagtttggacggcaagaagtggcaaacttatagaggtaacagtactggaacagacatggtgttcttcggcaacgttgatagctctggcatcaaacacaacatctttaatcctcccataatagctcggtacatcagattgcatccgacccactacagcattaggagtacactccgaatggagcttatgggttgcgacttgaattcctgttcaatgccactcggaatggagtctaaagccatctctgatgcacagataaccgccagtagctactttacgaacatgtttgctacgtggtcaccctctaaggcaaggcttcatttgcaaggccggtctaatgcctggagacctcaggtgaacaacccgaaagaatggctccaggtggactttcagaagaccatgaaagtaacaggtgtcactactcagggagttaagtccttggatactagcatgtatgtgaaggagttccttatttcctcatcacaagatggccaccagtggaccctcttctttcagaatggtaaggtcaaagtgtttcagggcaatcaagacagcttcacacccgtggtgaacagtcttgatcctccactcttgacacgataccttcgaatccatccacagtcttgggagcaccagattgcattgcgcatggaagtacttggatgcgaggctcaggacctctac

SEQ ID NO: 2016 - protein, 1457 aa, synthetic construct
  REGION 1..1457: note = Variant of human B-domain deleted Factor VIII
MQIELSTCFFLCLLRFCFSATRRYYLGAVELSWDYMQSDLGELPVDARFPPRVPKSFPFNTSQVYKKTLFVEFTDHLFNIAKPRPPWMGLLGPTIQAEVYDTVVITLKNMASHPVSLHAVGVSYWKASEGAEYDDQTSQREKEDDKVFPGGSHTYVWQVLKENGPMASDPPCLTYSYLSHVDLVKDLNSGLIGALLVCREGSLAKEKTQTLAKFILLFAVFDEGKSWHSETKNSLMQDRDAASARAWPKMHTVNGYVNRTLPGLIGCHRKSVYWHVIGMGTTPEVHSIFLEGHTFLVRNHRQASLGISPITFLTAQTLLRDLGQFLLFCHIPSHQHDGMEAYVKVDSCPEEPQLRMKNNEEAEDYDDDLADSEMDVVRFDDDNSPSIIQARSGAKKHPKTWVHYIAAEEEDWDYAPLVLAPDDRSYKSQYLNNGPQRIGRKYKKVRFMAYTDETFKTREAIQHESGILGPLLYGEVGDTLLIIFKNQASRPYNIYPHGITDVRPLYSRRLPKGVKHLKDFPILPGEIFKYKWTITVEDGPTKSDPRCLTRYYSSFVNWERDLASGLIGPLLICYKESVDQRGNQIMSDKRNVILFSVFDENRSWYLTENIQRFAPNPAGVQLEDPEFQASNIMHSINGYVFDSLQLSVCLHEVAYWYILSIGAQTDFLSVFFSGYTFKHKGVYEDTLTLFPFSGETVFMSMENPGLWILGCHNSDFRNRGMTALLKVSSCDWNTGDYYEDSYEDISAYFDSKNNAIEPRSFSQNPPVLKRHQREGTRTTLQSDQEEIDYDDTISVEMKKEDFDIYDEDENQSPRSFQKKTRHYFIAAVERLWDYGMSSSPHVLRNRAQSGSVPQFKKVVFQEFTDGSFTQPLYRGELNEHLGLLGPYIRAEVEDNIMVTFRNQASRPYSFYSSLISYEEDQRQGAEPRKNFVKPNETKTYFWKVQHHMAPTKDEFDCKAWAYFSDVDLEKDVHSGLIGPLLVCHTNTLNPAHGRQVTVQEFALFFTIFDETKSWYFTENMERNCRAPCNIQMEDPTFKENYRFHAINGYIMDTLPGLVMAQDQRIRWYLLSMGSNENIHSIHFSGHVFTVRKKEEYKMALYNLYPGVFETVEMLPSKAGIWRVECLIGEHLHAGMSTLFLVYSNKCQNPLGMASGHIRDFQITASGQYGQWAPKLARLHYSGSINAWSTKEPFSWIKVDLLAPMIIHGIKTQGARQKFSSLYISQFIIMYSLDGKKWQTYRGNSTGTDMVFFGNVDSSGIKHNIFNPPIIARYIRLHPTHYSIRSTLRMELMGCDLNSCSMPLGMESKAISDAQITASSYFTNMFATWSPSKARLHLQGRSNAWRPQVNNPKEWLQVDFQKTMKVTGVTTQGVKSLDTSMYVKEFLISSSQDGHQWTLFFQNGKVKVFQGNQDSFTPVVNSLDPPLLTRYLRIHPQSWEHQIALRMEVLGCEAQDLY

SEQ ID NO: 2017 - DNA, 4371 bp, synthetic construct
  misc_feature 1..4371: note = Variant of human B-domain deleted Factor VIII
  source 1..4371: mol_type = other DNA
atgcagattgaactgtctacctgcttcttcctctgtttgctgaggttctgctttagcgccactagacggtactaccttggcgctgtggagctgtcctgggactatatgcagagtgatttgggagagcttcccgtcgacgcacgatttcctcctcgcgttccaaagtcatttccctttaacacaagccaggtgtacaagaagacgctcttcgtcgaattcaccgatcacctgttcaatatcgccaaacccagaccaccatggatgggtcttttggggcctaccatacaagcggaggtgtatgacacagttgttatcactctcaagaacatggcttctcatccggtaagtcttcacgcagtgggcgtgtcctactggaaagcttcagaaggagccgagtatgatgatcagacatcccagagggagaaagaagacgacaaggtatttccaggtgggtctcatacctatgtgtggcaagtgctcaaagagaatggccctatggcaagcgatccgccgtgtttgacttacagctacctttcacacgttgacctcgtcaaggacctcaactccgggttgattggagccttgttggtatgcagggaaggatctcttgccaaagagaagacacagaccctggccaagtttatccttctctttgctgtgttcgatgagggcaaaagttggcatagcgaaacgaagaattccctcatgcaggatcgcgacgcagccagcgccagagcttggcccaagatgcacactgtgaacggatatgtcaataggacgcttcctggcttgattgggtgtcatcggaaaagtgtctactggcacgtgatcggaatggggacaacaccagaggtccactccatatttctcgaaggccataccttccttgttcgaaaccacagacaggcatccttggggatctctcccattacctttctcactgcccaaacgctccttcgtgacttgggtcagttccttctcttttgccatatcccgtcacaccagcatgatggtatggaagcttatgtgaaagtcgacagttgtcctgaggagccacagttgcgcatgaagaataatgaagaagccgaggattacgacgacgatctcaccgattctgagatggacgtggtgaggtttgatgacgacaactctccctccatcattcaagctcggagcggggcgaagaaacaccccaagacttgggtccactatatagcggcggaagaggaggattgggattacgctcctcttgtattggcaccagatgaccgctcatacaaaagccagtacctcaacaacggaccgcagagaattggccggaagtataagaaagtgcgatttatggcctatacagacgaaacctttaagacaagggaggccatccagcatgagagtgggattttgggacctcttctttacggcgaagttggtgataccctcctcatcatcttcaagaatcaagcttctcgcccctataacatttacccacacgggatcactgacgttaggcctttgtatagcagaagacttcccaaaggcgtgaagcatctcaaagacttccccattttgccaggcgagatctttaagtacaaatggaccattacagtggaagatggaccgactaaatcagaccctcgatgccttacgcggtactattcctccttcgtgaattgggagagagatttggcaagcggactcataggaccactcctcatctgttacaaggaatctgtagaccagaggggtaaccagattatgagtgataaacgcaatgtgatcctttttagcgtcttcgacgagaaccggtcctggtacttgaccgagaatatacaaaggttccttcccaaccccgcaggcgttcagttggaagaccctgagtttcaggccagcaatattatgcactcaatcaacggctatgtgtttgatagtctccagctttctgtttgcctccatgaagtagcctattggtacatcttgtcaattggtgctcaaacagacttcctctccgtcttcttctccggctacacctttaagcacaagggcgtgtatgaggacactctcacactctttccattttctggagaaaccgtgttcatgagcatggagaatccaggcctttggatcttgggttgccacaacagtgattttcgcaatcggggaatgactgctctcctcaaagtcagcagctgtgattggaacacaggcgactattacgaagattcttacgaggacataagtgcctactttgactccaagaataacgccattgagcccagatcattctcccagaatcctcccgtgcttaaaaggcatcagcgcgaaggtaccagaactactcttcagtctgatcaagaggagattgactatgacgacaccattagcgtggaaatgaagaaggaggatttcgatatctatgacgaagatgagaaccagtctccgcggagctttcagaagaagacgcgacactacttcattgcagcagtcgaaaggctttgggactacggtatgtcatcatcccctcatgtgttgcgcaatagagctcagagtggaagtgttccacagttcaagaaagtcgtctttcaagagtttacagatggcagcttcacacagcctctctatcggggcgagcttaacgaacatttgggactccttggtccctatatccgagccgaagtggaggacaacattatggttacctttaggaatcaagcctctcgcccctacagcttctactcctccctcatcagttatgaggaggatcagagacaaggcgctgaaccacggaagaactttgtgaaaccgaatgagacgaagacctacttctggaaagtacagcaccacatggcccccacaaaagacgaattcgattgcaaagcatgggcgtatttttcagacgttgacttggagaaagatgtacattcaggacttattggtcctttgttggtgtgtcacactaacactctcaatccagcccatggcaggcaggtgacagtccaggaattcgctcttttctttaccatctttgatgagaccaagtcctggtacttcacggaaaacatggagcgcaattgcagagccccctgtaacatacagatggaggaccctacctttaaggaaaattatcggttccacgcaatcaacggatacattatggatacactccctggccttgtgatggctcaggaccaacgaatcaggtggtacctcctcagcatgggttctaatgagaacatacactccattcacttttcaggacatgtgttcactgtccggaagaaagaagagtataagatggccctctacaatttgtatccaggcgtgtttgagaccgttgaaatgcttccctctaaagctggcatctggagagtagagtgcttgatcggagaacatcttcacgcaggtatgagcaccttgttcctcgtgtacagcaacaaatgtcagaatccacttggcatggccagtggagatattcgcgactttcagatcacagcatctggccagtatggacaatgggccccaaagttggctcgcctccattactccggtagcataaatgcgtggtccactaaagaacctttcagctggattaaggtcgatcttcttgcccccatgatcatccacggcattaagacacagggagcgaggcagaaattctcctccctctacatctcacagttcattattatgtatagtttggacggcaagaagtggcaaacttatagaggtaacagtactggaacagacatggtgttcttcggcaacgttgatagctctggcatcaaacacaacatctttaatcctcccataatagctcggtacatcagattgcatccgacccactacagcattaggagtacactccgaatggagcttatgggttgcgacttgaattcctgttcaatgccactcggaatggagtctaaagccatctctgatgcacagataaccgccagtagctactttacgaacatgtttgctacgtggtcaccctctaaggcaaggcttcatttgcaaggccggtctaatgcctggagacctcaggtgaacaacccgaaagaatggctccaggtggactttcagaagaccatgaaagtaacaggtgtcactactcagggagttaagtccttggatactagcatgtatgtgaaggagttccttatttcctcatcacaagatggccaccagtggaccctcttctttcagaatggtaaggtcaaagtgtttcagggcaatcaagacagcttcacacccgtggtgaacagtcttgatcctccactcttgacacgataccttcgaatccatccacagtcttgggagcaccagattgcattgcgcatggaagtacttggatgcgaggctcaggacctctac

SEQ ID NO: 2018 - protein, 1457 aa, synthetic construct
  REGION 1..1457: note = Variant of human B-domain deleted Factor VIII
MQIELSTCFFLCLLRFCFSATRRYYLGAVELSWDYMQSDLGELPVDARFPPRVPKSFPFNTSQVYKKTLFVEFTDHLFNIAKPRPPWMGLLGPTIQAEVYDTVVITLKNMASHPVSLHAVGVSYWKASEGAEYDDQTSQREKEDDKVFPGGSHTYVWQVLKENGPMASDPPCLTYSYLSHVDLVKDLNSGLIGALLVCREGSLAKEKTQTLAKFILLFAVFDEGKSWHSETKNSLMQDRDAASARAWPKMHTVNGYVNRTLPGLIGCHRKSVYWHVIGMGTTPEVHSIFLEGHTFLVRNHRQASLGISPITFLTAQTLLRDLGQFLLFCHIPSHQHDGMEAYVKVDSCPEEPQLRMKNNEEAEDYDDDLTDSEMDVVRFDDDNSPSIIQARSGAKKHPKTWVHYIAAEEEDWDYAPLVLAPDDRSYKSQYLNNGPQRIGRKYKKVRFMAYTDETFKTREAIQHESGILGPLLYGEVGDTLLIIFKNQASRPYNIYPHGITDVRPLYSRRLPKGVKHLKDFPILPGEIFKYKWTITVEDGPTKSDPRCLTRYYSSFVNWERDLASGLIGPLLICYKESVDQRGNQIMSDKRNVILFSVFDENRSWYLTENIQRFLPNPAGVQLEDPEFQASNIMHSINGYVFDSLQLSVCLHEVAYWYILSIGAQTDFLSVFFSGYTFKHKGVYEDTLTLFPFSGETVFMSMENPGLWILGCHNSDFRNRGMTALLKVSSCDWNTGDYYEDSYEDISAYFDSKNNAIEPRSFSQNPPVLKRHQREGTRTTLQSDQEEIDYDDTISVEMKKEDFDIYDEDENQSPRSFQKKTRHYFIAAVERLWDYGMSSSPHVLRNRAQSGSVPQFKKVVFQEFTDGSFTQPLYRGELNEHLGLLGPYIRAEVEDNIMVTFRNQASRPYSFYSSLISYEEDQRQGAEPRKNFVKPNETKTYFWKVQHHMAPTKDEFDCKAWAYFSDVDLEKDVHSGLIGPLLVCHTNTLNPAHGRQVTVQEFALFFTIFDETKSWYFTENMERNCRAPCNIQMEDPTFKENYRFHAINGYIMDTLPGLVMAQDQRIRWYLLSMGSNENIHSIHFSGHVFTVRKKEEYKMALYNLYPGVFETVEMLPSKAGIWRVECLIGEHLHAGMSTLFLVYSNKCQNPLGMASGDIRDFQITASGQYGQWAPKLARLHYSGSINAWSTKEPFSWIKVDLLAPMIIHGIKTQGARQKFSSLYISQFIIMYSLDGKKWQTYRGNSTGTDMVFFGNVDSSGIKHNIFNPPIIARYIRLHPTHYSIRSTLRMELMGCDLNSCSMPLGMESKAISDAQITASSYFTNMFATWSPSKARLHLQGRSNAWRPQVNNPKEWLQVDFQKTMKVTGVTTQGVKSLDTSMYVKEFLISSSQDGHQWTLFFQNGKVKVFQGNQDSFTPVVNSLDPPLLTRYLRIHPQSWEHQIALRMEVLGCEAQDLY

SEQ ID NO: 2019 - DNA, 4371 bp, synthetic construct
  misc_feature 1..4371: note = Variant of human B-domain deleted Factor VIII
  source 1..4371: mol_type = other DNA
atgcagattgaactgtctacctgcttcttcctctgtttgctgaggttctgctttagcgccactagacggtactaccttggcgctgtggagctgtcctgggactatatgcagagtgatttgggagagcttcccgtcgacgcacgatttcctcctcgcgttccaaagtcatttccctttaacacaagccaggtgtacaagaagacgctcttcgtcgaattcaccgatcacctgttcaatatcgccaaacccagaccaccatggatgggtcttttggggcctaccatacaagcggaggtgtatgacacagttgttatcactctcaagaacatggcttctcatccggtaagtcttcacgcagtgggcgtgtcctactggaaagcttcagaaggagccgagtatgatgatcagacatcccagagggagaaagaagacgacaaggtatttccaggtgggtctcatacctatgtgtggcaagtgctcaaagagaatggccctatggcaagcgatccgccgtgtttgacttacagctacctttcacacgttgacctcgtcaaggacctcaactccgggttgattggagccttgttggtatgcagggaaggatctcttgccaaagagaagacacagaccctggccaagtttatccttctctttgctgtgttcgatgagggcaaaagttggcatagcgaaacgaagaattccctcatgcaggatcgcgacgcagccagcgccagagcttggcccaagatgcacactgtgaacggatatgtcaataggacgcttcctggcttgattgggtgtcatcggaaaagtgtctactggcacgtgatcggaatggggacaacaccagaggtccactccatatttctcgaaggccataccttccttgttcgaaaccacagacaggcatccttggggatctctcccattacctttctcactgcccaaacgctccttcgtgacttgggtcagttccttctcttttgccatatcccgtcacaccagcatgatggtatggaagcttatgtgaaagtcgacagttgtcctgaggagccacagttgcgcatgaagaataatgaagaagccgaggattacgacgacgatctcaccgattctgagatggacgtggtgaggtttgatgacgacaactctccctccatcattcaagctcggagcggggcgaagaaacaccccaagacttgggtccactatatagcggcggaagaggaggattgggattacgctcctcttgtattggcaccagatgaccgctcatacaaaagccagtacctcaacaacggaccgcagagaattggccggaagtataagaaagtgcgatttatggcctatacagacgaaacctttaagacaagggaggccatccagcatgagagtgggattttgggacctcttctttacggcgaagttggtgataccctcctcatcatcttcaagaatcaagcttctcgcccctataacatttacccacacgggatcactgacgttaggcctttgtatagcagaagacttcccaaaggcgtgaagcatctcaaagacttccccattttgccaggcgagatctttaagtacaaatggaccattacagtggaagatggaccgactaaatcagaccctcgatgccttacgcggtactattcctccttcgtgaattgggagagagatttggcaagcggactcataggaccactcctcatctgttacaaggaatctgtagaccagaggggtaaccagattatgagtgataaacgcaatgtgatcctttttagcgtcttcgacgagaaccggtcctggtacttgaccgagaatatacaaaggttccttcccaaccccgcaggcgttcagttggaagaccctgagtttcaggccagcaatattatgcactcaatcaacggctatgtgtttgatagtctccagctttctgtttgcctccatgaagtagcctattggtacatcttgtcaattggtgctcaaacagacttcctctccgtcttcttctccggctacacctttaagcacaagggcgtgtatgaggacactctcacactctttccattttctggagaaaccgtgttcatgagcatggagaatccaggcctttggatcttgggttgccacaacagtgattttcgcaatcggggaatgactgctctcctcaaagtcagcagctgtgattggaacacaggcgactattacgaagattcttacgaggacataagtgcctactttgactccaagaataacgccattgagcccagatcattctcccagaatcctcccgtgcttaaaaggcatcagcgcgaaggtaccagaactactcttcagtctgatcaagaggagattgactatgacgacaccattagcgtggaaatgaagaaggaggatttcgatatctatgacgaagatgagaaccagtctccgcggagctttcagaagaagacgcgacactacttcattgcagcagtcgaaaggctttgggactacggtatgtcatcatcccctcatgtgttgcgcaatagagctcagagtggaagtgttccacagttcaagaaagtcgtctttcaagagtttacagatggcagcttcacacagcctctctatcggggcgagcttaacgaacatttgggactccttggtccctatatccgagccgaagtggaggacaacattatggttacctttaggaatcaagcctctcgcccctacagcttctactcctccctcatcagttatgaggaggatcagagacaaggcgctgaaccacggaagaactttgtgaaaccgaatgagacgaagacctacttctggaaagtacagcaccacatggcccccacaaaagacgaattcgattgcaaagcatgggcgtatttttcagacgttgacttggagaaagatgtacattcaggacttattggtcctttgttggtgtgtcacactaacactctcaatccagcccatggcaggcaggtgacagtccaggaattcgctcttttctttaccatctttgatgagaccaagtcctggtacttcacggaaaacatggagcgcaattgcagagccccctgtaacatacagatggaggaccctacctttaaggaaaattatcggttccacgcaatcaacggatacattatggatacactccctggccttgtgatggctcaggaccaacgaatcaggtggtacctcctcagcatgggttctaatgagaacatacactccattcacttttcaggacatgtgttcactgtccggaagaaagaagagtataagatggccctctacaatttgtatccaggcgtgtttgagaccgttgaaatgcttccctctaaagctggcatctggagagtagagtgcttgatcggagaacatcttcacgcaggtatgagcaccttgttcctcgtgtacagcaacaaatgtcagaatccacttggcatggccagtggacacattcgcgactttcagatcacagcatctggccagtatggacaatgggccccaaagttggctcgcctccattactccggtagcataaatgcgtggtccactaaagaacctttcagctggattaaggtcgatcttcttgcccccatgatcatccacggcattgtgacacagggagcgaggcagaaattctcctccctctacatctcacagttcattattatgtatagtttggacggcaagaagtggcaaacttatagaggtaacagtactggaacagacatggtgttcttcggcaacgttgatagctctggcatcaaacacaacatctttaatcctcccataatagctcggtacatcagattgcatccgacccactacagcattaggagtacactccgaatggagcttatgggttgcgacttgaattcctgttcaatgccactcggaatggagtctaaagccatctctgatgcacagataaccgccagtagctactttacgaacatgtttgctacgtggtcaccctctaaggcaaggcttcatttgcaaggccggtctaatgcctggagacctcaggtgaacaacccgaaagaatggctccaggtggactttcagaagaccatgaaagtaacaggtgtcactactcagggagttaagtccttggatactagcatgtatgtgaaggagttccttatttcctcatcacaagatggccaccagtggaccctcttctttcagaatggtaaggtcaaagtgtttcagggcaatcaagacagcttcacacccgtggtgaacagtcttgatcctccactcttgacacgataccttcgaatccatccacagtcttgggagcaccagattgcattgcgcatggaagtacttggatgcgaggctcaggacctctac

SEQ ID NO: 2020 - protein, 1457 aa, synthetic construct
  REGION 1..1457: note = Variant of human B-domain deleted Factor VIII
MQIELSTCFFLCLLRFCFSATRRYYLGAVELSWDYMQSDLGELPVDARFPPRVPKSFPFNTSQVYKKTLFVEFTDHLFNIAKPRPPWMGLLGPTIQAEVYDTVVITLKNMASHPVSLHAVGVSYWKASEGAEYDDQTSQREKEDDKVFPGGSHTYVWQVLKENGPMASDPPCLTYSYLSHVDLVKDLNSGLIGALLVCREGSLAKEKTQTLAKFILLFAVFDEGKSWHSETKNSLMQDRDAASARAWPKMHTVNGYVNRTLPGLIGCHRKSVYWHVIGMGTTPEVHSIFLEGHTFLVRNHRQASLGISPITFLTAQTLLRDLGQFLLFCHIPSHQHDGMEAYVKVDSCPEEPQLRMKNNEEAEDYDDDLTDSEMDVVRFDDDNSPSIIQARSGAKKHPKTWVHYIAAEEEDWDYAPLVLAPDDRSYKSQYLNNGPQRIGRKYKKVRFMAYTDETFKTREAIQHESGILGPLLYGEVGDTLLIIFKNQASRPYNIYPHGITDVRPLYSRRLPKGVKHLKDFPILPGEIFKYKWTITVEDGPTKSDPRCLTRYYSSFVNWERDLASGLIGPLLICYKESVDQRGNQIMSDKRNVILFSVFDENRSWYLTENIQRFLPNPAGVQLEDPEFQASNIMHSINGYVFDSLQLSVCLHEVAYWYILSIGAQTDFLSVFFSGYTFKHKGVYEDTLTLFPFSGETVFMSMENPGLWILGCHNSDFRNRGMTALLKVSSCDWNTGDYYEDSYEDISAYFDSKNNAIEPRSFSQNPPVLKRHQREGTRTTLQSDQEEIDYDDTISVEMKKEDFDIYDEDENQSPRSFQKKTRHYFIAAVERLWDYGMSSSPHVLRNRAQSGSVPQFKKVVFQEFTDGSFTQPLYRGELNEHLGLLGPYIRAEVEDNIMVTFRNQASRPYSFYSSLISYEEDQRQGAEPRKNFVKPNETKTYFWKVQHHMAPTKDEFDCKAWAYFSDVDLEKDVHSGLIGPLLVCHTNTLNPAHGRQVTVQEFALFFTIFDETKSWYFTENMERNCRAPCNIQMEDPTFKENYRFHAINGYIMDTLPGLVMAQDQRIRWYLLSMGSNENIHSIHFSGHVFTVRKKEEYKMALYNLYPGVFETVEMLPSKAGIWRVECLIGEHLHAGMSTLFLVYSNKCQNPLGMASGHIRDFQITASGQYGQWAPKLARLHYSGSINAWSTKEPFSWIKVDLLAPMIIHGIVTQGARQKFSSLYISQFIIMYSLDGKKWQTYRGNSTGTDMVFFGNVDSSGIKHNIFNPPIIARYIRLHPTHYSIRSTLRMELMGCDLNSCSMPLGMESKAISDAQITASSYFTNMFATWSPSKARLHLQGRSNAWRPQVNNPKEWLQVDFQKTMKVTGVTTQGVKSLDTSMYVKEFLISSSQDGHQWTLFFQNGKVKVFQGNQDSFTPVVNSLDPPLLTRYLRIHPQSWEHQIALRMEVLGCEAQDLY

SEQ ID NO: 2021 - DNA, 4371 bp, synthetic construct
  misc_feature 1..4371: note = Variant of human B-domain deleted Factor VIII
  source 1..4371: mol_type = other DNA
atgcagattgaactgtctacctgcttcttcctctgtttgctgaggttctgctttagcgccactagacggtactaccttggcgctgtggagctgtcctgggactatatgcagagtgatttgggagagcttcccgtcgacgcacgatttcctcctcgcgttccaaagtcatttccctttaacacaagccaggtgtacaagaagacgctcttcgtcgaattcaccgatcacctgttcaatatcgccaaacccagaccaccatggatgggtcttttggggcctaccatacaagcggaggtgtatgacacagttgttatcactctcaagaacatggcttctcatccggtaagtcttcacgcagtgggcgtgtcctactggaaagcttcagaaggagccgagtatgatgatcagacatcccagagggagaaagaagacgacaaggtatttccaggtgggtctcatacctatgtgtggcaagtgctcaaagagaatggccctatggcaagcgatccgccgtgtttgacttacagctacctttcacacgttgacctcgtcaaggacctcaactccgggttgattggagccttgttggtatgcagggaaggatctcttgccaaagagaagacacagaccctggccaagtttatccttctctttgctgtgttcgatgagggcaaaagttggcatagcgaaacgaagaattccctcatgcaggatcgcgacgcagccagcgccagagcttggcccaagatgcacactgtgaacggatatgtcaataggacgcttcctggcttgattgggtgtcatcggaaaagtgtctactggcacgtgatcggaatggggacaacaccagaggtccactccatatttctcgaaggccataccttccttgttcgaaaccacagacaggcatccttggggatctctcccattacctttctcactgcccaaacgctccttcgtgacttgggtcagttccttctcttttgccatatcccgtcacaccagcatgatggtatggaagcttatgtgaaagtcgacagttgtcctgaggagccacagttgcgcatgaagaataatgaagaagccgaggattacgacgacgatctcaccgattctgagatggacgtggtgaggtttgatgacgacaactctccctccatcattcaagctcggagcggggcgaagaaacaccccaagacttgggtccactatatagcggcggaagaggaggattgggattacgctcctcttgtattggcaccagatgaccgctcatacaaaagccagtacctcaacaacggaccgcagagaattggccggaagtataagaaagtgcgatttatggcctatacagacgaaacctttaagacaagggaggccatccagcatgagagtgggattttgggacctcttctttacggcgaagttggtgataccctcctcatcatcttcaagaatcaagcttctcgcccctataacatttacccacacgggatcactgacgttaggcctttgtatagcagaagacttcccaaaggcgtgaagcatctcaaagacttccccattttgccaggcgagatctttaagtacaaatggaccattacagtggaagatggaccgactaaatcagaccctcgatgccttacgcggtactattcctccttcgtgaattgggagagagatttggcaagcggactcataggaccactcctcatctgttacaaggaatctgtagaccagaggggtaaccagattatgagtgataaacgcaatgtgatcctttttagcgtcttcgacgagaaccggtcctggtacttgaccgagaatatacaaaggttcacgcccaaccccgcaggcgttcagttggaagaccctgagtttcaggccagcaatattatgcactcaatcaacggctatgtgtttgatagtctccagctttctgtttgcctccatgaagtagcctattggtacatcttgtcaattggtgctcaaacagacttcctctccgtcttcttctccggctacacctttaagcacaagggcgtgtatgaggacactctcacactctttccattttctggagaaaccgtgttcatgagcatggagaatccaggcctttggatcttgggttgccacaacagtgattttcgcaatcggggaatgactgctctcctcaaagtcagcagctgtgattggaacacaggcgactattacgaagattcttacgaggacataagtgcctactttgactccaagaataacgccattgagcccagatcattctcccagaatcctcccgtgcttaaaaggcatcagcgcgaaggtaccagaactactcttcagtctgatcaagaggagattgactatgacgacaccattagcgtggaaatgaagaaggaggatttcgatatctatgacgaagatgagaaccagtctccgcggagctttcagaagaagacgcgacactacttcattgcagcagtcgaaaggctttgggactacggtatgtcatcatcccctcatgtgttgcgcaatagagctcagagtggaagtgttccacagttcaagaaagtcgtctttcaagagtttacagatggcagcttcacacagcctctctatcggggcgagcttaacgaacatttgggactccttggtccctatatccgagccgaagtggaggacaacattatggttacctttaggaatcaagcctctcgcccctacagcttctactcctccctcatcagttatgaggaggatcagagacaaggcgctgaaccacggaagaactttgtgaaaccgaatgagacgaagacctacttctggaaagtacagcaccacatggcccccacaaaagacgaattcgattgcaaagcatgggcgtatttttcagacgttgacttggagaaagatgtacattcaggacttattggtcctttgttggtgtgtcacactaacactctcaatccagcccatggcaggcaggtgacagtccaggaattcgctcttttctttaccatctttgatgagaccaagtcctggtacttcacggaaaacatggagcgcaattgcagagccccctgtaacatacagatggaggaccctacctttaaggaaaattatcggttccacgcaatcaacggatacattatggatacactccctggccttgtgatggctcaggaccaacgaatcaggtggtacctcctcagcatgggttctaatgagaacatacactccattcacttttcaggacatgtgttcactgtccggaagaaagaagagtataagatggccctctacaatttgtatccaggcgtgtttgagaccgttgaaatgcttccctctaaagctggcatctggagagtagagtgcttgatcggagaacatcttcacgcaggtatgagcaccttgttcctcgtgtacagcaacaaatgtcagaatccacttggcatggccagtggacacattcgcgactttcagatcacagcatctggccagtatggacaatgggccccaaagttggctcgcctccattactccggtagcataaatgcgtggtccactaaagaacctttcagctggattaaggtcgatcttcttgcccccatgatcatccacggcattaagacacagggagcgaggcagaaattctcctccctctacatctcacagttcattattatgtatagtttggacggcaagaagtggcaaacttatagaggtaacagtactggaacagacatggtgttcttcggcaacgttgatagctctggcatcaaacacaacatctttaatcctcccataatagctcggtacatcagattgcatccgacccactacagcattaggagtacactccgaatggagcttatgggttgcgacttgaattcctgttcaatgccactcggaatggagtctaaagccatctctgatgcacagataaccgccagtagctactttacgaacatgtttgctacgtggtcaccctctaaggcaaggcttcatttgcaaggccggtctaatgcctggagacctcaggtgaacaacccgaaagaatggctccaggtggactttcagaagaccatgaaagtaacaggtgtcactactcagggagttaagtccttggatactagcatgtatgtgaaggagttccttatttcctcatcacaagatggccaccagtggaccctcttctttcagaatggtaaggtcaaagtgtttcagggcaatcaagacagcttcacacccgtggtgaacagtcttgatcctccactcttgacacgataccttcgaatccatccacagtcttgggagcaccagattgcattgcgcatggaagtacttggatgcgaggctcaggacctctac

SEQ ID NO: 2022 - protein, 1457 aa, synthetic construct
  REGION 1..1457: note = Variant of human B-domain deleted Factor VIII
MQIELSTCFFLCLLRFCFSATRRYYLGAVELSWDYMQSDLGELPVDARFPPRVPKSFPFNTSQVYKKTLFVEFTDHLFNIAKPRPPWMGLLGPTIQAEVYDTVVITLKNMASHPVSLHAVGVSYWKASEGAEYDDQTSQREKEDDKVFPGGSHTYVWQVLKENGPMASDPPCLTYSYLSHVDLVKDLNSGLIGALLVCREGSLAKEKTQTLAKFILLFAVFDEGKSWHSETKNSLMQDRDAASARAWPKMHTVNGYVNRTLPGLIGCHRKSVYWHVIGMGTTPEVHSIFLEGHTFLVRNHRQASLGISPITFLTAQTLLRDLGQFLLFCHIPSHQHDGMEAYVKVDSCPEEPQLRMKNNEEAEDYDDDLTDSEMDVVRFDDDNSPSIIQARSGAKKHPKTWVHYIAAEEEDWDYAPLVLAPDDRSYKSQYLNNGPQRIGRKYKKVRFMAYTDETFKTREAIQHESGILGPLLYGEVGDTLLIIFKNQASRPYNIYPHGITDVRPLYSRRLPKGVKHLKDFPILPGEIFKYKWTITVEDGPTKSDPRCLTRYYSSFVNWERDLASGLIGPLLICYKESVDQRGNQIMSDKRNVILFSVFDENRSWYLTENIQRFTPNPAGVQLEDPEFQASNIMHSINGYVFDSLQLSVCLHEVAYWYILSIGAQTDFLSVFFSGYTFKHKGVYEDTLTLFPFSGETVFMSMENPGLWILGCHNSDFRNRGMTALLKVSSCDWNTGDYYEDSYEDISAYFDSKNNAIEPRSFSQNPPVLKRHQREGTRTTLQSDQEEIDYDDTISVEMKKEDFDIYDEDENQSPRSFQKKTRHYFIAAVERLWDYGMSSSPHVLRNRAQSGSVPQFKKVVFQEFTDGSFTQPLYRGELNEHLGLLGPYIRAEVEDNIMVTFRNQASRPYSFYSSLISYEEDQRQGAEPRKNFVKPNETKTYFWKVQHHMAPTKDEFDCKAWAYFSDVDLEKDVHSGLIGPLLVCHTNTLNPAHGRQVTVQEFALFFTIFDETKSWYFTENMERNCRAPCNIQMEDPTFKENYRFHAINGYIMDTLPGLVMAQDQRIRWYLLSMGSNENIHSIHFSGHVFTVRKKEEYKMALYNLYPGVFETVEMLPSKAGIWRVECLIGEHLHAGMSTLFLVYSNKCQNPLGMASGHIRDFQITASGQYGQWAPKLARLHYSGSINAWSTKEPFSWIKVDLLAPMIIHGIKTQGARQKFSSLYISQFIIMYSLDGKKWQTYRGNSTGTDMVFFGNVDSSGIKHNIFNPPIIARYIRLHPTHYSIRSTLRMELMGCDLNSCSMPLGMESKAISDAQITASSYFTNMFATWSPSKARLHLQGRSNAWRPQVNNPKEWLQVDFQKTMKVTGVTTQGVKSLDTSMYVKEFLISSSQDGHQWTLFFQNGKVKVFQGNQDSFTPVVNSLDPPLLTRYLRIHPQSWEHQIALRMEVLGCEAQDLY

SEQ ID NO: 2023 - DNA, 4371 bp, synthetic construct
  misc_feature 1..4371: note = Variant of human B-domain deleted Factor VIII
  source 1..4371: mol_type = other DNA
atgcagattgaactgtctacctgcttcttcctctgtttgctgaggttctgctttagcgccactagacggtactaccttggcgctgtggagctgtcctgggactatatgcagagtgatttgggagagcttcccgtcgacgcacgatttcctcctcgcgttccaaagtcatttccctttaacacaagccaggtgtacaagaagacgctcttcgtcgaattcaccgatcacctgttcaatatcgccaaacccagaccaccatggatgggtcttttggggcctaccatacaagcggaggtgtatgacacagttgttatcactctcaagaacatggcttctcatccggtaagtcttcacgcagtgggcgtgtcctactggaaagcttcagaaggagccgagtatgatgatcagacatcccagagggagaaagaagacgacaaggtatttccaggtgggtctcatacctatgtgtggcaagtgctcaaagagaatggccctatggcaagcgatccgccgtgtttgacttacagctacctttcacacgttgacctcgtcaaggacctcaactccgggttgattggagccttgttggtatgcagggaaggatctcttgccaaagagaagacacagaccctggccaagtttatccttctctttgctgtgttcgatgagggcaaaagttggcatagcgaaacgaagaattccctcatgcaggatcgcgacgcagccagcgccagagcttggcccaagatgcacactgtgaacggatatgtcaataggacgcttcctggcttgattgggtgtcatcggaaaagtgtctactggcacgtgatcggaatggggacaacaccagaggtccactccatatttctcgaaggccataccttccttgttcgaaaccacagacaggcatccttggggatctctcccattacctttctcactgcccaaacgctccttcgtgacttgggtcagttccttctcttttgccatatcccgtcacaccagcatgatggtatggaagcttatgtgaaagtcgacagttgtcctgaggagccacagttgcgcatgaagaataatgaagaagccgaggattacgacgacgatctcaccgattctgagatggacgtggtgaggtttgatgacgacaactctccctccatcattcaagctcggagcggggcgaagaaacaccccaagacttgggtccactatatagcggcggaagaggaggattgggattacgctcctcttgtattggcaccagatgaccgctcatacaaaagccagtacctcaacaacggaccgcagagaattggccggaagtataagaaagtgcgatttatggcctatacagacgaaacctttaagacaagggaggccatccagcatgagagtgggattttgggacctcttctttacggcgaagttggtgataccctcctcatcatcttcaagaatcaagcttctcgcccctataacatttacccacacgggatcactgacgttaggcctttgtatagcagaagacttcccaaaggcgtgaagcatctcaaagacttccccattttgccaggcgagatctttaagtacaaatggaccattacagtggaagatggaccgactaaatcagaccctcgatgccttacgcggtactattcctccttcgtgaattgggagagagatttggcaagcggactcataggaccactcctcatctgttacaaggaatctgtagaccagaggggtaaccagattatgagtgataaacgcaatgtgatcctttttagcgtcttcgacgagaaccggtcctggtacttgaccgagaatatacaaaggttccttcccaaccccgcaggcgttcagttggaagaccctgagtttcaggccagcaatattatgcactcaatcaacggctatgtgtttgatagtctccagctttctgtttgcctccatgaagtagcctattggtacatcttgtcaattggtgctcaaacagacttcctctccgtcttcttctccggctacacctttaagcacaagggcgtgtatgaggacactctcacactctttccattttctggagaaaccgtgttcatgagcatggagaatccaggcctttggatcttgggttgccacaacagtgattttcgcaatcggggaatgactgctctcctcaaagtcagcagctgtgattggaacacaggcgactattacgaagattcttacgaggacataagtgcctactttgactccaagaataacgccattgagcccagatcattctcccagaatcctcccgtgcttaaaaggcatcagcgcgaaggtaccagaactactcttcagtctgatcaagaggagattgactatgacgacaccattagcgtggaaatgaagaaggaggatttcgatatctatgacgaagatgagaaccagtctccgcggagctttcagaagaagacgcgacactacttcattgcagcagtcgaaaggctttgggactacggtatgtcatcatcccctcatgtgttgcgcaatagagctcagagtggaagtgttccacagttcaagaaagtcgtctttcaagagtttacagatggcagcttcacacagcctctctatcggggcgagcttaacgaacatttgggactccttggtccctatatccgagccgaagtggaggacaacattatggttacctttaggaatcaagcctctcgcccctacagcttctactcctccctcatcagttatgaggaggatcagagacaaggcgctgaaccacggaagaactttgtgaaaccgaatgagacgaagacctacttctggaaagtacagcaccacatggcccccacaaaagacgaattcgattgcaaagcatgggcgtatttttcagacgttgacttggagaaagatgtacattcaggacttattggtcctttgttggtgtgtcacactaacactctcaatccagcccatggcaggcaggtgacagtccaggaattcgctcttttctttaccatctttgatgagaccaagtcctggtacttcacggaaaacatggagcgcaattgcagagccccctgtaacatacagatggaggaccctacctttaaggaaaattatcggttccacgcaatcaacggatacattatggatacactccctggccttgtgatggctcaggaccaacgaatcaggtggtacctcctcagcatgggttctaatgagaacatacactccattcacttttcaggacatgtgttcactgtccggaagaaagaagagtataagatggccctctacaatttgtatccaggcgtgtttgagaccgttgaaatgcttccctctaaagctggcatctggagagtagagtgcttgatcggagaacatcttcacgcaggtatgagcaccttgttcctcgtgtacagcaacaaatgtcagaatccacttggcatggccagtggacacattaatgactttcagatcacagcatctggccagtatggacaatgggccccaaagttggctcgcctccattactccggtagcataaatgcgtggtccactaaagaacctttcagctggattaaggtcgatcttcttgcccccatgatcatccacggcattaagacacagggagcgaggcagaaattctcctccctctacatctcacagttcattattatgtatagtttggacggcaagaagtggcaaacttatagaggtaacagtactggaacagacatggtgttcttcggcaacgttgatagctctggcatcaaacacaacatctttaatcctcccataatagctcggtacatcagattgcatccgacccactacagcattaggagtacactccgaatggagcttatgggttgcgacttgaattcctgttcaatgccactcggaatggagtctaaagccatctctgatgcacagataaccgccagtagctactttacgaacatgtttgctacgtggtcaccctctaaggcaaggcttcatttgcaaggccggtctaatgcctggagacctcaggtgaacaacccgaaagaatggctccaggtggactttcagaagaccatgaaagtaacaggtgtcactactcagggagttaagtccttggatactagcatgtatgtgaaggagttccttatttcctcatcacaagatggccaccagtggaccctcttctttcagaatggtaaggtcaaagtgtttcagggcaatcaagacagcttcacacccgtggtgaacagtcttgatcctccactcttgacacgataccttcgaatccatccacagtcttgggagcaccagattgcattgcgcatggaagtacttggatgcgaggctcaggacctctac

SEQ ID NO: 2024 - protein, 1457 aa, synthetic construct
  REGION 1..1457: note = Variant of human B-domain deleted Factor VIII
MQIELSTCFFLCLLRFCFSATRRYYLGAVELSWDYMQSDLGELPVDARFPPRVPKSFPFNTSQVYKKTLFVEFTDHLFNIAKPRPPWMGLLGPTIQAEVYDTVVITLKNMASHPVSLHAVGVSYWKASEGAEYDDQTSQREKEDDKVFPGGSHTYVWQVLKENGPMASDPPCLTYSYLSHVDLVKDLNSGLIGALLVCREGSLAKEKTQTLAKFILLFAVFDEGKSWHSETKNSLMQDRDAASARAWPKMHTVNGYVNRTLPGLIGCHRKSVYWHVIGMGTTPEVHSIFLEGHTFLVRNHRQASLGISPITFLTAQTLLRDLGQFLLFCHIPSHQHDGMEAYVKVDSCPEEPQLRMKNNEEAEDYDDDLTDSEMDVVRFDDDNSPSIIQARSGAKKHPKTWVHYIAAEEEDWDYAPLVLAPDDRSYKSQYLNNGPQRIGRKYKKVRFMAYTDETFKTREAIQHESGILGPLLYGEVGDTLLIIFKNQASRPYNIYPHGITDVRPLYSRRLPKGVKHLKDFPILPGEIFKYKWTITVEDGPTKSDPRCLTRYYSSFVNWERDLASGLIGPLLICYKESVDQRGNQIMSDKRNVILFSVFDENRSWYLTENIQRFLPNPAGVQLEDPEFQASNIMHSINGYVFDSLQLSVCLHEVAYWYILSIGAQTDFLSVFFSGYTFKHKGVYEDTLTLFPFSGETVFMSMENPGLWILGCHNSDFRNRGMTALLKVSSCDWNTGDYYEDSYEDISAYFDSKNNAIEPRSFSQNPPVLKRHQREGTRTTLQSDQEEIDYDDTISVEMKKEDFDIYDEDENQSPRSFQKKTRHYFIAAVERLWDYGMSSSPHVLRNRAQSGSVPQFKKVVFQEFTDGSFTQPLYRGELNEHLGLLGPYIRAEVEDNIMVTFRNQASRPYSFYSSLISYEEDQRQGAEPRKNFVKPNETKTYFWKVQHHMAPTKDEFDCKAWAYFSDVDLEKDVHSGLIGPLLVCHTNTLNPAHGRQVTVQEFALFFTIFDETKSWYFTENMERNCRAPCNIQMEDPTFKENYRFHAINGYIMDTLPGLVMAQDQRIRWYLLSMGSNENIHSIHFSGHVFTVRKKEEYKMALYNLYPGVFETVEMLPSKAGIWRVECLIGEHLHAGMSTLFLVYSNKCQNPLGMASGHINDFQITASGQYGQWAPKLARLHYSGSINAWSTKEPFSWIKVDLLAPMIIHGIKTQGARQKFSSLYISQFIIMYSLDGKKWQTYRGNSTGTDMVFFGNVDSSGIKHNIFNPPIIARYIRLHPTHYSIRSTLRMELMGCDLNSCSMPLGMESKAISDAQITASSYFTNMFATWSPSKARLHLQGRSNAWRPQVNNPKEWLQVDFQKTMKVTGVTTQGVKSLDTSMYVKEFLISSSQDGHQWTLFFQNGKVKVFQGNQDSFTPVVNSLDPPLLTRYLRIHPQSWEHQIALRMEVLGCEAQDLY

SEQ ID NO: 2025 - DNA, 4371 bp, synthetic construct
  misc_feature 1..4371: note = Variant of human B-domain deleted Factor VIII
  source 1..4371: mol_type = other DNA
atgcagattgaactgtctacctgcttcttcctctgtttgctgaggttctgctttagcgccactagacggtactaccttggcgctgtggagctgtcctgggactatatgcagagtgatttgggagagcttcccgtcgacgcacgatttcctcctcgcgttccaaagtcatttccctttaacacaagccaggtgtacaagaagacgctcttcgtcgaattcaccgatcacctgttcaatatcgccaaacccagaccaccatggatgggtcttttggggcctaccatacaagcggaggtgtatgacacagttgttatcactctcaagaacatggcttctcatccggtaagtcttcacgcagtgggcgtgtcctactggaaagcttcagaaggagccgagtatgatgatcagacatcccagagggagaaagaagacgacaaggtatttccaggtgggtctcatacctatgtgtggcaagtgctcaaagagaatggccctatggcaagcgatccgccgtgtttgacttacagctacctttcacacgttgacctcgtcaaggacctcaactccgggttgattggagccttgttggtatgcagggaaggatctcttgccaaagagaagacacagaccctggccaagtttatccttctctttgctgtgttcgatgagggcaaaagttggcatagcgaaacgaagaattccctcatgcaggatcgcgacgcagccagcgccagagcttggcccaagatgcacactgtgaacggatatgtcaataggacgcttcctggcttgattgggtgtcatcggaaaagtgtctactggcacgtgatcggaatggggacaacaccagaggtccactccatatttctcgaaggccataccttccttgttcgaaaccacagacaggcatccttggggatctctcccattacctttctcactgcccaaacgctccttcgtgacttgggtcagttccttctcttttgccatatcccgtcacaccagcatgatggtatggaagcttatgtgaaagtcgacagttgtcctgaggagccacagttgcgcatgaagaataatgaagaagccgaggattacgacgacgatctcaccgattctgagatggacgtggtgaggtttgatgacgacaactctccctccatcattcaagctcggagcggggcgaagaaacaccccaagacttgggtccactatatagcggcggaagaggaggattgggattacgctcctcttgtattggcaccagatgaccgctcatacaaaagccagtacctcaacaacggaccgcagagaattggccggaagtataagaaagtgcgatttatggcctatacagacgaaacctttaagacaagggaggccatccagcatgagagtgggattttgggacctcttctttacggcgaagttggtgataccctcctcatcatcttcaagaatcaagcttctcgcccctataacatttacccacacgggatcactgacgttaggcctttgtatagcagaagacttcccaaaggcgtgaagcatctcaaagacttccccattttgccaggcgagatctttaagtacaaatggaccattacagtggaagatggaccgactaaatcagaccctcgatgccttacgcggtactattcctccttcgtgaattgggagagagatttggcaagcggactcataggaccactcctcatctgttacaaggaatctgtagaccagaggggtaaccagattatgagtgataaacgcaatgtgatcctttttagcgtcttcgacgagaaccggtcctggtacttgaccgagaatatacaaaggttccttcccaaccccgcaggcgttcagttggaagaccctgagtttcaggccagcaatattatgcactcaatcaacggctatgtgtttgatagtctccagctttctgtttgcctccatgaagtagcctattggtacatcttgtcaattggtgctcaaacagacttcctctccgtcttcttctccggctacacctttaagcacaagggcgtgtatgaggacactctcacactctttccattttctggagaaaccgtgttcatgagcatggagaatccaggcctttggatcttgggttgccacaacagtgattttcgcaatcggggaatgactgctctcctcaaagtcagcagctgtgattggaacacaggcgactattacgaagattcttacgaggacataagtgcctactttgactccaagaataacgccattgagcccagatcattctcccagaatcctcccgtgcttaaaaggcatcagcgcgaaggtaccagaactactcttcagtctgatcaagaggagattgactatgacgacaccattagcgtggaaatgaagaaggaggatttcgatatctatgacgaagatgagaaccagtctccgcggagctttcagaagaagacgcgacactacttcattgcagcagtcgaaaggctttgggactacggtatgtcatcatcccctcatgtgttgcgcaatagagctcagagtggaagtgttccacagttcaagaaagtcgtctttcaagagtttacagatggcagcttcacacagcctctctatcggggcgagcttaacgaacatttgggactccttggtccctatatccgagccgaagtggaggacaacattatggttacctttaggaatcaagcctctcgcccctacagcttctactcctccctcatcagttatgaggaggatcagagacaaggcgctgaaccacggaagaactttgtgaaaccgaatgagacgaagacctacttctggaaagtacagcaccacatggcccccacaaaagacgaattcgattgcaaagcatgggcgtatttttcagacgttgacttggagaaagatgtacattcaggacttattggtcctttgttggtgtgtcacactaacactctcaatccagcccatggcaggcaggtgacagtccaggaattcgctcttttctttaccatctttgatgagaccaagtcctggtacttcacggaaaacatggagcgcaattgcagagccccctgtaacatacagatggaggaccctacctttaaggaaaattatcggttccacgcaatcaacggatacattatggatacactccctggccttgtgatggctcaggaccaacgaatcaggtggtacctcctcagcatgggttctaatgagaacatacactccattcacttttcaggacatgtgttcactgtccggaagaaagaagagtataagatggccctctacaatttgtatccaggcgtgtttgagaccgttgaaatgcttccctctaaagctggcatctggagagtagagtgcttgatcggagaacatcttcacgcaggtatgagcaccttgttcctcgtgtacagcaacaaatgtcagaatccacttggcatggccagtggacacattcgcgactttcagatcacagcatctggccagtatggacaatgggccccaaagttggctcgcctccattactccggtagcataaatgcgtggtccactaaagaacctttcagctggattaaggtcgatcttcttgcccccatgatcatccacggcattaagacacagggagcgaggcagaaattctcctccctctacatctcacagttcattattatgtatagtttggacggcaagaagtggcaaacttatagaggtaacagtactggaacagacatggtgttcttcggcaacgttgatagctctggcatcaaacacaacatctttaatcctcccataatagctcggtacatcagattgcatccgacccacagtagcattaggagtacactccgaatggagcttatgggttgcgacttgaattcctgttcaatgccactcggaatggagtctaaagccatctctgatgcacagataaccgccagtagctactttacgaacatgtttgctacgtggtcaccctctaaggcaaggcttcatttgcaaggccggtctaatgcctggagacctcaggtgaacaacccgaaagaatggctccaggtggactttcagaagaccatgaaagtaacaggtgtcactactcagggagttaagtccttggatactagcatgtatgtgaaggagttccttatttcctcatcacaagatggccaccagtggaccctcttctttcagaatggtaaggtcaaagtgtttcagggcaatcaagacagcttcacacccgtggtgaacagtcttgatcctccactcttgacacgataccttcgaatccatccacagtcttgggagcaccagattgcattgcgcatggaagtacttggatgcgaggctcaggacctctac

SEQ ID NO: 2026 - protein, 1457 aa, synthetic construct
  REGION 1..1457: note = Variant of human B-domain deleted Factor VIII
MQIELSTCFFLCLLRFCFSATRRYYLGAVELSWDYMQSDLGELPVDARFPPRVPKSFPFNTSQVYKKTLFVEFTDHLFNIAKPRPPWMGLLGPTIQAEVYDTVVITLKNMASHPVSLHAVGVSYWKASEGAEYDDQTSQREKEDDKVFPGGSHTYVWQVLKENGPMASDPPCLTYSYLSHVDLVKDLNSGLIGALLVCREGSLAKEKTQTLAKFILLFAVFDEGKSWHSETKNSLMQDRDAASARAWPKMHTVNGYVNRTLPGLIGCHRKSVYWHVIGMGTTPEVHSIFLEGHTFLVRNHRQASLGISPITFLTAQTLLRDLGQFLLFCHIPSHQHDGMEAYVKVDSCPEEPQLRMKNNEEAEDYDDDLTDSEMDVVRFDDDNSPSIIQARSGAKKHPKTWVHYIAAEEEDWDYAPLVLAPDDRSYKSQYLNNGPQRIGRKYKKVRFMAYTDETFKTREAIQHESGILGPLLYGEVGDTLLIIFKNQASRPYNIYPHGITDVRPLYSRRLPKGVKHLKDFPILPGEIFKYKWTITVEDGPTKSDPRCLTRYYSSFVNWERDLASGLIGPLLICYKESVDQRGNQIMSDKRNVILFSVFDENRSWYLTENIQRFLPNPAGVQLEDPEFQASNIMHSINGYVFDSLQLSVCLHEVAYWYILSIGAQTDFLSVFFSGYTFKHKGVYEDTLTLFPFSGETVFMSMENPGLWILGCHNSDFRNRGMTALLKVSSCDWNTGDYYEDSYEDISAYFDSKNNAIEPRSFSQNPPVLKRHQREGTRTTLQSDQEEIDYDDTISVEMKKEDFDIYDEDENQSPRSFQKKTRHYFIAAVERLWDYGMSSSPHVLRNRAQSGSVPQFKKVVFQEFTDGSFTQPLYRGELNEHLGLLGPYIRAEVEDNIMVTFRNQASRPYSFYSSLISYEEDQRQGAEPRKNFVKPNETKTYFWKVQHHMAPTKDEFDCKAWAYFSDVDLEKDVHSGLIGPLLVCHTNTLNPAHGRQVTVQEFALFFTIFDETKSWYFTENMERNCRAPCNIQMEDPTFKENYRFHAINGYIMDTLPGLVMAQDQRIRWYLLSMGSNENIHSIHFSGHVFTVRKKEEYKMALYNLYPGVFETVEMLPSKAGIWRVECLIGEHLHAGMSTLFLVYSNKCQNPLGMASGHIRDFQITASGQYGQWAPKLARLHYSGSINAWSTKEPFSWIKVDLLAPMIIHGIKTQGARQKFSSLYISQFIIMYSLDGKKWQTYRGNSTGTDMVFFGNVDSSGIKHNIFNPPIIARYIRLHPTHSSIRSTLRMELMGCDLNSCSMPLGMESKAISDAQITASSYFTNMFATWSPSKARLHLQGRSNAWRPQVNNPKEWLQVDFQKTMKVTGVTTQGVKSLDTSMYVKEFLISSSQDGHQWTLFFQNGKVKVFQGNQDSFTPVVNSLDPPLLTRYLRIHPQSWEHQIALRMEVLGCEAQDLY

SEQ ID NO: 2027 - DNA, 4371 bp, synthetic construct
  misc_feature 1..4371: note = Variant of human B-domain deleted Factor VIII
  source 1..4371: mol_type = other DNA
atgcagattgaactgtctacctgcttcttcctctgtttgctgaggttctgctttagcgccactagacggtactaccttggcgctgtggagctgtcctgggactatatgcagagtgatttgggagagcttcccgtcgacgcacgatttcctcctcgcgttccaaagtcatttccctttaacacaagccaggtgtacaagaagacgctcttcgtcgaattcaccgatcacctgttcaatatcgccaaacccagaccaccatggatgggtcttttggggcctaccatacaagcggaggtgtatgacacagttgttatcactctcaagaacatggcttctcatccggtaagtcttcacgcagtgggcgtgtcctactggaaagcttcagaaggagccgagtatgatgatcagacatcccagagggagaaagaagacgacaaggtatttccaggtgggtctcatacctatgtgtggcaagtgctcaaagagaatggccctatggcaagcgatccgccgtgtttgacttacagctacctttcacacgttgacctcgtcaaggacctcaactccgggttgattggagccttgttggtatgcagggaaggatctcttgccaaagagaagacacagaccctggccaagtttatccttctctttgctgtgttcgatgagggcaaaagttggcatagcgaaacgaagaattccctcatgcaggatcgcgacgcagccagcgccagagcttggcccaagatgcacactgtgaacggatatgtcaataggacgcttcctggcttgattgggtgtcatcggaaaagtgtctactggcacgtgatcggaatggggacaacaccagaggtccactccatatttctcgaaggccataccttccttgttcgaaaccacagacaggcatccttggggatctctcccattacctttctcactgcccaaacgctccttcgtgacttgggtcagttccttctcttttgccatatcccgtcacaccagcatgatggtatggaagcttatgtgaaagtcgacagttgtcctgaggagccacagttgcgcatgaagaataatgaagaagccgaggattacgacgacgatctcaccgattctgagatggacgtggtgaggtttgatgacgacaactctccctccatcattcaagctcggagcggggcgaagaaacaccccaagacttgggtccactatatagcggcggaagaggaggattgggattacgctcctcttgtattggcaccagatgaccgctcatacaaaagccagtacctcaacaacggaccgcagagaattggccggaagtataagaaagtgcgatttatggcctatacagacgaaacctttaagacaagggaggccatccagcatgagagtgggattttgggacctcttctttacggcgaagttggtgataccctcctcatcatcttcaagaatcaagcttctcgcccctataacatttacccacacgggatcactgacgttaggcctttgtatagcagaagacttcccaaaggcgtgaagcatctcaaagacttccccattttgccaggcgagatctttaagtacaaatggaccattacagtggaagatggaccgactaaatcagaccctcgatgccttacgcggtactattcctccttcgtgaattgggagagagatttggcaagcggactcataggaccactcctcatctgttacaaggaatctgtagaccagaggggtaaccagattatgagtgataaacgcaatgtgatcctttttagcgtcttcgacgagaaccggtcctggtacttgaccgagaatatacaaaggttccttcccaaccccgagggcgttcagttggaagaccctgagtttcaggccagcaatattatgcactcaatcaacggctatgtgtttgatagtctccagctttctgtttgcctccatgaagtagcctattggtacatcttgtcaattggtgctcaaacagacttcctctccgtcttcttctccggctacacctttaagcacaagggcgtgtatgaggacactctcacactctttccattttctggagaaaccgtgttcatgagcatggagaatccaggcctttggatcttgggttgccacaacagtgattttcgcaatcggggaatgactgctctcctcaaagtcagcagctgtgattggaacacaggcgactattacgaagattcttacgaggacataagtgcctactttgactccaagaataacgccattgagcccagatcattctcccagaatcctcccgtgcttaaaaggcatcagcgcgaaggtaccagaactactcttcagtctgatcaagaggagattgactatgacgacaccattagcgtggaaatgaagaaggaggatttcgatatctatgacgaagatgagaaccagtctccgcggagctttcagaagaagacgcgacactacttcattgcagcagtcgaaaggctttgggactacggtatgtcatcatcccctcatgtgttgcgcaatagagctcagagtggaagtgttccacagttcaagaaagtcgtctttcaagagtttacagatggcagcttcacacagcctctctatcggggcgagcttaacgaacatttgggactccttggtccctatatccgagccgaagtggaggacaacattatggttacctttaggaatcaagcctctcgcccctacagcttctactcctccctcatcagttatgaggaggatcagagacaaggcgctgaaccacggaagaactttgtgaaaccgaatgagacgaagacctacttctggaaagtacagcaccacatggcccccacaaaagacgaattcgattgcaaagcatgggcgtatttttcagacgttgacttggagaaagatgtacattcaggacttattggtcctttgttggtgtgtcacactaacactctcaatccagcccatggcaggcaggtgacagtccaggaattcgctcttttctttaccatctttgatgagaccaagtcctggtacttcacggaaaacatggagcgcaattgcagagccccctgtaacatacagatggaggaccctacctttaaggaaaattatcggttccacgcaatcaacggatacattatggatacactccctggccttgtgatggctcaggaccaacgaatcaggtggtacctcctcagcatgggttctaatgagaacatacactccattcacttttcaggacatgtgttcactgtccggaagaaagaagagtataagatggccctctacaatttgtatccaggcgtgtttgagaccgttgaaatgcttccctctaaagctggcatctggagagtagagtgcttgatcggagaacatcttcacgcaggtatgagcaccttgttcctcgtgtacagcaacaaatgtcagaatccacttggcatggccagtggacacattcgcgactttcagatcacagcatctggccagtatggacaatgggccccaaagttggctcgcctccattactccggtagcataaatgcgtggtccactaaagaacctttcagctggattaaggtcgatcttcttgcccccatgatcatccacggcattaagacacagggagcgaggcagaaattctcctccctctacatctcacagttcattattatgtatagtttggacggcaagaagtggcaaacttatagaggtaacagtactggaacagacatggtgttcttcggcaacgttgatagctctggcatcaaacacaacatctttaatcctcccataatagctcggtacatcagattgcatccgacccactacagcattaggagtacactccgaatggagcttatgggttgcgacttgaattcctgttcaatgccactcggaatggagtctaaagccatctctgatgcacagataaccgccagtagctactttacgaacatgtttgctacgtggtcaccctctaaggcaaggcttcatttgcaaggccggtctaatgcctggagacctcaggtgaacaacccgaaagaatggctccaggtggactttcagaagaccatgaaagtaacaggtgtcactactcagggagttaagtccttggatactagcatgtatgtgaaggagttccttatttcctcatcacaagatggccaccagtggaccctcttctttcagaatggtaaggtcaaagtgtttcagggcaatcaagacagcttcacacccgtggtgaacagtcttgatcctccactcttgacacgataccttcgaatccatccacagtcttgggagcaccagattgcattgcgcatggaagtacttggatgcgaggctcaggacctctac

SEQ ID NO: 2028 - protein, 1457 aa, synthetic construct
  REGION 1..1457: note = Variant of human B-domain deleted Factor VIII
MQIELSTCFFLCLLRFCFSATRRYYLGAVELSWDYMQSDLGELPVDARFPPRVPKSFPFNTSQVYKKTLFVEFTDHLFNIAKPRPPWMGLLGPTIQAEVYDTVVITLKNMASHPVSLHAVGVSYWKASEGAEYDDQTSQREKEDDKVFPGGSHTYVWQVLKENGPMASDPPCLTYSYLSHVDLVKDLNSGLIGALLVCREGSLAKEKTQTLAKFILLFAVFDEGKSWHSETKNSLMQDRDAASARAWPKMHTVNGYVNRTLPGLIGCHRKSVYWHVIGMGTTPEVHSIFLEGHTFLVRNHRQASLGISPITFLTAQTLLRDLGQFLLFCHIPSHQHDGMEAYVKVDSCPEEPQLRMKNNEEAEDYDDDLTDSEMDVVRFDDDNSPSIIQARSGAKKHPKTWVHYIAAEEEDWDYAPLVLAPDDRSYKSQYLNNGPQRIGRKYKKVRFMAYTDETFKTREAIQHESGILGPLLYGEVGDTLLIIFKNQASRPYNIYPHGITDVRPLYSRRLPKGVKHLKDFPILPGEIFKYKWTITVEDGPTKSDPRCLTRYYSSFVNWERDLASGLIGPLLICYKESVDQRGNQIMSDKRNVILFSVFDENRSWYLTENIQRFLPNPEGVQLEDPEFQASNIMHSINGYVFDSLQLSVCLHEVAYWYILSIGAQTDFLSVFFSGYTFKHKGVYEDTLTLFPFSGETVFMSMENPGLWILGCHNSDFRNRGMTALLKVSSCDWNTGDYYEDSYEDISAYFDSKNNAIEPRSFSQNPPVLKRHQREGTRTTLQSDQEEIDYDDTISVEMKKEDFDIYDEDENQSPRSFQKKTRHYFIAAVERLWDYGMSSSPHVLRNRAQSGSVPQFKKVVFQEFTDGSFTQPLYRGELNEHLGLLGPYIRAEVEDNIMVTFRNQASRPYSFYSSLISYEEDQRQGAEPRKNFVKPNETKTYFWKVQHHMAPTKDEFDCKAWAYFSDVDLEKDVHSGLIGPLLVCHTNTLNPAHGRQVTVQEFALFFTIFDETKSWYFTENMERNCRAPCNIQMEDPTFKENYRFHAINGYIMDTLPGLVMAQDQRIRWYLLSMGSNENIHSIHFSGHVFTVRKKEEYKMALYNLYPGVFETVEMLPSKAGIWRVECLIGEHLHAGMSTLFLVYSNKCQNPLGMASGHIRDFQITASGQYGQWAPKLARLHYSGSINAWSTKEPFSWIKVDLLAPMIIHGIKTQGARQKFSSLYISQFIIMYSLDGKKWQTYRGNSTGTDMVFFGNVDSSGIKHNIFNPPIIARYIRLHPTHYSIRSTLRMELMGCDLNSCSMPLGMESKAISDAQITASSYFTNMFATWSPSKARLHLQGRSNAWRPQVNNPKEWLQVDFQKTMKVTGVTTQGVKSLDTSMYVKEFLISSSQDGHQWTLFFQNGKVKVFQGNQDSFTPVVNSLDPPLLTRYLRIHPQSWEHQIALRMEVLGCEAQDLY

SEQ ID NO: 2029 - DNA, 4371 bp, synthetic construct
  misc_feature 1..4371: note = Variant of human B-domain deleted Factor VIII
  source 1..4371: mol_type = other DNA
atgcagattgaactgtctacctgcttcttcctctgtttgctgaggttctgctttagcgccactagacggtactaccttggcgctgtggagctgtcctgggactatatgcagagtgatttgggagagcttcccgtcgacgcacgatttcctcctcgcgttccaaagtcatttccctttaacacaagccaggtgtacaagaagacgctcttcgtcgaattcaccgatcacctgttcaatatcgccaaacccagaccaccatggatgggtcttttggggcctaccatacaagcggaggtgtatgacacagttgttatcactctcaagaacatggcttctcatccggtaagtcttcacgcagtgggcgtgtcctactggaaagcttcagaaggagccgagtatgatgatcagacatcccagagggagaaagaagacgacaaggtatttccaggtgggtctcatacctatgtgtggcaagtgctcaaagagaatggccctatggcaagcgatccgccgtgtttgacttacagctacctttcacacgttgacctcgtcaaggacctcaactccgggttgattggagccttgttggtatgcagggaaggatctcttgccaaagagaagacacagaccctggccaagtttatccttctctttgctgtgttcgatgagggcaaaagttggcatagcgaaacgaagaattccctcatgcaggatcgcgacgcagccagcgccagagcttggcccaagatgcacactgtgaacggatatgtcaataggacgcttcctggcttgattgggtgtcatcggaaaagtgtctactggcacgtgatcggaatggggacaacaccagaggtccactccatatttctcgaaggccataccttccttgttcgaaaccacagacaggcatccttggggatctctcccattacctttctcactgcccaaacgctccttcgtgacttgggtcagttccttctcttttgccatatcccgtcacaccagcatgatggtatggaagcttatgtgaaagtcgacagttgtcctgaggagccacagttgcgcatgaagaataatgaagaagccgaggattacgacgacgatctcaccgattctgagatggacgtggtgaggtttgatgacgacaactctccctccatcattcaagctcggagcggggcgaagaaacaccccaagacttgggtccactatatagcggcggaagaggaggattgggattacgctcctcttgtattggcaccagatgaccgctcatacaaaagccagtacctcaacaacggaccgcagagaattggccggaagtataagaaagtgcgatttatggcctatacagacgaaacctttaagacaagggaggccatccagcatgagagtgggattttgggacctcttctttacggcgaagttggtgataccctcctcatcatcttcaagaatcaagcttctcgcccctataacatttacccacacgggatcactgacgttaggcctttgtatagcagaagacttcccaaaggcgtgaagcatctcaaagacttccccattttgccaggcgagatctttaagtacaaatggaccattacagtggaagatggaccgactaaatcagaccctcgatgccttacgcggtactattcctccgaggtgaattgggagagagatttggcaagcggactcataggaccactcctcatctgttacaaggaatctgtagaccagaggggtaaccagattatgagtgataaacgcaatgtgatcctttttagcgtcttcgacgagaaccggtcctggtacttgaccgagaatatacaaaggttccttcccaaccccgcaggcgttcagttggaagaccctgagtttcaggccagcaatattatgcactcaatcaacggctatgtgtttgatagtctccagctttctgtttgcctccatgaagtagcctattggtacatcttgtcaattggtgctcaaacagacttcctctccgtcttcttctccggctacacctttaagcacaagaacgtgtatgaggacactctcacactctttccattttctggagaaaccgtgttcatgagcatggagaatccaggcctttggatcttgggttgccacaacagtgattttcgcaatcggggaatgactgctctcctcaaagtcagcagctgtgattggaacacaggcgacaaatacgaagattcttacgaggacataagtgcctactttgactccaagaataacgccattgagcccagatcattctcccagaatcctcccgtgcttaaaaggcatcagcgcgaaggtaccagaactactcttcagtctgatcaagaggagattgactatgacgacaccattagcgtggaaatgaagcaggaggatttcgatatctatgacgaagatgagaaccagtctccgcggagctttcagaagaagacgcgacactacttcattgcagcagtcgaaaggctttgggactacggtatgtcatcaagccctcatgtgttgcgcaatagagctcagagtggaagtgttccacagttcaagaaagtcgtctttcaagagtttacagatggcagcttcacacagcctctctatcggggcgagcttaacgaacatttgggactccttggtccctatatccgagccgaagtggaggacaacattatggttacctttaggaatcaagcctctcgcccctacagcttctactcctccctcatcagctatgaggaggatcaaagacaaggcgctgaaccacggaagaactttgtgaaaccgaatgagacgaagacctacttctggaaagtacagcaccacatggcccccacaaaagacgaattcgattgcaaagcatgggcgtatttttcagacgttgacttggagaaagatgtacattcaggacttattggtcctttgttggtgtgtcacactaacactctcaatccagcccatggcaggcaggtgacagtccaggaattcgctcttttctttaccatctttgatgagaccaagtcctggtacttcacggaaaacatggagcgcaattgcagagccccctgtaacatacagatggaggaccctacctttaaggaaaattatcggttccacgcaatcaacggatacattatggatacactccctggccttgtgatggctcaggaccaacgaatcaggtggtacctcctcagcatgggttctaatgagaacatacactccattcacttttcaggacatgtgttcactgtccggaagaaagaagagtataagatggccctctacaatttgtatccaggcgtgtttgagaccgttgaaatgcttccctctaaagctggcatctggagagtagagtgcttgatcggagaacatcttcacgcaggtatgagcaccttgttcctcgtgtacagcaacaaatgtcagaatccacttggcatggccagtggacacattcgcgactttcagatcacagcatctggccagtatggacaatgggccccaaagttggctcgcctccattactccggtagcataaatgcgtggtccactaaagaacctttcagctggattaaggtcgatcttcttgcccccatgatcatccacggcattaagacacagggagcgaggcagaaattctcctccctctacatctcacagttcattattatgtatagtttggacggcaagaagtggcaaacttatagaggtaacagtactggaacagacatggtgttcttcggcaacgttgatagctctggcatcaaacacaacatctttaatcctcccataatagctcggtacatcagattgcatccgacccactacagcattaggagtacactccgaatggagcttatgggttgcgacttgaattcctgttcaatgccactcggaatggagtctaaagccatctctgatgcacagataaccgccagtagctactttacgaacatgtttgctacgtggtcaccctctaaggcaaggcttcatttgcaaggccggtctaatgcctggagacctcaggtgaacaacccgaaagaatggctccaggtggactttcagaagaccatgaaagtaacaggtgtcactactcagggagttaagtccttggatactagcatgtatgtgaaggagttccttatttcctcatcacaagatggccaccagtggaccctcttctttcagaatggtaaggtcaaagtgtttcagggcaatcaagacagcttcacacccgtggtgaacagtcttgatcctccactcttgacacgataccttcgaatccatccacagtcttgggagcaccagattgcattgcgcatggaagtacttggatgcgaggctcaggacctctac

SEQ ID NO: 2030 - protein, 1457 aa, synthetic construct
  REGION 1..1457: note = Variant of human B-domain deleted Factor VIII
MQIELSTCFFLCLLRFCFSATRRYYLGAVELSWDYMQSDLGELPVDARFPPRVPKSFPFNTSQVYKKTLFVEFTDHLFNIAKPRPPWMGLLGPTIQAEVYDTVVITLKNMASHPVSLHAVGVSYWKASEGAEYDDQTSQREKEDDKVFPGGSHTYVWQVLKENGPMASDPPCLTYSYLSHVDLVKDLNSGLIGALLVCREGSLAKEKTQTLAKFILLFAVFDEGKSWHSETKNSLMQDRDAASARAWPKMHTVNGYVNRTLPGLIGCHRKSVYWHVIGMGTTPEVHSIFLEGHTFLVRNHRQASLGISPITFLTAQTLLRDLGQFLLFCHIPSHQHDGMEAYVKVDSCPEEPQLRMKNNEEAEDYDDDLTDSEMDVVRFDDDNSPSIIQARSGAKKHPKTWVHYIAAEEEDWDYAPLVLAPDDRSYKSQYLNNGPQRIGRKYKKVRFMAYTDETFKTREAIQHESGILGPLLYGEVGDTLLIIFKNQASRPYNIYPHGITDVRPLYSRRLPKGVKHLKDFPILPGEIFKYKWTITVEDGPTKSDPRCLTRYYSSEVNWERDLASGLIGPLLICYKESVDQRGNQIMSDKRNVILFSVFDENRSWYLTENIQRFLPNPAGVQLEDPEFQASNIMHSINGYVFDSLQLSVCLHEVAYWYILSIGAQTDFLSVFFSGYTFKHKNVYEDTLTLFPFSGETVFMSMENPGLWILGCHNSDFRNRGMTALLKVSSCDWNTGDKYEDSYEDISAYFDSKNNAIEPRSFSQNPPVLKRHQREGTRTTLQSDQEEIDYDDTISVEMKQEDFDIYDEDENQSPRSFQKKTRHYFIAAVERLWDYGMSSSPHVLRNRAQSGSVPQFKKVVFQEFTDGSFTQPLYRGELNEHLGLLGPYIRAEVEDNIMVTFRNQASRPYSFYSSLISYEEDQRQGAEPRKNFVKPNETKTYFWKVQHHMAPTKDEFDCKAWAYFSDVDLEKDVHSGLIGPLLVCHTNTLNPAHGRQVTVQEFALFFTIFDETKSWYFTENMERNCRAPCNIQMEDPTFKENYRFHAINGYIMDTLPGLVMAQDQRIRWYLLSMGSNENIHSIHFSGHVFTVRKKEEYKMALYNLYPGVFETVEMLPSKAGIWRVECLIGEHLHAGMSTLFLVYSNKCQNPLGMASGHIRDFQITASGQYGQWAPKLARLHYSGSINAWSTKEPFSWIKVDLLAPMIIHGIKTQGARQKFSSLYISQFIIMYSLDGKKWQTYRGNSTGTDMVFFGNVDSSGIKHNIFNPPIIARYIRLHPTHYSIRSTLRMELMGCDLNSCSMPLGMESKAISDAQITASSYFTNMFATWSPSKARLHLQGRSNAWRPQVNNPKEWLQVDFQKTMKVTGVTTQGVKSLDTSMYVKEFLISSSQDGHQWTLFFQNGKVKVFQGNQDSFTPVVNSLDPPLLTRYLRIHPQSWEHQIALRMEVLGCEAQDLY

SEQ ID NO: 2031 - DNA, 4371 bp, synthetic construct
  misc_feature 1..4371: note = Variant of human B-domain deleted Factor VIII
  source 1..4371: mol_type = other DNA
atgcagattgaactgtctacctgcttcttcctctgtttgctgaggttctgctttagcgccactagacggtactaccttggcgctgtggagctgtcctgggactatatgcagagtgatttgggagagcttcccgtcgacgcacgatttcctcctcgcgttccaaagtcatttccctttaacacaagccaggtgtacaagaagacgctcttcgtcgaattcaccgatcacctgttcaatatcgccaaacccagaccaccatggatgggtcttttggggcctaccatacaagcggaggtgtatgacacagttgttatcactctcaagaacatggcttctcatccggtaagtcttcacgcagtgggcgtgtcctactggaaagcttcagaaggagccgagtatgatgatcagacatcccagagggagaaagaagacgacaaggtatttccaggtgggtctcatacctatgtgtggcaagtgctcaaagagaatggccctatggcaagcgatccgccgtgtttgacttacagctacctttcacacgttgacctcgtcaaggacctcaactccgggttgattggagccttgttggtatgcagggaaggatctcttgccaaagagaagacacagaccctggccaagtttatccttctctttgctgtgttcgatgagggcaaaagttggcatagcgaaacgaagaattccctcatgcaggatcgcgacgcagccagcgccagagcttggcccaagatgcacactgtgaacggatatgtcaataggacgcttcctggcttgattgggtgtcatcggaaaagtgtctactggcacgtgatcggaatggggacaacaccagaggtccactccatatttctcgaaggccataccttccttgttcgaaaccacagacaggcatccttggggatctctcccattacctttctcactgcccaaacgctccttcgtgacttgggtcagttccttctcttttgccatatcccgtcacaccagcatgatggtatggaagcttatgtgaaagtcgacagttgtcctgaggagccacagttgcgcatgaagaataatgaagaagccgaggattacgacgacgatctcaccgattctgagatggacgtggtgaggtttgatgacgacaactctccctccatcattcaagctcggagcggggcgaagaaacaccccaagacttgggtccactatatagcggcggaagaggaggattgggattacgctcctcttgtattggcaccagatgaccgctcatacaaaagccagtacctcaacaacggaccgcagagaattggccggaagtataagaaagtgcgatttatggcctatacagacgaaacctttaagacaagggaggccatccagcatgagagtgggattttgggacctcttctttacggcgaagttggtgataccctcctcatcatcttcaagaatcaagcttctcgcccctataacatttacccacacgggatcactgacgttaggcctttgtatagcagaagacttcccaaaggcgtgaagcatctcaaagacttccccattttgccaggcgagatctttaagtacaaatggaccattacacctgaagatggaccgactaaatcagaccctcgatgccttacgcggtactattcctccttcgtgaattgggagagagatttggcaagcggactcataggaccactcctcatctgttacaaggaatctgtagaccagaggggtaaccagattatgagtgataaacgcaatgtgatcctttttagcgtcttcgacgagaaccggtcctggtacttgaccgagaatatacaaaggttccttcccaaccccgcagaggttcagttggaagaccctgagtttcaggccagcaatattatgcactcaatcaacggctatgtgtttgatagtctccagctttctgtttgcctccatgaagtagcctattggtacatcttgtcaattggtgctcaaacagacttcctctccgtcttcttctccggctacacctttaagcacaagggcgtgtatgaggacactctcacactctttccattttctggagaaaccgtgttcatgagcatggagaatccaggcctttggatcttgggttgccacaacagtgattttcgcaatcggggaatgactgctctcctcaaagtcagcagctgtgattggaacacaggcgactattacgaagattcttacgaggacataagtgcctactttgactccaagaataacgccattgagcccagatcattctcccagaatcctcccgtgcttaaaaggcatcagcgcgaaggtaccagaactactcttcagtctgatcaagaggagattgactatgacgacaccattagcgtggaaatgaagaaggaggatttcgatatctatgacgaggatgggaaccagtctccgcggagctttcagaagaagacgcgacactacttcattgcagcagtcgaaaggctttgggactacggtatgtcatcatcccctcatgtgttgcgcaatagagctcagagtggaagtgttccacagttcaagaaagtcgtctttcaagagtttacagatggcagcttcacacagcctctctatcggggcgagcttaacgaacatttgggactccttggtccctatatccgagccgaagtggaggacaacattatggttacctttaggaatcaagcctctcgcccctacagcttctactcctccctcatcagttatgaggaggatcagagacaaggcgctgaaccacggaagaactttgtgaaaccgaatgagacgaagacctacttctggaaagtacagcaccacatggcccccacaaaagacgaattcgattgcaaagcatgggcgtatttttcagacgttgacttggagaaagatgtacattcaggacttattggtcctttgttggtgtgtcacactaacactctcaatccagcccatggcaggcaggtgacagtccaggaattcgctcttttctttaccatctttgatgagaccaagtcctggtacttcacggaaaacatggagcgcaattgcagagccccctgtaacatacagatggaggaccctacctttaaggaaaattatcggttccacgcaatcaacggatacattatggatacactccctggccttgtgatggctcaggaccaacgaatcaggtggtacctcctcagcatgggttctaatgagaacatacactccattcacttttcaggacatgtgttcactgtccggaagaaagaagagtataagatggccctctacaatttgtatccaggcgtgtttgggaccgttgaaatgcttccctctaaagctggcatctggagagtagagtgcttgatcggagaacatcttcacgcaggtatgagcaccttgttcctcgtgtacagcaacaaatgtcagaatccacttggcatggccagtggacacattcgcgactttcagatcacagcatctggccagtatggacaatgggccccaaagttggctcgcctccattactccggtagcataaatgcgtggtccactaaagaacctttcagctggattaaggtcgatcttcttgcccccatgatcatccacggcattaagacacagggagcgaggcagaaattctcctccctctacatctcacagttcattattatgtatagtttggacggcaagaagtggcaaacttatagaggtaacagtactggaacagacatggtgttcttcggcaacgttgatagctctggcatcaaacacaacatctttaatcctcccataatagctcggtacatcagattgcatccgacccactacagcattaggagtacactccgaatggagcttatgggttgcgacttgaattcctgttcaatgccactcggaatggagtctaaagccatctctgatgcacagataaccgccagtagctactttacgaacatgtttgctacgtggtcaccctctaaggcaaggcttcatttgcaaggccggtctaatgcctggagacctcaggtgaacaacccgaaagaatggctccaggtggactttcagaagaccatgaaagtaacaggtgtcactactcagggagttaagtccttggatactagcatgtatgtgaaggagttccttatttcctcatcacaagatggccaccagtggaccctcttctttcagaatggtaaggtcaaagtgtttcagggcaatcaagacagcttcacacccgtggtgaacagtcttgatcctccactcttgacacgataccttcgaatccatccacagtcttgggagcaccagattgcattgcgcatggaagtacttggatgcgaggctcaggacctctac

SEQ ID NO: 2032 - protein, 1457 aa, synthetic construct
  REGION 1..1457: note = Variant of human B-domain deleted Factor VIII
MQIELSTCFFLCLLRFCFSATRRYYLGAVELSWDYMQSDLGELPVDARFPPRVPKSFPFNTSQVYKKTLFVEFTDHLFNIAKPRPPWMGLLGPTIQAEVYDTVVITLKNMASHPVSLHAVGVSYWKASEGAEYDDQTSQREKEDDKVFPGGSHTYVWQVLKENGPMASDPPCLTYSYLSHVDLVKDLNSGLIGALLVCREGSLAKEKTQTLAKFILLFAVFDEGKSWHSETKNSLMQDRDAASARAWPKMHTVNGYVNRTLPGLIGCHRKSVYWHVIGMGTTPEVHSIFLEGHTFLVRNHRQASLGISPITFLTAQTLLRDLGQFLLFCHIPSHQHDGMEAYVKVDSCPEEPQLRMKNNEEAEDYDDDLTDSEMDVVRFDDDNSPSIIQARSGAKKHPKTWVHYIAAEEEDWDYAPLVLAPDDRSYKSQYLNNGPQRIGRKYKKVRFMAYTDETFKTREAIQHESGILGPLLYGEVGDTLLIIFKNQASRPYNIYPHGITDVRPLYSRRLPKGVKHLKDFPILPGEIFKYKWTITPEDGPTKSDPRCLTRYYSSFVNWERDLASGLIGPLLICYKESVDQRGNQIMSDKRNVILFSVFDENRSWYLTENIQRFLPNPAEVQLEDPEFQASNIMHSINGYVFDSLQLSVCLHEVAYWYILSIGAQTDFLSVFFSGYTFKHKGVYEDTLTLFPFSGETVFMSMENPGLWILGCHNSDFRNRGMTALLKVSSCDWNTGDYYEDSYEDISAYFDSKNNAIEPRSFSQNPPVLKRHQREGTRTTLQSDQEEIDYDDTISVEMKKEDFDIYDEDGNQSPRSFQKKTRHYFIAAVERLWDYGMSSSPHVLRNRAQSGSVPQFKKVVFQEFTDGSFTQPLYRGELNEHLGLLGPYIRAEVEDNIMVTFRNQASRPYSFYSSLISYEEDQRQGAEPRKNFVKPNETKTYFWKVQHHMAPTKDEFDCKAWAYFSDVDLEKDVHSGLIGPLLVCHTNTLNPAHGRQVTVQEFALFFTIFDETKSWYFTENMERNCRAPCNIQMEDPTFKENYRFHAINGYIMDTLPGLVMAQDQRIRWYLLSMGSNENIHSIHFSGHVFTVRKKEEYKMALYNLYPGVFGTVEMLPSKAGIWRVECLIGEHLHAGMSTLFLVYSNKCQNPLGMASGHIRDFQITASGQYGQWAPKLARLHYSGSINAWSTKEPFSWIKVDLLAPMIIHGIKTQGARQKFSSLYISQFIIMYSLDGKKWQTYRGNSTGTDMVFFGNVDSSGIKHNIFNPPIIARYIRLHPTHYSIRSTLRMELMGCDLNSCSMPLGMESKAISDAQITASSYFTNMFATWSPSKARLHLQGRSNAWRPQVNNPKEWLQVDFQKTMKVTGVTTQGVKSLDTSMYVKEFLISSSQDGHQWTLFFQNGKVKVFQGNQDSFTPVVNSLDPPLLTRYLRIHPQSWEHQIALRMEVLGCEAQDLY

SEQ ID NO: 2033 - DNA, 4371 bp, synthetic construct
  misc_feature 1..4371: note = Variant of human B-domain deleted Factor VIII
  source 1..4371: mol_type = other DNA
atgcagattgaactgtctacctgcttcttcctctgtttgctgaggttctgctttagcgccactagacggtactaccttggcgctgtggagctgtcctgggactatatgcagagtgatttgggagagcttcccgtcgacgcacgatttcctcctcgcgttccaaagtcatttccctttaacacaagccaggtgtacaagaagacgctcttcgtcgaattcaccgatcacctgttcaatatcgccaaacccagaccaccatggatgggtcttttggggcctaccatacaagcggaggtgtatgacacagttgttatcactctcaagaacatggcttctcatccggtaagtcttcacgcagtgggcgtgtcctactggaaagcttcagaaggagccgagtatgatgatcagacatcccagagggagaaagaagacgacaaggtatttccaggtgggtctcatacctatgtgtggcaagtgctcaaagagaatggccctatggcaagcgatccgccgtgtttgacttacagctacctttcacacgttgacctcgtcaaggacctcaactccgggttgattggagccttgttggtatgcagggaaggatctcttgccaaagagaagacacagaccctggccaagtttatccttctctttgctgtgttcgatgagggcaaaagttggcatagcgaaacgaagaattccctcatgcaggatcgcgacgcagccagcgccagagcttggcccaagatgcacactgtgaacggatatgtcaataggacgcttcctggcttgattgggtgtcatcggaaaagtgtctactggcacgtgatcggaatggggacaacaccagaggtccactccatatttctcgaaggccataccttccttgttcgaaaccacagacaggcatccttggggatctctcccattacctttctcactgcccaaacgctccttcgtgacttgggtcagttccttctcttttgccatatcccgtcacaccagcatgatggtatggaagcttatgtgaaagtcgacagttgtcctgaggagccacagttgcgcatgaagaataatgaagaagccgaggattacgacgacgatctcaccgattctgagatggacgtggtgaggtttgatgacgacaactctccctccatcattcaagctcggagcggggcgaagaaacaccccaagacttgggtccactatatagcggcggaagaggaggattgggattacgctcctcttgtattggcaccagatgaccgctcatacaaaagccagtacctcaacaacggaccgcagagaattggccggaagtataagaaagtgcgatttatggcctatacagacgaaacctttaagacaagggaggccatccagcatgagagtgggattttgggacctcttctttacggcgaagttggtgataccctcctcatcatcttcaagaatcaagcttctcgcccctataacatttacccacacgggatcactgacgttaggcctttgtatagcagaagacttcccaaaggcgtgaagcatctcaaagacttccccattttgccaggcgagatctttaagtacaaatggaccattacaaaagaagatggaccgactaaatcagaccctcgatgccttacgcggtactattcctccggggtgaattgggagagagatttggcaagcggactcataggaccactcctcatctgttacaaggaatctgtagaccagaggggtaaccagattatgagtgataaacgcaatgtgatcctttttagcgtcttcgacgagaaccggtcctggtacttgaccgagaatatacaaaggttccttcccaaccccgcagaggttcagttggaagaccctgagtttcaggccagcaatattatgcactcaatcaacggctatgtgtttgatagtctccagctttctgtttgcctccatgaagtagcctattggtacatcttgtcaattggtgctcaaacagacttcctctccgtcttcttctccggctacacctttaagcacaagggcgtgtatgaggacactctcacactctttccattttctggagaaaccgtgttcatgagcatggagaatccaggcctttggatcttgggttgccacaacagtgattttcgcaatcggggaatgactgctctcctcaaagtcagcagctgtgattggaacacaggcgacaaatacgaagattcttacgaggacataagtgcctactttgactccaagaataacgccattgagcccagatcattctcccagaatcctcccgtgcttaaaaggcatcagcgcgaaggtaccagaactactcttcagtctgatcaagaggagattgactatgacgacaccattagcgtggaaatgaagcaggaggatttcgatatctatgacgaggatgggaaccagtctccgcggagctttcagaagaagacgcgacactacttcattgcagcagtcgaaaggctttgggactacggtatgtcatcaaaacctcatgtgttgcgcaatagagctcagagtggaagtgttccacagttcaagaaagtcgtctttcaagagtttacagatggcagcttcacacagcctctctatcggggcgagcttaacgaacatttgggactccttggtccctatatccgagccgaagtggaggacaacattatggttacctttaggaatcaagcctctcgcccctacagcttctactcctccctcatcacctatgaggaggatcgtagacaaggcgctgaaccacggaagaactttgtgaaaccgaatgagacgaagacctacttctggaaagtacagcaccacatggcccccacaaaagacgaattcgattgcaaagcatgggcgtatttttcagacgttgacttggagaaagatgtacattcaggacttattggtcctttgttggtgtgtcacactaacactctcaatccagcccatggcaggcaggtgacagtccaggaattcgctcttttctttaccatctttgatgagaccaagtcctggtacttcacggaaaacatggagcgcaattgcagagccccctgtaacatacagatggaggaccctacctttaaggaaaattatcggttccacgcaatcaacggatacattatggatacactccctggccttgtgatggctcaggaccaacgaatcaggtggtacctcctcagcatgggttctaatgagaacatacactccattcacttttcaggacatgtgttcactgtccggaagaaagaagagtataagatggccctctacaatttgtatccaggcgtgtttgagaccgttgaaatgcttccctctaaagctggcatctggagagtagagtgcttgatcggagaacatcttcacgcaggtatgagcaccttgttcctcgtgtacagcaacaaatgtcagaatccacttggcatggccagtggacacattcgcgactttcagatcacagcatctggccagtatggacaatgggccccaaagttggctcgcctccattactccggtagcataaatgcgtggtccactaaagaacctttcagctggattaaggtcgatcttcttgcccccatgatcatccacggcattaagacacagggagcgaggcagaaattctcctccctctacatctcacagttcattattatgtatagtttggacggcaagaagtggcaaacttatagaggtaacagtactggaacagacatggtgttcttcggcaacgttgatagctctggcatcaaacacaacatctttaatcctcccataatagctcggtacatcagattgcatccgacccactacagcattaggagtacactccgaatggagcttatgggttgcgacttgaattcctgttcaatgccactcggaatggagtctaaagccatctctgatgcacagataaccgccagtagctactttacgaacatgtttgctacgtggtcaccctctaaggcaaggcttcatttgcaaggccggtctaatgcctggagacctcaggtgaacaacccgaaagaatggctccaggtggactttcagaagaccatgaaagtaacaggtgtcactactcagggagttaagtccttggatactagcatgtatgtgaaggagttccttatttcctcatcacaagatggccaccagtggaccctcttctttcagaatggtaaggtcaaagtgtttcagggcaatcaagacagcttcacacccgtggtgaacagtcttgatcctccactcttgacacgataccttcgaatccatccacagtcttgggagcaccagattgcattgcgcatggaagtacttggatgcgaggctcaggacctctac

SEQ ID NO: 2034 - protein, 1457 aa, synthetic construct
  REGION 1..1457: note = Variant of human B-domain deleted Factor VIII
MQIELSTCFFLCLLRFCFSATRRYYLGAVELSWDYMQSDLGELPVDARFPPRVPKSFPFNTSQVYKKTLFVEFTDHLFNIAKPRPPWMGLLGPTIQAEVYDTVVITLKNMASHPVSLHAVGVSYWKASEGAEYDDQTSQREKEDDKVFPGGSHTYVWQVLKENGPMASDPPCLTYSYLSHVDLVKDLNSGLIGALLVCREGSLAKEKTQTLAKFILLFAVFDEGKSWHSETKNSLMQDRDAASARAWPKMHTVNGYVNRTLPGLIGCHRKSVYWHVIGMGTTPEVHSIFLEGHTFLVRNHRQASLGISPITFLTAQTLLRDLGQFLLFCHIPSHQHDGMEAYVKVDSCPEEPQLRMKNNEEAEDYDDDLTDSEMDVVRFDDDNSPSIIQARSGAKKHPKTWVHYIAAEEEDWDYAPLVLAPDDRSYKSQYLNNGPQRIGRKYKKVRFMAYTDETFKTREAIQHESGILGPLLYGEVGDTLLIIFKNQASRPYNIYPHGITDVRPLYSRRLPKGVKHLKDFPILPGEIFKYKWTITKEDGPTKSDPRCLTRYYSSGVNWERDLASGLIGPLLICYKESVDQRGNQIMSDKRNVILFSVFDENRSWYLTENIQRFLPNPAEVQLEDPEFQASNIMHSINGYVFDSLQLSVCLHEVAYWYILSIGAQTDFLSVFFSGYTFKHKGVYEDTLTLFPFSGETVFMSMENPGLWILGCHNSDFRNRGMTALLKVSSCDWNTGDKYEDSYEDISAYFDSKNNAIEPRSFSQNPPVLKRHQREGTRTTLQSDQEEIDYDDTISVEMKQEDFDIYDEDGNQSPRSFQKKTRHYFIAAVERLWDYGMSSKPHVLRNRAQSGSVPQFKKVVFQEFTDGSFTQPLYRGELNEHLGLLGPYIRAEVEDNIMVTFRNQASRPYSFYSSLITYEEDRRQGAEPRKNFVKPNETKTYFWKVQHHMAPTKDEFDCKAWAYFSDVDLEKDVHSGLIGPLLVCHTNTLNPAHGRQVTVQEFALFFTIFDETKSWYFTENMERNCRAPCNIQMEDPTFKENYRFHAINGYIMDTLPGLVMAQDQRIRWYLLSMGSNENIHSIHFSGHVFTVRKKEEYKMALYNLYPGVFETVEMLPSKAGIWRVECLIGEHLHAGMSTLFLVYSNKCQNPLGMASGHIRDFQITASGQYGQWAPKLARLHYSGSINAWSTKEPFSWIKVDLLAPMIIHGIKTQGARQKFSSLYISQFIIMYSLDGKKWQTYRGNSTGTDMVFFGNVDSSGIKHNIFNPPIIARYIRLHPTHYSIRSTLRMELMGCDLNSCSMPLGMESKAISDAQITASSYFTNMFATWSPSKARLHLQGRSNAWRPQVNNPKEWLQVDFQKTMKVTGVTTQGVKSLDTSMYVKEFLISSSQDGHQWTLFFQNGKVKVFQGNQDSFTPVVNSLDPPLLTRYLRIHPQSWEHQIALRMEVLGCEAQDLY

SEQ ID NO: 2035 - DNA, 4371 bp, synthetic construct
  misc_feature 1..4371: note = Variant of human B-domain deleted Factor VIII
  source 1..4371: mol_type = other DNA
atgcagattgaactgtctacctgcttcttcctctgtttgctgaggttctgctttagcgccactagacggtactaccttggcgctgtggagctgtcctgggactatatgcagagtgatttgggagagcttcccgtcgacgcacgatttcctcctcgcgttccaaagtcatttccctttaacacaagccaggtgtacaagaagacgctcttcgtcgaattcaccgatcacctgttcaatatcgccaaacccagaccaccatggatgggtcttttggggcctaccatacaagcggaggtgtatgacacagttgttatcactctcaagaacatggcttctcatccggtaagtcttcacgcagtgggcgtgtcctactggaaagcttcagaaggagccgagtatgatgatcagacatcccagagggagaaagaagacgacaaggtatttccaggtgggtctcatacctatgtgtggcaagtgctcaaagagaatggccctatggcaagcgatccgccgtgtttgacttacagctacctttcacacgttgacctcgtcaaggacctcaactccgggttgattggagccttgttggtatgcagggaaggatctcttgccaaagagaagacacagaccctggccaagtttatccttctctttgctgtgttcgatgagggcaaaagttggcatagcgaaacgaagaattccctcatgcaggatcgcgacgcagccagcgccagagcttggcccaagatgcacactgtgaacggatatgtcaataggacgcttcctggcttgattgggtgtcatcggaaaagtgtctactggcacgtgatcggaatggggacaacaccagaggtccactccatatttctcgaaggccataccttccttgttcgaaaccacagacaggcatccttggggatctctcccattacctttctcactgcccaaacgctccttcgtgacttgggtcagttccttctcttttgccatatcccgtcacaccagcatgatggtatggaagcttatgtgaaagtcgacagttgtcctgaggagccacagttgcgcatgaagaataatgaagaagccgaggattacgacgacgatctcaccgattctgagatggacgtggtgaggtttgatgacgacaactctccctccatcattcaagctcggagcggggcgaagaaacaccccaagacttgggtccactatatagcggcggaagaggaggattgggattacgctcctcttgtattggcaccagatgaccgctcatacaaaagccagtacctcaacaacggaccgcagagaattggccggaagtataagaaagtgcgatttatggcctatacagacgaaacctttaagacaagggaggccatccagcatgagagtgggattttgggacctcttctttacggcgaagttggtgataccctcctcatcatcttcaagaatcaagcttctcgcccctataacatttacccacacgggatcactgacgttaggcctttgtatagcagaagacttcccaaaggcgtgaagcatctcaaagacttccccattttgccaggcgagatctttaagtacaaatggaccattacagtggaagatggaccgactaaatcagaccctcgatgccttacgcggtactattcctccttcgtgaattgggagagagatttggcaagcggactcataggaccactcctcatctgttacaaggaatctgtagaccagaggggtaaccagattatgagtgataaacgcaatgtgatcctttttagcgtcttcgacgagaaccggtcctggtacttgaccgagaatatacaaaggttccttcccaaccccgcaggcgttcagttggaagaccctgagtttcaggccagcaatattatgcactcaatcaacggctatgtgtttgatagtctccagctttctgtttgcctccatgaagtagcctattggtacatcttgtcaattggtgctcaaacagacttcctctccgtcttcttctccggctacacctttaagcacaagggcgtgtatgaggacactctcacactctttccattttctggagaaaccgtgttcatgagcatggagaatccaggcctttggatcttgggttgccacaacagtgattttcgcaatcggggaatgactgctctcctcaaagtcagcagctgtgattggaacacaggcgactattacgaagattcttacgaggacataagtgcctactttgactccaagaataacgccattgagcccagatcattctcccagaatcctcccgtgcttaaaaggcatcagcgcgaaggtaccagaactactcttcagtctgatcaagaggagattgactatgacgacaccattagcgtggaaatgaagaaggaggatttcgatatctatgacgaagatgagaaccagtctccgcggagctttcagaagaagacgcgacactacttcattgcagcagtcgaaaggctttgggactacggtatgtcatcaagccctcatgtgttgcgcaatagagctcagagtggaagtgttccacagttcaagaaagtcgtctttcaagagtttacagatggcagcttcacacagcctctctatcggggcgagcttaacgaacatttgggactccttggtccctatatccgagccgaagtggaggacaacattatggttacctttaggaatcaagcctctcgcccctacagcttctactcctccctcatcacctatgaggaggatcaaagacaaggcgctgaaccacggaagaactttgtgaaaccgaatgagacgaagacctacttctggaaagtacagcaccacatggcccccacaaaagacgaattcgattgcaaagcatgggcgtatttttcagacgttgacttggagaaagatgtacattcaggacttattggtcctttgttggtgtgtcacactaacactctcaatccagcccatggcaggcaggtgacagtccaggaattcgctcttttctttaccatctttgatgagaccaagtcctggtacttcacggaaaacatggagcgcaattgcagagccccctgtaacatacagatggaggaccctacctttaaggaaaattatcggttccacgcaatcaacggatacattatggatacactccctggccttgtgatggctcaggaccaacgaatcaggtggtacctcctcagcatgggttctaatgagaacatacactccattcacttttcaggacatgtgttcactgtccggaagaaagaagagtataagatggccctctacaatttgtatccaggcgtgtttgggaccgttgaaatgcttccctctaaagctggcatctggagagtagagtgcttgatcggagaacatcttcacgcaggtatgagcaccttgttcctcgtgtacagcaacaaatgtcagaatccacttggcatggccagtggacacattcgcgactttcagatcacagcatctggccagtatggacaatgggccccaaagttggctcgcctccattactccggtagcataaatgcgtggtccactaaagaacctttcagctggattaaggtcgatcttcttgcccccatgatcatccacggcattaagacacagggagcgaggcagaaattctcctccctctacatctcacagttcattattatgtatagtttggacggcaagaagtggcaaacttatagaggtaacagtactggaacagacatggtgttcttcggcaacgttgatagctctggcatcaaacacaacatctttaatcctcccataatagctcggtacatcagattgcatccgacccactacagcattaggagtacactccgaatggagcttatgggttgcgacttgaattcctgttcaatgccactcggaatggagtctaaagccatctctgatgcacagataaccgccagtagctactttacgaacatgtttgctacgtggtcaccctctaaggcaaggcttcatttgcaaggccggtctaatgcctggagacctcaggtgaacaacccgaaagaatggctccaggtggactttcagaagaccatgaaagtaacaggtgtcactactcagggagttaagtccttggatactagcatgtatgtgaaggagttccttatttcctcatcacaagatggccaccagtggaccctcttctttcagaatggtaaggtcaaagtgtttcagggcaatcaagacagcttcacacccgtggtgaacagtcttgatcctccactcttgacacgataccttcgaatccatccacagtcttgggagcaccagattgcattgcgcatggaagtacttggatgcgaggctcaggacctctac

SEQ ID NO: 2036 - protein, 1457 aa, synthetic construct
  REGION 1..1457: note = Variant of human B-domain deleted Factor VIII
MQIELSTCFFLCLLRFCFSATRRYYLGAVELSWDYMQSDLGELPVDARFPPRVPKSFPFNTSQVYKKTLFVEFTDHLFNIAKPRPPWMGLLGPTIQAEVYDTVVITLKNMASHPVSLHAVGVSYWKASEGAEYDDQTSQREKEDDKVFPGGSHTYVWQVLKENGPMASDPPCLTYSYLSHVDLVKDLNSGLIGALLVCREGSLAKEKTQTLAKFILLFAVFDEGKSWHSETKNSLMQDRDAASARAWPKMHTVNGYVNRTLPGLIGCHRKSVYWHVIGMGTTPEVHSIFLEGHTFLVRNHRQASLGISPITFLTAQTLLRDLGQFLLFCHIPSHQHDGMEAYVKVDSCPEEPQLRMKNNEEAEDYDDDLTDSEMDVVRFDDDNSPSIIQARSGAKKHPKTWVHYIAAEEEDWDYAPLVLAPDDRSYKSQYLNNGPQRIGRKYKKVRFMAYTDETFKTREAIQHESGILGPLLYGEVGDTLLIIFKNQASRPYNIYPHGITDVRPLYSRRLPKGVKHLKDFPILPGEIFKYKWTITVEDGPTKSDPRCLTRYYSSFVNWERDLASGLIGPLLICYKESVDQRGNQIMSDKRNVILFSVFDENRSWYLTENIQRFLPNPAGVQLEDPEFQASNIMHSINGYVFDSLQLSVCLHEVAYWYILSIGAQTDFLSVFFSGYTFKHKGVYEDTLTLFPFSGETVFMSMENPGLWILGCHNSDFRNRGMTALLKVSSCDWNTGDYYEDSYEDISAYFDSKNNAIEPRSFSQNPPVLKRHQREGTRTTLQSDQEEIDYDDTISVEMKKEDFDIYDEDENQSPRSFQKKTRHYFIAAVERLWDYGMSSSPHVLRNRAQSGSVPQFKKVVFQEFTDGSFTQPLYRGELNEHLGLLGPYIRAEVEDNIMVTFRNQASRPYSFYSSLITYEEDQRQGAEPRKNFVKPNETKTYFWKVQHHMAPTKDEFDCKAWAYFSDVDLEKDVHSGLIGPLLVCHTNTLNPAHGRQVTVQEFALFFTIFDETKSWYFTENMERNCRAPCNIQMEDPTFKENYRFHAINGYIMDTLPGLVMAQDQRIRWYLLSMGSNENIHSIHFSGHVFTVRKKEEYKMALYNLYPGVFGTVEMLPSKAGIWRVECLIGEHLHAGMSTLFLVYSNKCQNPLGMASGHIRDFQITASGQYGQWAPKLARLHYSGSINAWSTKEPFSWIKVDLLAPMIIHGIKTQGARQKFSSLYISQFIIMYSLDGKKWQTYRGNSTGTDMVFFGNVDSSGIKHNIFNPPIIARYIRLHPTHYSIRSTLRMELMGCDLNSCSMPLGMESKAISDAQITASSYFTNMFATWSPSKARLHLQGRSNAWRPQVNNPKEWLQVDFQKTMKVTGVTTQGVKSLDTSMYVKEFLISSSQDGHQWTLFFQNGKVKVFQGNQDSFTPVVNSLDPPLLTRYLRIHPQSWEHQIALRMEVLGCEAQDLY

SEQ ID NO: 2037 - DNA, 4371 bp, synthetic construct
  misc_feature 1..4371: note = Variant of human B-domain deleted Factor VIII
  source 1..4371: mol_type = other DNA
atgcagattgaactgtctacctgcttcttcctctgtttgctgaggttctgctttagcgccactagacggtactaccttggcgctgtggagctgtcctgggactatatgcagagtgatttgggagagcttcccgtcgacgcacgatttcctcctcgcgttccaaagtcatttccctttaacacaagccaggtgtacaagaagacgctcttcgtcgaattcaccgatcacctgttcaatatcgccaaacccagaccaccatggatgggtcttttggggcctaccatacaagcggaggtgtatgacacagttgttatcactctcaagaacatggcttctcatccggtaagtcttcacgcagtgggcgtgtcctactggaaagcttcagaaggagccgagtatgatgatcagacatcccagagggagaaagaagacgacaaggtatttccaggtgggtctcatacctatgtgtggcaagtgctcaaagagaatggccctatggcaagcgatccgccgtgtttgacttacagctacctttcacacgttgacctcgtcaaggacctcaactccgggttgattggagccttgttggtatgcagggaaggatctcttgccaaagagaagacacagaccctggccaagtttatccttctctttgctgtgttcgatgagggcaaaagttggcatagcgaaacgaagaattccctcatgcaggatcgcgacgcagccagcgccagagcttggcccaagatgcacactgtgaacggatatgtcaataggacgcttcctggcttgattgggtgtcatcggaaaagtgtctactggcacgtgatcggaatggggacaacaccagaggtccactccatatttctcgaaggccataccttccttgttcgaaaccacagacaggcatccttggggatctctcccattacctttctcactgcccaaacgctccttcgtgacttgggtcagttccttctcttttgccatatcccgtcacaccagcatgatggtatggaagcttatgtgaaagtcgacagttgtcctgaggagccacagttgcgcatgaagaataatgaagaagccgaggattacgacgacgatctcaccgattctgagatggacgtggtgaggtttgatgacgacaactctccctccatcattcaagctcggagcggggcgaagaaacaccccaagacttgggtccactatatagcggcggaagaggaggattgggattacgctcctcttgtattggcaccagatgaccgctcatacaaaagccagtacctcaacaacggaccgcagagaattggccggaagtataagaaagtgcgatttatggcctatacagacgaaacctttaagacaagggaggccatccagcatgagagtgggattttgggacctcttctttacggcgaagttggtgataccctcctcatcatcttcaagaatcaagcttctcgcccctataacatttacccacacgggatcactgacgttaggcctttgtatagcagaagacttcccaaaggcgtgaagcatctcaaagacttccccattttgccaggcgagatctttaagtacaaatggaccattacacgtgaagatggaccgactaaatcagaccctcgatgccttacgcggtactattcctccttcgtgaattgggagagagatttggcaagcggactcataggaccactcctcatctgttacaaggaatctgtagaccagaggggtaaccagattatgagtgataaacgcaatgtgatcctttttagcgtcttcgacgagaaccggtcctggtacttgaccgagaatatacaaaggttccttcccaaccccgcagaggttcagttggaagaccctgagtttcaggccagcaatattatgcactcaatcaacggctatgtgtttgatagtctccagctttctgtttgcctccatgaagtagcctattggtacatcttgtcaattggtgctcaaacagacttcctctccgtcttcttctccggctacacctttaagcacaagaacgtgtatgaggacactctcacactctttccattttctggagaaaccgtgttcatgagcatggagaatccaggcctttggatcttgggttgccacaacagtgattttcgcaatcggggaatgactgctctcctcaaagtcagcagctgtgattggaacacaggcgactattacgaagattcttacgaggacataagtgcctactttgactccaagaataacgccattgagcccagatcattctcccagaatcctcccgtgcttaaaaggcatcagcgcgaaggtaccagaactactcttcagtctgatcaagaggagattgactatgacgacaccattagcgtggaaatgaagcaggaggatttcgatatctatgacgaagatgagaaccagtctccgcggagctttcagaagaagacgcgacactacttcattgcagcagtcgaaaggctttgggactacggtatgtcatcatcccctcatgtgttgcgcaatagagctcagagtggaagtgttccacagttcaagaaagtcgtctttcaagagtttacagatggcagcttcacacagcctctctatcggggcgagcttaacgaacatttgggactccttggtccctatatccgagccgaagtggaggacaacattatggttacctttaggaatcaagcctctcgcccctacagcttctactcctccctcatcacctatgaggaggatcaaagacaaggcgctgaaccacggaagaactttgtgaaaccgaatgagacgaagacctacttctggaaagtacagcaccacatggcccccacaaaagacgaattcgattgcaaagcatgggcgtatttttcagacgttgacttggagaaagatgtacattcaggacttattggtcctttgttggtgtgtcacactaacactctcaatccagcccatggcaggcaggtgacagtccaggaattcgctcttttctttaccatctttgatgagaccaagtcctggtacttcacggaaaacatggagcgcaattgcagagccccctgtaacatacagatggaggaccctacctttaaggaaaattatcggttccacgcaatcaacggatacattatggatacactccctggccttgtgatggctcaggaccaacgaatcaggtggtacctcctcagcatgggttctaatgagaacatacactccattcacttttcaggacatgtgttcactgtccggaagaaagaagagtataagatggccctctacaatttgtatccaggcgtgtttgggaccgttgaaatgcttccctctaaagctggcatctggagagtagagtgcttgatcggagaacatcttcacgcaggtatgagcaccttgttcctcgtgtacagcaacaaatgtcagaatccacttggcatggccagtggacacattcgcgactttcagatcacagcatctggccagtatggacaatgggccccaaagttggctcgcctccattactccggtagcataaatgcgtggtccactaaagaacctttcagctggattaaggtcgatcttcttgcccccatgatcatccacggcattaagacacagggagcgaggcagaaattctcctccctctacatctcacagttcattattatgtatagtttggacggcaagaagtggcaaacttatagaggtaacagtactggaacagacatggtgttcttcggcaacgttgatagctctggcatcaaacacaacatctttaatcctcccataatagctcggtacatcagattgcatccgacccactacagcattaggagtacactccgaatggagcttatgggttgcgacttgaattcctgttcaatgccactcggaatggagtctaaagccatctctgatgcacagataaccgccagtagctactttacgaacatgtttgctacgtggtcaccctctaaggcaaggcttcatttgcaaggccggtctaatgcctggagacctcaggtgaacaacccgaaagaatggctccaggtggactttcagaagaccatgaaagtaacaggtgtcactactcagggagttaagtccttggatactagcatgtatgtgaaggagttccttatttcctcatcacaagatggccaccagtggaccctcttctttcagaatggtaaggtcaaagtgtttcagggcaatcaagacagcttcacacccgtggtgaacagtcttgatcctccactcttgacacgataccttcgaatccatccacagtcttgggagcaccagattgcattgcgcatggaagtacttggatgcgaggctcaggacctctac

SEQ ID NO: 2038 - protein, 1457 aa, synthetic construct
  REGION 1..1457: note = Variant of human B-domain deleted Factor VIII
MQIELSTCFFLCLLRFCFSATRRYYLGAVELSWDYMQSDLGELPVDARFPPRVPKSFPFNTSQVYKKTLFVEFTDHLFNIAKPRPPWMGLLGPTIQAEVYDTVVITLKNMASHPVSLHAVGVSYWKASEGAEYDDQTSQREKEDDKVFPGGSHTYVWQVLKENGPMASDPPCLTYSYLSHVDLVKDLNSGLIGALLVCREGSLAKEKTQTLAKFILLFAVFDEGKSWHSETKNSLMQDRDAASARAWPKMHTVNGYVNRTLPGLIGCHRKSVYWHVIGMGTTPEVHSIFLEGHTFLVRNHRQASLGISPITFLTAQTLLRDLGQFLLFCHIPSHQHDGMEAYVKVDSCPEEPQLRMKNNEEAEDYDDDLTDSEMDVVRFDDDNSPSIIQARSGAKKHPKTWVHYIAAEEEDWDYAPLVLAPDDRSYKSQYLNNGPQRIGRKYKKVRFMAYTDETFKTREAIQHESGILGPLLYGEVGDTLLIIFKNQASRPYNIYPHGITDVRPLYSRRLPKGVKHLKDFPILPGEIFKYKWTITREDGPTKSDPRCLTRYYSSFVNWERDLASGLIGPLLICYKESVDQRGNQIMSDKRNVILFSVFDENRSWYLTENIQRFLPNPAEVQLEDPEFQASNIMHSINGYVFDSLQLSVCLHEVAYWYILSIGAQTDFLSVFFSGYTFKHKNVYEDTLTLFPFSGETVFMSMENPGLWILGCHNSDFRNRGMTALLKVSSCDWNTGDYYEDSYEDISAYFDSKNNAIEPRSFSQNPPVLKRHQREGTRTTLQSDQEEIDYDDTISVEMKQEDFDIYDEDENQSPRSFQKKTRHYFIAAVERLWDYGMSSSPHVLRNRAQSGSVPQFKKVVFQEFTDGSFTQPLYRGELNEHLGLLGPYIRAEVEDNIMVTFRNQASRPYSFYSSLITYEEDQRQGAEPRKNFVKPNETKTYFWKVQHHMAPTKDEFDCKAWAYFSDVDLEKDVHSGLIGPLLVCHTNTLNPAHGRQVTVQEFALFFTIFDETKSWYFTENMERNCRAPCNIQMEDPTFKENYRFHAINGYIMDTLPGLVMAQDQRIRWYLLSMGSNENIHSIHFSGHVFTVRKKEEYKMALYNLYPGVFGTVEMLPSKAGIWRVECLIGEHLHAGMSTLFLVYSNKCQNPLGMASGHIRDFQITASGQYGQWAPKLARLHYSGSINAWSTKEPFSWIKVDLLAPMIIHGIKTQGARQKFSSLYISQFIIMYSLDGKKWQTYRGNSTGTDMVFFGNVDSSGIKHNIFNPPIIARYIRLHPTHYSIRSTLRMELMGCDLNSCSMPLGMESKAISDAQITASSYFTNMFATWSPSKARLHLQGRSNAWRPQVNNPKEWLQVDFQKTMKVTGVTTQGVKSLDTSMYVKEFLISSSQDGHQWTLFFQNGKVKVFQGNQDSFTPVVNSLDPPLLTRYLRIHPQSWEHQIALRMEVLGCEAQDLY

SEQ ID NO: 2039 - DNA, 4371 bp, synthetic construct
  misc_feature 1..4371: note = Variant of human B-domain deleted Factor VIII
  source 1..4371: mol_type = other DNA
atgcagattgaactgtctacctgcttcttcctctgtttgctgaggttctgctttagcgccactagacggtactaccttggcgctgtggagctgtcctgggactatatgcagagtgatttgggagagcttcccgtcgacgcacgatttcctcctcgcgttccaaagtcatttccctttaacacaagccaggtgtacaagaagacgctcttcgtcgaattcaccgatcacctgttcaatatcgccaaacccagaccaccatggatgggtcttttggggcctaccatacaagcggaggtgtatgacacagttgttatcactctcaagaacatggcttctcatccggtaagtcttcacgcagtgggcgtgtcctactggaaagcttcagaaggagccgagtatgatgatcagacatcccagagggagaaagaagacgacaaggtatttccaggtgggtctcatacctatgtgtggcaagtgctcaaagagaatggccctatggcaagcgatccgccgtgtttgacttacagctacctttcacacgttgacctcgtcaaggacctcaactccgggttgattggagccttgttggtatgcagggaaggatctcttgccaaagagaagacacagaccctggccaagtttatccttctctttgctgtgttcgatgagggcaaaagttggcatagcgaaacgaagaattccctcatgcaggatcgcgacgcagccagcgccagagcttggcccaagatgcacactgtgaacggatatgtcaataggacgcttcctggcttgattgggtgtcatcggaaaagtgtctactggcacgtgatcggaatggggacaacaccagaggtccactccatatttctcgaaggccataccttccttgttcgaaaccacagacaggcatccttggggatctctcccattacctttctcactgcccaaacgctccttcgtgacttgggtcagttccttctcttttgccatatcccgtcacaccagcatgatggtatggaagcttatgtgaaagtcgacagttgtcctgaggagccacagttgcgcatgaagaataatgaagaagccgaggattacgacgacgatctcaccgattctgagatggacgtggtgaggtttgatgacgacaactctccctccatcattcaagctcggagcggggcgaagaaacaccccaagacttgggtccactatatagcggcggaagaggaggattgggattacgctcctcttgtattggcaccagatgaccgctcatacaaaagccagtacctcaacaacggaccgcagagaattggccggaagtataagaaagtgcgatttatggcctatacagacgaaacctttaagacaagggaggccatccagcatgagagtgggattttgggacctcttctttacggcgaagttggtgataccctcctcatcatcttcaagaatcaagcttctcgcccctataacatttacccacacgggatcactgacgttaggcctttgtatagcagaagacttcccaaaggcgtgaagcatctcaaagacttccccattttgccaggcgagatctttaagtacaaatggaccattacagtggaagatggaccgactaaatcagaccctcgatgccttacgcggtactattcctccggggtgaattgggagagagatttggcaagcggactcataggaccactcctcatctgttacaaggaatctgtagaccagaggggtaaccagattatgagtgataaacgcaatgtgatcctttttagcgtcttcgacgagaaccggtcctggtacttgaccgagaatatacaaaggttccttcccaaccccgcagaggttcagttggaagaccctgagtttcaggccagcaatattatgcactcaatcaacggctatgtgtttgatagtctccagctttctgtttgcctccatgaagtagcctattggtacatcttgtcaattggtgctcaaacagacttcctctccgtcttcttctccggctacacctttaagcacaagaacgtgtatgaggacactctcacactctttccattttctggagaaaccgtgttcatgagcatggagaatccaggcctttggatcttgggttgccacaacagtgattttcgcaatcggggaatgactgctctcctcaaagtcagcagctgtgattggaacacaggcgactattacgaagattcttacgaggacataagtgcctactttgactccaagaataacgccattgagcccagatcattctcccagaatcctcccgtgcttaaaaggcatcagcgcgaaggtaccagaactactcttcagtctgatcaagaggagattgactatgacgacaccattagcgtggaaatgaagaaggaggatttcgatatctatgaccgtgatgagaaccagtctccgcggagctttcagaagaagacgcgacactacttcattgcagcagtcgaaaggctttgggactacggtatgtcatcatcccctcatgtgttgcgcaatagagctcagagtggaagtgttccacagttcaagaaagtcgtctttcaagagtttacagatggcagcttcacacagcctctctatcggggcgagcttaacgaacatttgggactccttggtccctatatccgagccgaagtggaggacaacattatggttacctttaggaatcaagcctctcgcccctacagcttctactcctccctcatcagctatgaggaggatcaaagacaaggcgctgaaccacggaagaactttgtgaaaccgaatgagacgaagacctacttctggaaagtacagcaccacatggcccccacaaaagacgaattcgattgcaaagcatgggcgtatttttcagacgttgacttggagaaagatgtacattcaggacttattggtcctttgttggtgtgtcacactaacactctcaatccagcccatggcaggcaggtgacagtccaggaattcgctcttttctttaccatctttgatgagaccaagtcctggtacttcacggaaaacatggagcgcaattgcagagccccctgtaacatacagatggaggaccctacctttaaggaaaattatcggttccacgcaatcaacggatacattatggatacactccctggccttgtgatggctcaggaccaacgaatcaggtggtacctcctcagcatgggttctaatgagaacatacactccattcacttttcaggacatgtgttcactgtccggaagaaagaagagtataagatggccctctacaatttgtatccaggcgtgtttgggaccgttgaaatgcttccctctaaagctggcatctggagagtagagtgcttgatcggagaacatcttcacgcaggtatgagcaccttgttcctcgtgtacagcaacaaatgtcagaatccacttggcatggccagtggacacattcgcgactttcagatcacagcatctggccagtatggacaatgggccccaaagttggctcgcctccattactccggtagcataaatgcgtggtccactaaagaacctttcagctggattaaggtcgatcttcttgcccccatgatcatccacggcattaagacacagggagcgaggcagaaattctcctccctctacatctcacagttcattattatgtatagtttggacggcaagaagtggcaaacttatagaggtaacagtactggaacagacatggtgttcttcggcaacgttgatagctctggcatcaaacacaacatctttaatcctcccataatagctcggtacatcagattgcatccgacccactacagcattaggagtacactccgaatggagcttatgggttgcgacttgaattcctgttcaatgccactcggaatggagtctaaagccatctctgatgcacagataaccgccagtagctactttacgaacatgtttgctacgtggtcaccctctaaggcaaggcttcatttgcaaggccggtctaatgcctggagacctcaggtgaacaacccgaaagaatggctccaggtggactttcagaagaccatgaaagtaacaggtgtcactactcagggagttaagtccttggatactagcatgtatgtgaaggagttccttatttcctcatcacaagatggccaccagtggaccctcttctttcagaatggtaaggtcaaagtgtttcagggcaatcaagacagcttcacacccgtggtgaacagtcttgatcctccactcttgacacgataccttcgaatccatccacagtcttgggagcaccagattgcattgcgcatggaagtacttggatgcgaggctcaggacctctac

SEQ ID NO: 2040 - protein, 1457 aa, synthetic construct
  REGION 1..1457: note = Variant of human B-domain deleted Factor VIII
MQIELSTCFFLCLLRFCFSATRRYYLGAVELSWDYMQSDLGELPVDARFPPRVPKSFPFNTSQVYKKTLFVEFTDHLFNIAKPRPPWMGLLGPTIQAEVYDTVVITLKNMASHPVSLHAVGVSYWKASEGAEYDDQTSQREKEDDKVFPGGSHTYVWQVLKENGPMASDPPCLTYSYLSHVDLVKDLNSGLIGALLVCREGSLAKEKTQTLAKFILLFAVFDEGKSWHSETKNSLMQDRDAASARAWPKMHTVNGYVNRTLPGLIGCHRKSVYWHVIGMGTTPEVHSIFLEGHTFLVRNHRQASLGISPITFLTAQTLLRDLGQFLLFCHIPSHQHDGMEAYVKVDSCPEEPQLRMKNNEEAEDYDDDLTDSEMDVVRFDDDNSPSIIQARSGAKKHPKTWVHYIAAEEEDWDYAPLVLAPDDRSYKSQYLNNGPQRIGRKYKKVRFMAYTDETFKTREAIQHESGILGPLLYGEVGDTLLIIFKNQASRPYNIYPHGITDVRPLYSRRLPKGVKHLKDFPILPGEIFKYKWTITVEDGPTKSDPRCLTRYYSSGVNWERDLASGLIGPLLICYKESVDQRGNQIMSDKRNVILFSVFDENRSWYLTENIQRFLPNPAEVQLEDPEFQASNIMHSINGYVFDSLQLSVCLHEVAYWYILSIGAQTDFLSVFFSGYTFKHKNVYEDTLTLFPFSGETVFMSMENPGLWILGCHNSDFRNRGMTALLKVSSCDWNTGDYYEDSYEDISAYFDSKNNAIEPRSFSQNPPVLKRHQREGTRTTLQSDQEEIDYDDTISVEMKKEDFDIYDRDENQSPRSFQKKTRHYFIAAVERLWDYGMSSSPHVLRNRAQSGSVPQFKKVVFQEFTDGSFTQPLYRGELNEHLGLLGPYIRAEVEDNIMVTFRNQASRPYSFYSSLISYEEDQRQGAEPRKNFVKPNETKTYFWKVQHHMAPTKDEFDCKAWAYFSDVDLEKDVHSGLIGPLLVCHTNTLNPAHGRQVTVQEFALFFTIFDETKSWYFTENMERNCRAPCNIQMEDPTFKENYRFHAINGYIMDTLPGLVMAQDQRIRWYLLSMGSNENIHSIHFSGHVFTVRKKEEYKMALYNLYPGVFGTVEMLPSKAGIWRVECLIGEHLHAGMSTLFLVYSNKCQNPLGMASGHIRDFQITASGQYGQWAPKLARLHYSGSINAWSTKEPFSWIKVDLLAPMIIHGIKTQGARQKFSSLYISQFIIMYSLDGKKWQTYRGNSTGTDMVFFGNVDSSGIKHNIFNPPIIARYIRLHPTHYSIRSTLRMELMGCDLNSCSMPLGMESKAISDAQITASSYFTNMFATWSPSKARLHLQGRSNAWRPQVNNPKEWLQVDFQKTMKVTGVTTQGVKSLDTSMYVKEFLISSSQDGHQWTLFFQNGKVKVFQGNQDSFTPVVNSLDPPLLTRYLRIHPQSWEHQIALRMEVLGCEAQDLY

SEQ ID NO: 2041 - DNA, 4371 bp, synthetic construct
  misc_feature 1..4371: note = Variant of human B-domain deleted Factor VIII
  source 1..4371: mol_type = other DNA
atgcagattgaactgtctacctgcttcttcctctgtttgctgaggttctgctttagcgccactagacggtactaccttggcgctgtggagctgtcctgggactatatgcagagtgatttgggagagcttcccgtcgacgcacgatttcctcctcgcgttccaaagtcatttccctttaacacaagccaggtgtacaagaagacgctcttcgtcgaattcaccgatcacctgttcaatatcgccaaacccagaccaccatggatgggtcttttggggcctaccatacaagcggaggtgtatgacacagttgttatcactctcaagaacatggcttctcatccggtaagtcttcacgcagtgggcgtgtcctactggaaagcttcagaaggagccgagtatgatgatcagacatcccagagggagaaagaagacgacaaggtatttccaggtgggtctcatacctatgtgtggcaagtgctcaaagagaatggccctatggcaagcgatccgccgtgtttgacttacagctacctttcacacgttgacctcgtcaaggacctcaactccgggttgattggagccttgttggtatgcagggaaggatctcttgccaaagagaagacacagaccctggccaagtttatccttctctttgctgtgttcgatgagggcaaaagttggcatagcgaaacgaagaattccctcatgcaggatcgcgacgcagccagcgccagagcttggcccaagatgcacactgtgaacggatatgtcaataggacgcttcctggcttgattgggtgtcatcggaaaagtgtctactggcacgtgatcggaatggggacaacaccagaggtccactccatatttctcgaaggccataccttccttgttcgaaaccacagacaggcatccttggggatctctcccattacctttctcactgcccaaacgctccttcgtgacttgggtcagttccttctcttttgccatatcccgtcacaccagcatgatggtatggaagcttatgtgaaagtcgacagttgtcctgaggagccacagttgcgcatgaagaataatgaagaagccgaggattacgacgacgatctcaccgattctgagatggacgtggtgaggtttgatgacgacaactctccctccatcattcaagctcggagcggggcgaagaaacaccccaagacttgggtccactatatagcggcggaagaggaggattgggattacgctcctcttgtattggcaccagatgaccgctcatacaaaagccagtacctcaacaacggaccgcagagaattggccggaagtataagaaagtgcgatttatggcctatacagacgaaacctttaagacaagggaggccatccagcatgagagtgggattttgggacctcttctttacggcgaagttggtgataccctcctcatcatcttcaagaatcaagcttctcgcccctataacatttacccacacgggatcactgacgttaggcctttgtatagcagaagacttcccaaaggcgtgaagcatctcaaagacttccccattttgccaggcgagatctttaagtacaaatggaccattacagtggaagatggaccgactaaatcagaccctcgatgccttacgcggtactattcctccgaggtgaattgggagagagatttggcaagcggactcataggaccactcctcatctgttacaaggaatctgtagaccagaggggtaaccagattatgagtgataaacgcaatgtgatcctttttagcgtcttcgacgagaaccggtcctggtacttgaccgagaatatacaaaggttccttcccaaccccgcagaggttcagttggaagaccctgagtttcaggccagcaatattatgcactcaatcaacggctatgtgtttgatagtctccagctttctgtttgcctccatgaagtagcctattggtacatcttgtcaattggtgctcaaacagacttcctctccgtcttcttctccggctacacctttaagcacaagaacgtgtatgaggacactctcacactctttccattttctggagaaaccgtgttcatgagcatggagaatccaggcctttggatcttgggttgccacaacagtgattttcgcaatcggggaatgactgctctcctcaaagtcagcagctgtgattggaacacaggcgacaaatacgaagattcttacgaggacataagtgcctactttgactccaagaataacgccattgagcccagatcattctcccagaatcctcccgtgcttaaaaggcatcagcgcgaaggtaccagaactactcttcagtctgatcaagaggagattgactatgacgacaccattagcgtggaaatgaagcaggaggatttcgatatctatgacgaagatgagaaccagtctccgcggagctttcagaagaagacgcgacactacttcattgcagcagtcgaaaggctttgggactacggtatgtcatcaagccctcatgtgttgcgcaatagagctcagagtggaagtgttccacagttcaagaaagtcgtctttcaagagtttacagatggcagcttcacacagcctctctatcggggcgagcttaacgaacatttgggactccttggtccctatatccgagccgaagtggaggacaacattatggttacctttaggaatcaagcctctcgcccctacagcttctactcctccctcatcagttatgaggaggatcagagacaaggcgctgaaccacggaagaactttgtgaaaccgaatgagacgaagacctacttctggaaagtacagcaccacatggcccccacaaaagacgaattcgattgcaaagcatgggcgtatttttcagacgttgacttggagaaagatgtacattcaggacttattggtcctttgttggtgtgtcacactaacactctcaatccagcccatggcaggcaggtgacagtccaggaattcgctcttttctttaccatctttgatgagaccaagtcctggtacttcacggaaaacatggagcgcaattgcagagccccctgtaacatacagatggaggaccctacctttaaggaaaattatcggttccacgcaatcaacggatacattatggatacactccctggccttgtgatggctcaggaccaacgaatcaggtggtacctcctcagcatgggttctaatgagaacatacactccattcacttttcaggacatgtgttcactgtccggaagaaagaagagtataagatggccctctacaatttgtatccaggcgtgtttgagaccgttgaaatgcttccctctaaagctggcatctggagagtagagtgcttgatcggagaacatcttcacgcaggtatgagcaccttgttcctcgtgtacagcaacaaatgtcagaatccacttggcatggccagtggacacattcgcgactttcagatcacagcatctggccagtatggacaatgggccccaaagttggctcgcctccattactccggtagcataaatgcgtggtccactaaagaacctttcagctggattaaggtcgatcttcttgcccccatgatcatccacggcattaagacacagggagcgaggcagaaattctcctccctctacatctcacagttcattattatgtatagtttggacggcaagaagtggcaaacttatagaggtaacagtactggaacagacatggtgttcttcggcaacgttgatagctctggcatcaaacacaacatctttaatcctcccataatagctcggtacatcagattgcatccgacccactacagcattaggagtacactccgaatggagcttatgggttgcgacttgaattcctgttcaatgccactcggaatggagtctaaagccatctctgatgcacagataaccgccagtagctactttacgaacatgtttgctacgtggtcaccctctaaggcaaggcttcatttgcaaggccggtctaatgcctggagacctcaggtgaacaacccgaaagaatggctccaggtggactttcagaagaccatgaaagtaacaggtgtcactactcagggagttaagtccttggatactagcatgtatgtgaaggagttccttatttcctcatcacaagatggccaccagtggaccctcttctttcagaatggtaaggtcaaagtgtttcagggcaatcaagacagcttcacacccgtggtgaacagtcttgatcctccactcttgacacgataccttcgaatccatccacagtcttgggagcaccagattgcattgcgcatggaagtacttggatgcgaggctcaggacctctac

SEQ ID NO: 2042 - protein, 1457 aa, synthetic construct
  REGION 1..1457: note = Variant of human B-domain deleted Factor VIII
MQIELSTCFFLCLLRFCFSATRRYYLGAVELSWDYMQSDLGELPVDARFPPRVPKSFPFNTSQVYKKTLFVEFTDHLFNIAKPRPPWMGLLGPTIQAEVYDTVVITLKNMASHPVSLHAVGVSYWKASEGAEYDDQTSQREKEDDKVFPGGSHTYVWQVLKENGPMASDPPCLTYSYLSHVDLVKDLNSGLIGALLVCREGSLAKEKTQTLAKFILLFAVFDEGKSWHSETKNSLMQDRDAASARAWPKMHTVNGYVNRTLPGLIGCHRKSVYWHVIGMGTTPEVHSIFLEGHTFLVRNHRQASLGISPITFLTAQTLLRDLGQFLLFCHIPSHQHDGMEAYVKVDSCPEEPQLRMKNNEEAEDYDDDLTDSEMDVVRFDDDNSPSIIQARSGAKKHPKTWVHYIAAEEEDWDYAPLVLAPDDRSYKSQYLNNGPQRIGRKYKKVRFMAYTDETFKTREAIQHESGILGPLLYGEVGDTLLIIFKNQASRPYNIYPHGITDVRPLYSRRLPKGVKHLKDFPILPGEIFKYKWTITVEDGPTKSDPRCLTRYYSSEVNWERDLASGLIGPLLICYKESVDQRGNQIMSDKRNVILFSVFDENRSWYLTENIQRFLPNPAEVQLEDPEFQASNIMHSINGYVFDSLQLSVCLHEVAYWYILSIGAQTDFLSVFFSGYTFKHKNVYEDTLTLFPFSGETVFMSMENPGLWILGCHNSDFRNRGMTALLKVSSCDWNTGDKYEDSYEDISAYFDSKNNAIEPRSFSQNPPVLKRHQREGTRTTLQSDQEEIDYDDTISVEMKQEDFDIYDEDENQSPRSFQKKTRHYFIAAVERLWDYGMSSSPHVLRNRAQSGSVPQFKKVVFQEFTDGSFTQPLYRGELNEHLGLLGPYIRAEVEDNIMVTFRNQASRPYSFYSSLISYEEDQRQGAEPRKNFVKPNETKTYFWKVQHHMAPTKDEFDCKAWAYFSDVDLEKDVHSGLIGPLLVCHTNTLNPAHGRQVTVQEFALFFTIFDETKSWYFTENMERNCRAPCNIQMEDPTFKENYRFHAINGYIMDTLPGLVMAQDQRIRWYLLSMGSNENIHSIHFSGHVFTVRKKEEYKMALYNLYPGVFETVEMLPSKAGIWRVECLIGEHLHAGMSTLFLVYSNKCQNPLGMASGHIRDFQITASGQYGQWAPKLARLHYSGSINAWSTKEPFSWIKVDLLAPMIIHGIKTQGARQKFSSLYISQFIIMYSLDGKKWQTYRGNSTGTDMVFFGNVDSSGIKHNIFNPPIIARYIRLHPTHYSIRSTLRMELMGCDLNSCSMPLGMESKAISDAQITASSYFTNMFATWSPSKARLHLQGRSNAWRPQVNNPKEWLQVDFQKTMKVTGVTTQGVKSLDTSMYVKEFLISSSQDGHQWTLFFQNGKVKVFQGNQDSFTPVVNSLDPPLLTRYLRIHPQSWEHQIALRMEVLGCEAQDLY

SEQ ID NO: 2043 - DNA, 4371 bp, synthetic construct
  misc_feature 1..4371: note = Variant of human B-domain deleted Factor VIII
  source 1..4371: mol_type = other DNA
atgcagattgaactgtctacctgcttcttcctctgtttgctgaggttctgctttagcgccactagacggtactaccttggcgctgtggagctgtcctgggactatatgcagagtgatttgggagagcttcccgtcgacgcacgatttcctcctcgcgttccaaagtcatttccctttaacacaagccaggtgtacaagaagacgctcttcgtcgaattcaccgatcacctgttcaatatcgccaaacccagaccaccatggatgggtcttttggggcctaccatacaagcggaggtgtatgacacagttgttatcactctcaagaacatggcttctcatccggtaagtcttcacgcagtgggcgtgtcctactggaaagcttcagaaggagccgagtatgatgatcagacatcccagagggagaaagaagacgacaaggtatttccaggtgggtctcatacctatgtgtggcaagtgctcaaagagaatggccctatggcaagcgatccgccgtgtttgacttacagctacctttcacacgttgacctcgtcaaggacctcaactccgggttgattggagccttgttggtatgcagggaaggatctcttgccaaagagaagacacagaccctggccaagtttatccttctctttgctgtgttcgatgagggcaaaagttggcatagcgaaacgaagaattccctcatgcaggatcgcgacgcagccagcgccagagcttggcccaagatgcacactgtgaacggatatgtcaataggacgcttcctggcttgattgggtgtcatcggaaaagtgtctactggcacgtgatcggaatggggacaacaccagaggtccactccatatttctcgaaggccataccttccttgttcgaaaccacagacaggcatccttggggatctctcccattacctttctcactgcccaaacgctccttcgtgacttgggtcagttccttctcttttgccatatcccgtcacaccagcatgatggtatggaagcttatgtgaaagtcgacagttgtcctgaggagccacagttgcgcatgaagaataatgaagaagccgaggattacgacgacgatctcaccgattctgagatggacgtggtgaggtttgatgacgacaactctccctccatcattcaagctcggagcggggcgaagaaacaccccaagacttgggtccactatatagcggcggaagaggaggattgggattacgctcctcttgtattggcaccagatgaccgctcatacaaaagccagtacctcaacaacggaccgcagagaattggccggaagtataagaaagtgcgatttatggcctatacagacgaaacctttaagacaagggaggccatccagcatgagagtgggattttgggacctcttctttacggcgaagttggtgataccctcctcatcatcttcaagaatcaagcttctcgcccctataacatttacccacacgggatcactgacgttaggcctttgtatagcagaagacttcccaaaggcgtgaagcatctcaaagacttccccattttgccaggcgagatctttaagtacaaatggaccattacagtggaagatggaccgactaaatcagaccctcgatgccttacgcggtactattcctccttcgtgaattgggagagagatttggcaagcggactcataggaccactcctcatctgttacaaggaatctgtagaccagaggggtaaccagattatgagtgataaacgcaatgtgatcctttttagcgtcttcgacgagaaccggtcctggtacttgaccgagaatatacaaaggttccttcccaaccccgcagaggttcagttggaagaccctgagtttcaggccagcaatattatgcactcaatcaacggctatgtgtttgatagtctccagctttctgtttgcctccatgaagtagcctattggtacatcttgtcaattggtgctcaaacagacttcctctccgtcttcttctccggctacacctttaagcacaagaacgtgtatgaggacactctcacactctttccattttctggagaaaccgtgttcatgagcatggagaatccaggcctttggatcttgggttgccacaacagtgattttcgcaatcggggaatgactgctctcctcaaagtcagcagctgtgattggaacacaggcgactattacgaagattcttacgaggacataagtgcctactttgactccaagaataacgccattgagcccagatcattctcccagaatcctcccgtgcttaaaaggcatcagcgcgaaggtaccagaactactcttcagtctgatcaagaggagattgactatgacgacaccattagcgtggaaatgaagtcggaggatttcgatatctatgacgaagatgagaaccagtctccgcggagctttcagaagaagacgcgacactacttcattgcagcagtcgaaaggctttgggactacggtatgtcatcatcccctcatgtgttgcgcaatagagctcagagtggaagtgttccacagttcaagaaagtcgtctttcaagagtttacagatggcagcttcacacagcctctctatcggggcgagcttaacgaacatttgggactccttggtccctatatccgagccgaagtggaggacaacattatggttacctttaggaatcaagcctctcgcccctacagcttctactcctccctcatcacctatgaggaggatcaaagacaaggcgctgaaccacggaagaactttgtgaaaccgaatgagacgaagacctacttctggaaagtacagcaccacatggcccccacaaaagacgaattcgattgcaaagcatgggcgtatttttcagacgttgacttggagaaagatgtacattcaggacttattggtcctttgttggtgtgtcacactaacactctcaatccagcccatggcaggcaggtgacagtccaggaattcgctcttttctttaccatctttgatgagaccaagtcctggtacttcacggaaaacatggagcgcaattgcagagccccctgtaacatacagatggaggaccctacctttaaggaaaattatcggttccacgcaatcaacggatacattatggatacactccctggccttgtgatggctcaggaccaacgaatcaggtggtacctcctcagcatgggttctaatgagaacatacactccattcacttttcaggacatgtgttcactgtccggaagaaagaagagtataagatggccctctacaatttgtatccaggcgtgtttgggaccgttgaaatgcttccctctaaagctggcatctggagagtagagtgcttgatcggagaacatcttcacgcaggtatgagcaccttgttcctcgtgtacagcaacaaatgtcagaatccacttggcatggccagtggacacattcgcgactttcagatcacagcatctggccagtatggacaatgggccccaaagttggctcgcctccattactccggtagcataaatgcgtggtccactaaagaacctttcagctggattaaggtcgatcttcttgcccccatgatcatccacggcattaagacacagggagcgaggcagaaattctcctccctctacatctcacagttcattattatgtatagtttggacggcaagaagtggcaaacttatagaggtaacagtactggaacagacatggtgttcttcggcaacgttgatagctctggcatcaaacacaacatctttaatcctcccataatagctcggtacatcagattgcatccgacccactacagcattaggagtacactccgaatggagcttatgggttgcgacttgaattcctgttcaatgccactcggaatggagtctaaagccatctctgatgcacagataaccgccagtagctactttacgaacatgtttgctacgtggtcaccctctaaggcaaggcttcatttgcaaggccggtctaatgcctggagacctcaggtgaacaacccgaaagaatggctccaggtggactttcagaagaccatgaaagtaacaggtgtcactactcagggagttaagtccttggatactagcatgtatgtgaaggagttccttatttcctcatcacaagatggccaccagtggaccctcttctttcagaatggtaaggtcaaagtgtttcagggcaatcaagacagcttcacacccgtggtgaacagtcttgatcctccactcttgacacgataccttcgaatccatccacagtcttgggagcaccagattgcattgcgcatggaagtacttggatgcgaggctcaggacctctac

SEQ ID NO: 2044 - protein, 1457 aa, synthetic construct
  REGION 1..1457: note = Variant of human B-domain deleted Factor VIII
MQIELSTCFFLCLLRFCFSATRRYYLGAVELSWDYMQSDLGELPVDARFPPRVPKSFPFNTSQVYKKTLFVEFTDHLFNIAKPRPPWMGLLGPTIQAEVYDTVVITLKNMASHPVSLHAVGVSYWKASEGAEYDDQTSQREKEDDKVFPGGSHTYVWQVLKENGPMASDPPCLTYSYLSHVDLVKDLNSGLIGALLVCREGSLAKEKTQTLAKFILLFAVFDEGKSWHSETKNSLMQDRDAASARAWPKMHTVNGYVNRTLPGLIGCHRKSVYWHVIGMGTTPEVHSIFLEGHTFLVRNHRQASLGISPITFLTAQTLLRDLGQFLLFCHIPSHQHDGMEAYVKVDSCPEEPQLRMKNNEEAEDYDDDLTDSEMDVVRFDDDNSPSIIQARSGAKKHPKTWVHYIAAEEEDWDYAPLVLAPDDRSYKSQYLNNGPQRIGRKYKKVRFMAYTDETFKTREAIQHESGILGPLLYGEVGDTLLIIFKNQASRPYNIYPHGITDVRPLYSRRLPKGVKHLKDFPILPGEIFKYKWTITVEDGPTKSDPRCLTRYYSSFVNWERDLASGLIGPLLICYKESVDQRGNQIMSDKRNVILFSVFDENRSWYLTENIQRFLPNPAEVQLEDPEFQASNIMHSINGYVFDSLQLSVCLHEVAYWYILSIGAQTDFLSVFFSGYTFKHKNVYEDTLTLFPFSGETVFMSMENPGLWILGCHNSDFRNRGMTALLKVSSCDWNTGDYYEDSYEDISAYFDSKNNAIEPRSFSQNPPVLKRHQREGTRTTLQSDQEEIDYDDTISVEMKSEDFDIYDEDENQSPRSFQKKTRHYFIAAVERLWDYGMSSSPHVLRNRAQSGSVPQFKKVVFQEFTDGSFTQPLYRGELNEHLGLLGPYIRAEVEDNIMVTFRNQASRPYSFYSSLITYEEDQRQGAEPRKNFVKPNETKTYFWKVQHHMAPTKDEFDCKAWAYFSDVDLEKDVHSGLIGPLLVCHTNTLNPAHGRQVTVQEFALFFTIFDETKSWYFTENMERNCRAPCNIQMEDPTFKENYRFHAINGYIMDTLPGLVMAQDQRIRWYLLSMGSNENIHSIHFSGHVFTVRKKEEYKMALYNLYPGVFGTVEMLPSKAGIWRVECLIGEHLHAGMSTLFLVYSNKCQNPLGMASGHIRDFQITASGQYGQWAPKLARLHYSGSINAWSTKEPFSWIKVDLLAPMIIHGIKTQGARQKFSSLYISQFIIMYSLDGKKWQTYRGNSTGTDMVFFGNVDSSGIKHNIFNPPIIARYIRLHPTHYSIRSTLRMELMGCDLNSCSMPLGMESKAISDAQITASSYFTNMFATWSPSKARLHLQGRSNAWRPQVNNPKEWLQVDFQKTMKVTGVTTQGVKSLDTSMYVKEFLISSSQDGHQWTLFFQNGKVKVFQGNQDSFTPVVNSLDPPLLTRYLRIHPQSWEHQIALRMEVLGCEAQDLY

SEQ ID NO: 2045 - DNA, 4371 bp, synthetic construct
  misc_feature 1..4371: note = Variant of human B-domain deleted Factor VIII
  source 1..4371: mol_type = other DNA
atgcagattgaactgtctacctgcttcttcctctgtttgctgaggttctgctttagcgccactagacggtactaccttggcgctgtggagctgtcctgggactatatgcagagtgatttgggagagcttcccgtcgacgcacgatttcctcctcgcgttccaaagtcatttccctttaacacaagccaggtgtacaagaagacgctcttcgtcgaattcaccgatcacctgttcaatatcgccaaacccagaccaccatggatgggtcttttggggcctaccatacaagcggaggtgtatgacacagttgttatcactctcaagaacatggcttctcatccggtaagtcttcacgcagtgggcgtgtcctactggaaagcttcagaaggagccgagtatgatgatcagacatcccagagggagaaagaagacgacaaggtatttccaggtgggtctcatacctatgtgtggcaagtgctcaaagagaatggccctatggcaagcgatccgccgtgtttgacttacagctacctttcacacgttgacctcgtcaaggacctcaactccgggttgattggagccttgttggtatgcagggaaggatctcttgccaaagagaagacacagaccctggccaagtttatccttctctttgctgtgttcgatgagggcaaaagttggcatagcgaaacgaagaattccctcatgcaggatcgcgacgcagccagcgccagagcttggcccaagatgcacactgtgaacggatatgtcaataggacgcttcctggcttgattgggtgtcatcggaaaagtgtctactggcacgtgatcggaatggggacaacaccagaggtccactccatatttctcgaaggccataccttccttgttcgaaaccacagacaggcatccttggggatctctcccattacctttctcactgcccaaacgctccttcgtgacttgggtcagttccttctcttttgccatatcccgtcacaccagcatgatggtatggaagcttatgtgaaagtcgacagttgtcctgaggagccacagttgcgcatgaagaataatgaagaagccgaggattacgacgacgatctcaccgattctgagatggacgtggtgaggtttgatgacgacaactctccctccatcattcaagctcggagcggggcgaagaaacaccccaagacttgggtccactatatagcggcggaagaggaggattgggattacgctcctcttgtattggcaccagatgaccgctcatacaaaagccagtacctcaacaacggaccgcagagaattggccggaagtataagaaagtgcgatttatggcctatacagacgaaacctttaagacaagggaggccatccagcatgagagtgggattttgggacctcttctttacggcgaagttggtgataccctcctcatcatcttcaagaatcaagcttctcgcccctataacatttacccacacgggatcactgacgttaggcctttgtatagcagaagacttcccaaaggcgtgaagcatctcaaagacttccccattttgccaggcgagatctttaagtacaaatggaccattacagtggaagatggaccgactaaatcagaccctcgatgccttacgcggtactattcctccttcgtgaattgggagagagatttggcaagcggactcataggaccactcctcatctgttacaaggaatctgtagaccagaggggtaaccagattatgagtgataaacgcaatgtgatcctttttagcgtcttcgacgagaaccggtcctggtacttgaccgagaatatacaaaggttccttcccaaccccgcagaggttcagttggaagaccctgagtttcaggccagcaatattatgcactcaatcaacggctatgtgtttgatagtctccagctttctgtttgcctccatgaagtagcctattggtacatcttgtcaattggtgctcaaacagacttcctctccgtcttcttctccggctacacctttaagcacaagaacgtgtatgaggacactctcacactctttccattttctggagaaaccgtgttcatgagcatggagaatccaggcctttggatcttgggttgccacaacagtgattttcgcaatcggggaatgactgctctcctcaaagtcagcagctgtgattggaacacaggcgactattacgaagattcttacgaggacataagtgcctactttgactccaagaataacgccattgagcccagatcattctcccagaatcctcccgtgcttaaaaggcatcagcgcgaaggtaccagaactactcttcagtctgatcaagaggagattgactatgacgacaccattagcgtggaaatgaagaaggaggatttcgatatctatgacgaagatgagaaccagtctccgcggagctttcagaagaagacgcgacactacttcattgcagcagtcgaaaggctttgggactacggtatgtcatcatcccctcatgtgttgcgcaatagagctcagagtggaagtgttccacagttcaagaaagtcgtctttcaagagtttacagatggcagcttcacacagcctctctatcggggcgagcttaacgaacatttgggactccttggtccctatatccgagccgaagtggaggacaacattatggttacctttaggaatcaagcctctcgcccctacagcttctactcctccctcatcagttatgaggaggatcagagacaaggcgctgaaccacggaagaactttgtgaaaccgaatgagacgaagacctacttctggaaagtacagcaccacatggcccccacaaaagacgaattcgattgcaaagcatgggcgtatttttcagacgttgacttggagaaagatgtacattcaggacttattggtcctttgttggtgtgtcacactaacactctcaatccagcccatggcaggcaggtgacagtccaggaattcgctcttttctttaccatctttgatgagaccaagtcctggtacttcacggaaaacatggagcgcaattgcagagccccctgtaacatacagatggaggaccctacctttaaggaaaattatcggttccacgcaatcaacggatacattatggatacactccctggccttgtgatggctcaggaccaacgaatcaggtggtacctcctcagcatgggttctaatgagaacatacactccattcacttttcaggacatgtgttcactgtccggaagaaagaagagtataagatggccctctacaatttgtatccaggcgtgtttgagaccgttgaaatgcttccctctaaagctggcatctggagagtagagtgcttgatcggagaacatcttcacgcaggtatgagcaccttgttcctcgtgtacagcaacaaatgtcagaatccacttggcatggccagtggacacattcgcgactttcagatcacagcatctggccagtatggacaatgggccccaaagttggctcgcctccattactccggtagcataaatgcgtggtccactaaagaacctttcagctggattaaggtcgatcttcttgcccccatgatcatccacggcattaagacacagggagcgaggcagaaattctcctccctctacatctcacagttcattattatgtatagtttggacggcaagaagtggcaaacttatagaggtaacagtactggaacagacatggtgttcttcggcaacgttgatagctctggcatcaaacacaacatctttaatcctcccataatagctcggtacatcagattgcatccgacccactacagcattaggagtacactccgaatggagcttatgggttgcgacttgaattcctgttcaatgccactcggaatggagtctaaagccatctctgatgcacagataaccgccagtagctactttacgaacatgtttgctacgtggtcaccctctaaggcaaggcttcatttgcaaggccggtctaatgcctggagacctcaggtgaacaacccgaaagaatggctccaggtggactttcagaagaccatgaaagtaacaggtgtcactactcagggagttaagtccttggatactagcatgtatgtgaaggagttccttatttcctcatcacaagatggccaccagtggaccctcttctttcagaatggtaaggtcaaagtgtttcagggcaatcaagacagcttcacacccgtggtgaacagtcttgatcctccactcttgacacgataccttcgaatccatccacagtcttgggagcaccagattgcattgcgcatggaagtacttggatgcgaggctcaggacctctac

SEQ ID NO: 2046 - protein, 1457 aa, synthetic construct
  REGION 1..1457: note = Variant of human B-domain deleted Factor VIII
MQIELSTCFFLCLLRFCFSATRRYYLGAVELSWDYMQSDLGELPVDARFPPRVPKSFPFNTSQVYKKTLFVEFTDHLFNIAKPRPPWMGLLGPTIQAEVYDTVVITLKNMASHPVSLHAVGVSYWKASEGAEYDDQTSQREKEDDKVFPGGSHTYVWQVLKENGPMASDPPCLTYSYLSHVDLVKDLNSGLIGALLVCREGSLAKEKTQTLAKFILLFAVFDEGKSWHSETKNSLMQDRDAASARAWPKMHTVNGYVNRTLPGLIGCHRKSVYWHVIGMGTTPEVHSIFLEGHTFLVRNHRQASLGISPITFLTAQTLLRDLGQFLLFCHIPSHQHDGMEAYVKVDSCPEEPQLRMKNNEEAEDYDDDLTDSEMDVVRFDDDNSPSIIQARSGAKKHPKTWVHYIAAEEEDWDYAPLVLAPDDRSYKSQYLNNGPQRIGRKYKKVRFMAYTDETFKTREAIQHESGILGPLLYGEVGDTLLIIFKNQASRPYNIYPHGITDVRPLYSRRLPKGVKHLKDFPILPGEIFKYKWTITVEDGPTKSDPRCLTRYYSSFVNWERDLASGLIGPLLICYKESVDQRGNQIMSDKRNVILFSVFDENRSWYLTENIQRFLPNPAEVQLEDPEFQASNIMHSINGYVFDSLQLSVCLHEVAYWYILSIGAQTDFLSVFFSGYTFKHKNVYEDTLTLFPFSGETVFMSMENPGLWILGCHNSDFRNRGMTALLKVSSCDWNTGDYYEDSYEDISAYFDSKNNAIEPRSFSQNPPVLKRHQREGTRTTLQSDQEEIDYDDTISVEMKKEDFDIYDEDENQSPRSFQKKTRHYFIAAVERLWDYGMSSSPHVLRNRAQSGSVPQFKKVVFQEFTDGSFTQPLYRGELNEHLGLLGPYIRAEVEDNIMVTFRNQASRPYSFYSSLISYEEDQRQGAEPRKNFVKPNETKTYFWKVQHHMAPTKDEFDCKAWAYFSDVDLEKDVHSGLIGPLLVCHTNTLNPAHGRQVTVQEFALFFTIFDETKSWYFTENMERNCRAPCNIQMEDPTFKENYRFHAINGYIMDTLPGLVMAQDQRIRWYLLSMGSNENIHSIHFSGHVFTVRKKEEYKMALYNLYPGVFETVEMLPSKAGIWRVECLIGEHLHAGMSTLFLVYSNKCQNPLGMASGHIRDFQITASGQYGQWAPKLARLHYSGSINAWSTKEPFSWIKVDLLAPMIIHGIKTQGARQKFSSLYISQFIIMYSLDGKKWQTYRGNSTGTDMVFFGNVDSSGIKHNIFNPPIIARYIRLHPTHYSIRSTLRMELMGCDLNSCSMPLGMESKAISDAQITASSYFTNMFATWSPSKARLHLQGRSNAWRPQVNNPKEWLQVDFQKTMKVTGVTTQGVKSLDTSMYVKEFLISSSQDGHQWTLFFQNGKVKVFQGNQDSFTPVVNSLDPPLLTRYLRIHPQSWEHQIALRMEVLGCEAQDLY

SEQ ID NO: 2047 - DNA, 4371 bp, synthetic construct
  misc_feature 1..4371: note = Variant of human B-domain deleted Factor VIII
  source 1..4371: mol_type = other DNA
atgcagattgaactgtctacctgcttcttcctctgtttgctgaggttctgctttagcgccactagacggtactaccttggcgctgtggagctgtcctgggactatatgcagagtgatttgggagagcttcccgtcgacgcacgatttcctcctcgcgttccaaagtcatttccctttaacacaagccaggtgtacaagaagacgctcttcgtcgaattcaccgatcacctgttcaatatcgccaaacccagaccaccatggatgggtcttttggggcctaccatacaagcggaggtgtatgacacagttgttatcactctcaagaacatggcttctcatccggtaagtcttcacgcagtgggcgtgtcctactggaaagcttcagaaggagccgagtatgatgatcagacatcccagagggagaaagaagacgacaaggtatttccaggtgggtctcatacctatgtgtggcaagtgctcaaagagaatggccctatggcaagcgatccgccgtgtttgacttacagctacctttcacacgttgacctcgtcaaggacctcaactccgggttgattggagccttgttggtatgcagggaaggatctcttgccaaagagaagacacagaccctggccaagtttatccttctctttgctgtgttcgatgagggcaaaagttggcatagcgaaacgaagaattccctcatgcaggatcgcgacgcagccagcgccagagcttggcccaagatgcacactgtgaacggatatgtcaataggacgcttcctggcttgattgggtgtcatcggaaaagtgtctactggcacgtgatcggaatggggacaacaccagaggtccactccatatttctcgaaggccataccttccttgttcgaaaccacagacaggcatccttggggatctctcccattacctttctcactgcccaaacgctccttcgtgacttgggtcagttccttctcttttgccatatcccgtcacaccagcatgatggtatggaagcttatgtgaaagtcgacagttgtcctgaggagccacagttgcgcatgaagaataatgaagaagccgaggattacgacgacgatctcaccgattctgagatggacgtggtgaggtttgatgacgacaactctccctccatcattcaagctcggagcggggcgaagaaacaccccaagacttgggtccactatatagcggcggaagaggaggattgggattacgctcctcttgtattggcaccagatgaccgctcatacaaaagccagtacctcaacaacggaccgcagagaattggccggaagtataagaaagtgcgatttatggcctatacagacgaaacctttaagacaagggaggccatccagcatgagagtgggattttgggacctcttctttacggcgaagttggtgataccctcctcatcatcttcaagaatcaagcttctcgcccctataacatttacccacacgggatcactgacgttaggcctttgtatagcagaagacttcccaaaggcgtgaagcatctcaaagacttccccattttgccaggcgagatctttaagtacaaatggaccattacagtggaagatggaccgactaaatcagaccctcgatgccttacgcggtactattcctccggggtgaattgggagagagatttggcaagcggactcataggaccactcctcatctgttacaaggaatctgtagaccagaggggtaaccagattatgagtgataaacgcaatgtgatcctttttagcgtcttcgacgagaaccggtcctggtacttgaccgagaatatacaaaggttccttcccaaccccgcaggcgttcagttggaagaccctgagtttcaggccagcaatattatgcactcaatcaacggctatgtgtttgatagtctccagctttctgtttgcctccatgaagtagcctattggtacatcttgtcaattggtgctcaaacagacttcctctccgtcttcttctccggctacacctttaagcacaagggcgtgtatgaggacactctcacactctttccattttctggagaaaccgtgttcatgagcatggagaatccaggcctttggatcttgggttgccacaacagtgattttcgcaatcggggaatgactgctctcctcaaagtcagcagctgtgattggaacacaggcgactattacgaagattcttacgaggacataagtgcctactttgactccaagaataacgccattgagcccagatcattctcccagaatcctcccgtgcttaaaaggcatcagcgcgaaggtaccagaactactcttcagtctgatcaagaggagattgactatgacgacaccattagcgtggaaatgaagaaggaggatttcgatatctatgacgaagatgagaaccagtctccgcggagctttcagaagaagacgcgacactacttcattgcagcagtcgaaaggctttgggactacggtatgtcatcaagccctcatgtgttgcgcaatagagctcagagtggaagtgttccacagttcaagaaagtcgtctttcaagagtttacagatggcagcttcacacagcctctctatcggggcgagcttaacgaacatttgggactccttggtccctatatccgagccgaagtggaggacaacattatggttacctttaggaatcaagcctctcgcccctacagcttctactcctccctcatcagttatgaggaggatcgtagacaaggcgctgaaccacggaagaactttgtgaaaccgaatgagacgaagacctacttctggaaagtacagcaccacatggcccccacaaaagacgaattcgattgcaaagcatgggcgtatttttcagacgttgacttggagaaagatgtacattcaggacttattggtcctttgttggtgtgtcacactaacactctcaatccagcccatggcaggcaggtgacagtccaggaattcgctcttttctttaccatctttgatgagaccaagtcctggtacttcacggaaaacatggagcgcaattgcagagccccctgtaacatacagatggaggaccctacctttaaggaaaattatcggttccacgcaatcaacggatacattatggatacactccctggccttgtgatggctcaggaccaacgaatcaggtggtacctcctcagcatgggttctaatgagaacatacactccattcacttttcaggacatgtgttcactgtccggaagaaagaagagtataagatggccctctacaatttgtatccaggcgtgtttgagaccgttgaaatgcttccctctaaagctggcatctggagagtagagtgcttgatcggagaacatcttcacgcaggtatgagcaccttgttcctcgtgtacagcaacaaatgtcagaatccacttggcatggccagtggacacattcgcgactttcagatcacagcatctggccagtatggacaatgggccccaaagttggctcgcctccattactccggtagcataaatgcgtggtccactaaagaacctttcagctggattaaggtcgatcttcttgcccccatgatcatccacggcattaagacacagggagcgaggcagaaattctcctccctctacatctcacagttcattattatgtatagtttggacggcaagaagtggcaaacttatagaggtaacagtactggaacagacatggtgttcttcggcaacgttgatagctctggcatcaaacacaacatctttaatcctcccataatagctcggtacatcagattgcatccgacccactacagcattaggagtacactccgaatggagcttatgggttgcgacttgaattcctgttcaatgccactcggaatggagtctaaagccatctctgatgcacagataaccgccagtagctactttacgaacatgtttgctacgtggtcaccctctaaggcaaggcttcatttgcaaggccggtctaatgcctggagacctcaggtgaacaacccgaaagaatggctccaggtggactttcagaagaccatgaaagtaacaggtgtcactactcagggagttaagtccttggatactagcatgtatgtgaaggagttccttatttcctcatcacaagatggccaccagtggaccctcttctttcagaatggtaaggtcaaagtgtttcagggcaatcaagacagcttcacacccgtggtgaacagtcttgatcctccactcttgacacgataccttcgaatccatccacagtcttgggagcaccagattgcattgcgcatggaagtacttggatgcgaggctcaggacctctac

SEQ ID NO: 2048 - protein, 1457 aa, synthetic construct
  REGION 1..1457: note = Variant of human B-domain deleted Factor VIII
MQIELSTCFFLCLLRFCFSATRRYYLGAVELSWDYMQSDLGELPVDARFPPRVPKSFPFNTSQVYKKTLFVEFTDHLFNIAKPRPPWMGLLGPTIQAEVYDTVVITLKNMASHPVSLHAVGVSYWKASEGAEYDDQTSQREKEDDKVFPGGSHTYVWQVLKENGPMASDPPCLTYSYLSHVDLVKDLNSGLIGALLVCREGSLAKEKTQTLAKFILLFAVFDEGKSWHSETKNSLMQDRDAASARAWPKMHTVNGYVNRTLPGLIGCHRKSVYWHVIGMGTTPEVHSIFLEGHTFLVRNHRQASLGISPITFLTAQTLLRDLGQFLLFCHIPSHQHDGMEAYVKVDSCPEEPQLRMKNNEEAEDYDDDLTDSEMDVVRFDDDNSPSIIQARSGAKKHPKTWVHYIAAEEEDWDYAPLVLAPDDRSYKSQYLNNGPQRIGRKYKKVRFMAYTDETFKTREAIQHESGILGPLLYGEVGDTLLIIFKNQASRPYNIYPHGITDVRPLYSRRLPKGVKHLKDFPILPGEIFKYKWTITVEDGPTKSDPRCLTRYYSSGVNWERDLASGLIGPLLICYKESVDQRGNQIMSDKRNVILFSVFDENRSWYLTENIQRFLPNPAGVQLEDPEFQASNIMHSINGYVFDSLQLSVCLHEVAYWYILSIGAQTDFLSVFFSGYTFKHKGVYEDTLTLFPFSGETVFMSMENPGLWILGCHNSDFRNRGMTALLKVSSCDWNTGDYYEDSYEDISAYFDSKNNAIEPRSFSQNPPVLKRHQREGTRTTLQSDQEEIDYDDTISVEMKKEDFDIYDEDENQSPRSFQKKTRHYFIAAVERLWDYGMSSSPHVLRNRAQSGSVPQFKKVVFQEFTDGSFTQPLYRGELNEHLGLLGPYIRAEVEDNIMVTFRNQASRPYSFYSSLISYEEDRRQGAEPRKNFVKPNETKTYFWKVQHHMAPTKDEFDCKAWAYFSDVDLEKDVHSGLIGPLLVCHTNTLNPAHGRQVTVQEFALFFTIFDETKSWYFTENMERNCRAPCNIQMEDPTFKENYRFHAINGYIMDTLPGLVMAQDQRIRWYLLSMGSNENIHSIHFSGHVFTVRKKEEYKMALYNLYPGVFETVEMLPSKAGIWRVECLIGEHLHAGMSTLFLVYSNKCQNPLGMASGHIRDFQITASGQYGQWAPKLARLHYSGSINAWSTKEPFSWIKVDLLAPMIIHGIKTQGARQKFSSLYISQFIIMYSLDGKKWQTYRGNSTGTDMVFFGNVDSSGIKHNIFNPPIIARYIRLHPTHYSIRSTLRMELMGCDLNSCSMPLGMESKAISDAQITASSYFTNMFATWSPSKARLHLQGRSNAWRPQVNNPKEWLQVDFQKTMKVTGVTTQGVKSLDTSMYVKEFLISSSQDGHQWTLFFQNGKVKVFQGNQDSFTPVVNSLDPPLLTRYLRIHPQSWEHQIALRMEVLGCEAQDLY

SEQ ID NO: 2049 - DNA, 4371 bp, synthetic construct
  misc_feature 1..4371: note = Variant of human B-domain deleted Factor VIII
  source 1..4371: mol_type = other DNA
atgcagattgaactgtctacctgcttcttcctctgtttgctgaggttctgctttagcgccactagacggtactaccttggcgctgtggagctgtcctgggactatatgcagagtgatttgggagagcttcccgtcgacgcacgatttcctcctcgcgttccaaagtcatttccctttaacacaagccaggtgtacaagaagacgctcttcgtcgaattcaccgatcacctgttcaatatcgccaaacccagaccaccatggatgggtcttttggggcctaccatacaagcggaggtgtatgacacagttgttatcactctcaagaacatggcttctcatccggtaagtcttcacgcagtgggcgtgtcctactggaaagcttcagaaggagccgagtatgatgatcagacatcccagagggagaaagaagacgacaaggtatttccaggtgggtctcatacctatgtgtggcaagtgctcaaagagaatggccctatggcaagcgatccgccgtgtttgacttacagctacctttcacacgttgacctcgtcaaggacctcaactccgggttgattggagccttgttggtatgcagggaaggatctcttgccaaagagaagacacagaccctggccaagtttatccttctctttgctgtgttcgatgagggcaaaagttggcatagcgaaacgaagaattccctcatgcaggatcgcgacgcagccagcgccagagcttggcccaagatgcacactgtgaacggatatgtcaataggacgcttcctggcttgattgggtgtcatcggaaaagtgtctactggcacgtgatcggaatggggacaacaccagaggtccactccatatttctcgaaggccataccttccttgttcgaaaccacagacaggcatccttggggatctctcccattacctttctcactgcccaaacgctccttcgtgacttgggtcagttccttctcttttgccatatcccgtcacaccagcatgatggtatggaagcttatgtgaaagtcgacagttgtcctgaggagccacagttgcgcatgaagaataatgaagaagccgaggattacgacgacgatctcaccgattctgagatggacgtggtgaggtttgatgacgacaactctccctccatcattcaagctcggagcggggcgaagaaacaccccaagacttgggtccactatatagcggcggaagaggaggattgggattacgctcctcttgtattggcaccagatgaccgctcatacaaaagccagtacctcaacaacggaccgcagagaattggccggaagtataagaaagtgcgatttatggcctatacagacgaaacctttaagacaagggaggccatccagcatgagagtgggattttgggacctcttctttacggcgaagttggtgataccctcctcatcatcttcaagaatcaagcttctcgcccctataacatttacccacacgggatcactgacgttaggcctttgtatagcagaagacttcccaaaggcgtgaagcatctcaaagacttccccattttgccaggcgagatctttaagtacaaatggaccattacagtggaagatggaccgactaaatcagaccctcgatgccttacgcggtactattcctccttcgtgaattgggagagagatttggcaagcggactcataggaccactcctcatctgttacaaggaatctgtagaccagaggggtaaccagattatgagtgataaacgcaatgtgatcctttttagcgtcttcgacgagaaccggtcctggtacttgaccgagaatatacaaaggttccttcccaaccccgcagaggttcagttggaagaccctgagtttcaggccagcaatattatgcactcaatcaacggctatgtgtttgatagtctccagctttctgtttgcctccatgaagtagcctattggtacatcttgtcaattggtgctcaaacagacttcctctccgtcttcttctccggctacacctttaagcacaagaacgtgtatgaggacactctcacactctttccattttctggagaaaccgtgttcatgagcatggagaatccaggcctttggatcttgggttgccacaacagtgattttcgcaatcggggaatgactgctctcctcaaagtcagcagctgtgattggaacacaggcgactattacgaagattcttacgaggacataagtgcctactttgactccaagaataacgccattgagcccagatcattctcccagaatcctcccgtgcttaaaaggcatcagcgcgaaggtaccagaactactcttcagtctgatcaagaggagattgactatgacgacaccattagcgtggaaatgaagaaggaggatttcgatatctatgacgaagatgagaaccagtctccgcggagctttcagaagaagacgcgacactacttcattgcagcagtcgaaaggctttgggactacggtatgtcatcaagccctcatgtgttgcgcaatagagctcagagtggaagtgttccacagttcaagaaagtcgtctttcaagagtttacagatggcagcttcacacagcctctctatcggggcgagcttaacgaacatttgggactccttggtccctatatccgagccgaagtggaggacaacattatggttacctttaggaatcaagcctctcgcccctacagcttctactcctccctcatcacctatgaggaggatcaaagacaaggcgctgaaccacggaagaactttgtgaaaccgaatgagacgaagacctacttctggaaagtacagcaccacatggcccccacaaaagacgaattcgattgcaaagcatgggcgtatttttcagacgttgacttggagaaagatgtacattcaggacttattggtcctttgttggtgtgtcacactaacactctcaatccagcccatggcaggcaggtgacagtccaggaattcgctcttttctttaccatctttgatgagaccaagtcctggtacttcacggaaaacatggagcgcaattgcagagccccctgtaacatacagatggaggaccctacctttaaggaaaattatcggttccacgcaatcaacggatacattatggatacactccctggccttgtgatggctcaggaccaacgaatcaggtggtacctcctcagcatgggttctaatgagaacatacactccattcacttttcaggacatgtgttcactgtccggaagaaagaagagtataagatggccctctacaatttgtatccaggcgtgtttgagaccgttgaaatgcttccctctaaagctggcatctggagagtagagtgcttgatcggagaacatcttcacgcaggtatgagcaccttgttcctcgtgtacagcaacaaatgtcagaatccacttggcatggccagtggacacattcgcgactttcagatcacagcatctggccagtatggacaatgggccccaaagttggctcgcctccattactccggtagcataaatgcgtggtccactaaagaacctttcagctggattaaggtcgatcttcttgcccccatgatcatccacggcattaagacacagggagcgaggcagaaattctcctccctctacatctcacagttcattattatgtatagtttggacggcaagaagtggcaaacttatagaggtaacagtactggaacagacatggtgttcttcggcaacgttgatagctctggcatcaaacacaacatctttaatcctcccataatagctcggtacatcagattgcatccgacccactacagcattaggagtacactccgaatggagcttatgggttgcgacttgaattcctgttcaatgccactcggaatggagtctaaagccatctctgatgcacagataaccgccagtagctactttacgaacatgtttgctacgtggtcaccctctaaggcaaggcttcatttgcaaggccggtctaatgcctggagacctcaggtgaacaacccgaaagaatggctccaggtggactttcagaagaccatgaaagtaacaggtgtcactactcagggagttaagtccttggatactagcatgtatgtgaaggagttccttatttcctcatcacaagatggccaccagtggaccctcttctttcagaatggtaaggtcaaagtgtttcagggcaatcaagacagcttcacacccgtggtgaacagtcttgatcctccactcttgacacgataccttcgaatccatccacagtcttgggagcaccagattgcattgcgcatggaagtacttggatgcgaggctcaggacctctac

SEQ ID NO: 2050 - protein, 1457 aa, synthetic construct
  REGION 1..1457: note = Variant of human B-domain deleted Factor VIII
MQIELSTCFFLCLLRFCFSATRRYYLGAVELSWDYMQSDLGELPVDARFPPRVPKSFPFNTSQVYKKTLFVEFTDHLFNIAKPRPPWMGLLGPTIQAEVYDTVVITLKNMASHPVSLHAVGVSYWKASEGAEYDDQTSQREKEDDKVFPGGSHTYVWQVLKENGPMASDPPCLTYSYLSHVDLVKDLNSGLIGALLVCREGSLAKEKTQTLAKFILLFAVFDEGKSWHSETKNSLMQDRDAASARAWPKMHTVNGYVNRTLPGLIGCHRKSVYWHVIGMGTTPEVHSIFLEGHTFLVRNHRQASLGISPITFLTAQTLLRDLGQFLLFCHIPSHQHDGMEAYVKVDSCPEEPQLRMKNNEEAEDYDDDLTDSEMDVVRFDDDNSPSIIQARSGAKKHPKTWVHYIAAEEEDWDYAPLVLAPDDRSYKSQYLNNGPQRIGRKYKKVRFMAYTDETFKTREAIQHESGILGPLLYGEVGDTLLIIFKNQASRPYNIYPHGITDVRPLYSRRLPKGVKHLKDFPILPGEIFKYKWTITVEDGPTKSDPRCLTRYYSSFVNWERDLASGLIGPLLICYKESVDQRGNQIMSDKRNVILFSVFDENRSWYLTENIQRFLPNPAEVQLEDPEFQASNIMHSINGYVFDSLQLSVCLHEVAYWYILSIGAQTDFLSVFFSGYTFKHKNVYEDTLTLFPFSGETVFMSMENPGLWILGCHNSDFRNRGMTALLKVSSCDWNTGDYYEDSYEDISAYFDSKNNAIEPRSFSQNPPVLKRHQREGTRTTLQSDQEEIDYDDTISVEMKKEDFDIYDEDENQSPRSFQKKTRHYFIAAVERLWDYGMSSSPHVLRNRAQSGSVPQFKKVVFQEFTDGSFTQPLYRGELNEHLGLLGPYIRAEVEDNIMVTFRNQASRPYSFYSSLITYEEDQRQGAEPRKNFVKPNETKTYFWKVQHHMAPTKDEFDCKAWAYFSDVDLEKDVHSGLIGPLLVCHTNTLNPAHGRQVTVQEFALFFTIFDETKSWYFTENMERNCRAPCNIQMEDPTFKENYRFHAINGYIMDTLPGLVMAQDQRIRWYLLSMGSNENIHSIHFSGHVFTVRKKEEYKMALYNLYPGVFETVEMLPSKAGIWRVECLIGEHLHAGMSTLFLVYSNKCQNPLGMASGHIRDFQITASGQYGQWAPKLARLHYSGSINAWSTKEPFSWIKVDLLAPMIIHGIKTQGARQKFSSLYISQFIIMYSLDGKKWQTYRGNSTGTDMVFFGNVDSSGIKHNIFNPPIIARYIRLHPTHYSIRSTLRMELMGCDLNSCSMPLGMESKAISDAQITASSYFTNMFATWSPSKARLHLQGRSNAWRPQVNNPKEWLQVDFQKTMKVTGVTTQGVKSLDTSMYVKEFLISSSQDGHQWTLFFQNGKVKVFQGNQDSFTPVVNSLDPPLLTRYLRIHPQSWEHQIALRMEVLGCEAQDLY

SEQ ID NO: 2051 - DNA, 4371 bp, synthetic construct
  misc_feature 1..4371: note = Variant of human B-domain deleted Factor VIII
  source 1..4371: mol_type = other DNA
atgcagattgaactgtctacctgcttcttcctctgtttgctgaggttctgctttagcgccactagacggtactaccttggcgctgtggagctgtcctgggactatatgcagagtgatttgggagagcttcccgtcgacgcacgatttcctcctcgcgttccaaagtcatttccctttaacacaagccaggtgtacaagaagacgctcttcgtcgaattcaccgatcacctgttcaatatcgccaaacccagaccaccatggatgggtcttttggggcctaccatacaagcggaggtgtatgacacagttgttatcactctcaagaacatggcttctcatccggtaagtcttcacgcagtgggcgtgtcctactggaaagcttcagaaggagccgagtatgatgatcagacatcccagagggagaaagaagacgacaaggtatttccaggtgggtctcatacctatgtgtggcaagtgctcaaagagaatggccctatggcaagcgatccgccgtgtttgacttacagctacctttcacacgttgacctcgtcaaggacctcaactccgggttgattggagccttgttggtatgcagggaaggatctcttgccaaagagaagacacagaccctggccaagtttatccttctctttgctgtgttcgatgagggcaaaagttggcatagcgaaacgaagaattccctcatgcaggatcgcgacgcagccagcgccagagcttggcccaagatgcacactgtgaacggatatgtcaataggacgcttcctggcttgattgggtgtcatcggaaaagtgtctactggcacgtgatcggaatggggacaacaccagaggtccactccatatttctcgaaggccataccttccttgttcgaaaccacagacaggcatccttggggatctctcccattacctttctcactgcccaaacgctccttcgtgacttgggtcagttccttctcttttgccatatcccgtcacaccagcatgatggtatggaagcttatgtgaaagtcgacagttgtcctgaggagccacagttgcgcatgaagaataatgaagaagccgaggattacgacgacgatctcaccgattctgagatggacgtggtgaggtttgatgacgacaactctccctccatcattcaagctcggagcggggcgaagaaacaccccaagacttgggtccactatatagcggcggaagaggaggattgggattacgctcctcttgtattggcaccagatgaccgctcatacaaaagccagtacctcaacaacggaccgcagagaattggccggaagtataagaaagtgcgatttatggcctatacagacgaaacctttaagacaagggaggccatccagcatgagagtgggattttgggacctcttctttacggcgaagttggtgataccctcctcatcatcttcaagaatcaagcttctcgcccctataacatttacccacacgggatcactgacgttaggcctttgtatagcagaagacttcccaaaggcgtgaagcatctcaaagacttccccattttgccaggcgagatctttaagtacaaatggaccattacagtggaagatggaccgactaaatcagaccctcgatgccttacgcggtactattcctccggggtgaattgggagagagatttggcaagcggactcataggaccactcctcatctgttacaaggaatctgtagaccagaggggtaaccagattatgagtgataaacgcaatgtgatcctttttagcgtcttcgacgagaaccggtcctggtacttgaccgagaatatacaaaggttccttcccaaccccgcagaggttcagttggaagaccctgagtttcaggccagcaatattatgcactcaatcaacggctatgtgtttgatagtctccagctttctgtttgcctccatgaagtagcctattggtacatcttgtcaattggtgctcaaacagacttcctctccgtcttcttctccggctacacctttaagcacaagaacgtgtatgaggacactctcacactctttccattttctggagaaaccgtgttcatgagcatggagaatccaggcctttggatcttgggttgccacaacagtgattttcgcaatcggggaatgactgctctcctcaaagtcagcagctgtgattggaacacaggcgactattacgaagattcttacgaggacataagtgcctactttgactccaagaataacgccattgagcccagatcattctcccagaatcctcccgtgcttaaaaggcatcagcgcgaaggtaccagaactactcttcagtctgatcaagaggagattgactatgacgacaccattagcgtggaaatgaagtcggaggatttcgatatctatgacgaagatgagaaccagtctccgcggagctttcagaagaagacgcgacactacttcattgcagcagtcgaaaggctttgggactacggtatgtcatcatcccctcatgtgttgcgcaatagagctcagagtggaagtgttccacagttcaagaaagtcgtctttcaagagtttacagatggcagcttcacacagcctctctatcggggcgagcttaacgaacatttgggactccttggtccctatatccgagccgaagtggaggacaacattatggttacctttaggaatcaagcctctcgcccctacagcttctactcctccctcatcagctatgaggaggatcaaagacaaggcgctgaaccacggaagaactttgtgaaaccgaatgagacgaagacctacttctggaaagtacagcaccacatggcccccacaaaagacgaattcgattgcaaagcatgggcgtatttttcagacgttgacttggagaaagatgtacattcaggacttattggtcctttgttggtgtgtcacactaacactctcaatccagcccatggcaggcaggtgacagtccaggaattcgctcttttctttaccatctttgatgagaccaagtcctggtacttcacggaaaacatggagcgcaattgcagagccccctgtaacatacagatggaggaccctacctttaaggaaaattatcggttccacgcaatcaacggatacattatggatacactccctggccttgtgatggctcaggaccaacgaatcaggtggtacctcctcagcatgggttctaatgagaacatacactccattcacttttcaggacatgtgttcactgtccggaagaaagaagagtataagatggccctctacaatttgtatccaggcgtgtttgagaccgttgaaatgcttccctctaaagctggcatctggagagtagagtgcttgatcggagaacatcttcacgcaggtatgagcaccttgttcctcgtgtacagcaacaaatgtcagaatccacttggcatggccagtggacacattcgcgactttcagatcacagcatctggccagtatggacaatgggccccaaagttggctcgcctccattactccggtagcataaatgcgtggtccactaaagaacctttcagctggattaaggtcgatcttcttgcccccatgatcatccacggcattaagacacagggagcgaggcagaaattctcctccctctacatctcacagttcattattatgtatagtttggacggcaagaagtggcaaacttatagaggtaacagtactggaacagacatggtgttcttcggcaacgttgatagctctggcatcaaacacaacatctttaatcctcccataatagctcggtacatcagattgcatccgacccactacagcattaggagtacactccgaatggagcttatgggttgcgacttgaattcctgttcaatgccactcggaatggagtctaaagccatctctgatgcacagataaccgccagtagctactttacgaacatgtttgctacgtggtcaccctctaaggcaaggcttcatttgcaaggccggtctaatgcctggagacctcaggtgaacaacccgaaagaatggctccaggtggactttcagaagaccatgaaagtaacaggtgtcactactcagggagttaagtccttggatactagcatgtatgtgaaggagttccttatttcctcatcacaagatggccaccagtggaccctcttctttcagaatggtaaggtcaaagtgtttcagggcaatcaagacagcttcacacccgtggtgaacagtcttgatcctccactcttgacacgataccttcgaatccatccacagtcttgggagcaccagattgcattgcgcatggaagtacttggatgcgaggctcaggacctctac

SEQ ID NO: 2052 - protein, 1457 aa, synthetic construct
  REGION 1..1457: note = Variant of human B-domain deleted Factor VIII
MQIELSTCFFLCLLRFCFSATRRYYLGAVELSWDYMQSDLGELPVDARFPPRVPKSFPFNTSQVYKKTLFVEFTDHLFNIAKPRPPWMGLLGPTIQAEVYDTVVITLKNMASHPVSLHAVGVSYWKASEGAEYDDQTSQREKEDDKVFPGGSHTYVWQVLKENGPMASDPPCLTYSYLSHVDLVKDLNSGLIGALLVCREGSLAKEKTQTLAKFILLFAVFDEGKSWHSETKNSLMQDRDAASARAWPKMHTVNGYVNRTLPGLIGCHRKSVYWHVIGMGTTPEVHSIFLEGHTFLVRNHRQASLGISPITFLTAQTLLRDLGQFLLFCHIPSHQHDGMEAYVKVDSCPEEPQLRMKNNEEAEDYDDDLTDSEMDVVRFDDDNSPSIIQARSGAKKHPKTWVHYIAAEEEDWDYAPLVLAPDDRSYKSQYLNNGPQRIGRKYKKVRFMAYTDETFKTREAIQHESGILGPLLYGEVGDTLLIIFKNQASRPYNIYPHGITDVRPLYSRRLPKGVKHLKDFPILPGEIFKYKWTITVEDGPTKSDPRCLTRYYSSGVNWERDLASGLIGPLLICYKESVDQRGNQIMSDKRNVILFSVFDENRSWYLTENIQRFLPNPAEVQLEDPEFQASNIMHSINGYVFDSLQLSVCLHEVAYWYILSIGAQTDFLSVFFSGYTFKHKNVYEDTLTLFPFSGETVFMSMENPGLWILGCHNSDFRNRGMTALLKVSSCDWNTGDYYEDSYEDISAYFDSKNNAIEPRSFSQNPPVLKRHQREGTRTTLQSDQEEIDYDDTISVEMKSEDFDIYDEDENQSPRSFQKKTRHYFIAAVERLWDYGMSSSPHVLRNRAQSGSVPQFKKVVFQEFTDGSFTQPLYRGELNEHLGLLGPYIRAEVEDNIMVTFRNQASRPYSFYSSLISYEEDQRQGAEPRKNFVKPNETKTYFWKVQHHMAPTKDEFDCKAWAYFSDVDLEKDVHSGLIGPLLVCHTNTLNPAHGRQVTVQEFALFFTIFDETKSWYFTENMERNCRAPCNIQMEDPTFKENYRFHAINGYIMDTLPGLVMAQDQRIRWYLLSMGSNENIHSIHFSGHVFTVRKKEEYKMALYNLYPGVFETVEMLPSKAGIWRVECLIGEHLHAGMSTLFLVYSNKCQNPLGMASGHIRDFQITASGQYGQWAPKLARLHYSGSINAWSTKEPFSWIKVDLLAPMIIHGIKTQGARQKFSSLYISQFIIMYSLDGKKWQTYRGNSTGTDMVFFGNVDSSGIKHNIFNPPIIARYIRLHPTHYSIRSTLRMELMGCDLNSCSMPLGMESKAISDAQITASSYFTNMFATWSPSKARLHLQGRSNAWRPQVNNPKEWLQVDFQKTMKVTGVTTQGVKSLDTSMYVKEFLISSSQDGHQWTLFFQNGKVKVFQGNQDSFTPVVNSLDPPLLTRYLRIHPQSWEHQIALRMEVLGCEAQDLY

SEQ ID NO: 2053 - DNA, 4371 bp, synthetic construct
  misc_feature 1..4371: note = Variant of human B-domain deleted Factor VIII
  source 1..4371: mol_type = other DNA
atgcagattgaactgtctacctgcttcttcctctgtttgctgaggttctgctttagcgccactagacggtactaccttggcgctgtggagctgtcctgggactatatgcagagtgatttgggagagcttcccgtcgacgcacgatttcctcctcgcgttccaaagtcatttccctttaacacaagccaggtgtacaagaagacgctcttcgtcgaattcaccgatcacctgttcaatatcgccaaacccagaccaccatggatgggtcttttggggcctaccatacaagcggaggtgtatgacacagttgttatcactctcaagaacatggcttctcatccggtaagtcttcacgcagtgggcgtgtcctactggaaagcttcagaaggagccgagtatgatgatcagacatcccagagggagaaagaagacgacaaggtatttccaggtgggtctcatacctatgtgtggcaagtgctcaaagagaatggccctatggcaagcgatccgccgtgtttgacttacagctacctttcacacgttgacctcgtcaaggacctcaactccgggttgattggagccttgttggtatgcagggaaggatctcttgccaaagagaagacacagaccctggccaagtttatccttctctttgctgtgttcgatgagggcaaaagttggcatagcgaaacgaagaattccctcatgcaggatcgcgacgcagccagcgccagagcttggcccaagatgcacactgtgaacggatatgtcaataggacgcttcctggcttgattgggtgtcatcggaaaagtgtctactggcacgtgatcggaatggggacaacaccagaggtccactccatatttctcgaaggccataccttccttgttcgaaaccacagacaggcatccttggggatctctcccattacctttctcactgcccaaacgctccttcgtgacttgggtcagttccttctcttttgccatatcccgtcacaccagcatgatggtatggaagcttatgtgaaagtcgacagttgtcctgaggagccacagttgcgcatgaagaataatgaagaagccgaggattacgacgacgatctcaccgattctgagatggacgtggtgaggtttgatgacgacaactctccctccatcattcaagctcggagcggggcgaagaaacaccccaagacttgggtccactatatagcggcggaagaggaggattgggattacgctcctcttgtattggcaccagatgaccgctcatacaaaagccagtacctcaacaacggaccgcagagaattggccggaagtataagaaagtgcgatttatggcctatacagacgaaacctttaagacaagggaggccatccagcatgagagtgggattttgggacctcttctttacggcgaagttggtgataccctcctcatcatcttcaagaatcaagcttctcgcccctataacatttacccacacgggatcactgacgttaggcctttgtatagcagaagacttcccaaaggcgtgaagcatctcaaagacttccccattttgccaggcgagatctttaagtacaaatggaccattacagtggaagatggaccgactaaatcagaccctcgatgccttacgcggtactattcctccgaggtgaattgggagagagatttggcaagcggactcataggaccactcctcatctgttacaaggaatctgtagaccagaggggtaaccagattatgagtgataaacgcaatgtgatcctttttagcgtcttcgacgagaaccggtcctggtacttgaccgagaatatacaaaggttccttcccaaccccgcaggcgttcagttggaagaccctgagtttcaggccagcaatattatgcactcaatcaacggctatgtgtttgatagtctccagctttctgtttgcctccatgaagtagcctattggtacatcttgtcaattggtgctcaaacagacttcctctccgtcttcttctccggctacacctttaagcacaagggcgtgtatgaggacactctcacactctttccattttctggagaaaccgtgttcatgagcatggagaatccaggcctttggatcttgggttgccacaacagtgattttcgcaatcggggaatgactgctctcctcaaagtcagcagctgtgattggaacacaggcgactattacgaagattcttacgaggacataagtgcctactttgactccaagaataacgccattgagcccagatcattctcccagaatcctcccgtgcttaaaaggcatcagcgcgaaggtaccagaactactcttcagtctgatcaagaggagattgactatgacgacaccattagcgtggaaatgaagaaggaggatttcgatatctatgacgaagatgagaaccagtctccgcggagctttcagaagaagacgcgacactacttcattgcagcagtcgaaaggctttgggactacggtatgtcatcatcccctcatgtgttgcgcaatagagctcagagtggaagtgttccacagttcaagaaagtcgtctttcaagagtttacagatggcagcttcacacagcctctctatcggggcgagcttaacgaacatttgggactccttggtccctatatccgagccgaagtggaggacaacattatggttacctttaggaatcaagcctctcgcccctacagcttctactcctccctcatcagctatgaggaggatcaaagacaaggcgctgaaccacggaagaactttgtgaaaccgaatgagacgaagacctacttctggaaagtacagcaccacatggcccccacaaaagacgaattcgattgcaaagcatgggcgtatttttcagacgttgacttggagaaagatgtacattcaggacttattggtcctttgttggtgtgtcacactaacactctcaatccagcccatggcaggcaggtgacagtccaggaattcgctcttttctttaccatctttgatgagaccaagtcctggtacttcacggaaaacatggagcgcaattgcagagccccctgtaacatacagatggaggaccctacctttaaggaaaattatcggttccacgcaatcaacggatacattatggatacactccctggccttgtgatggctcaggaccaacgaatcaggtggtacctcctcagcatgggttctaatgagaacatacactccattcacttttcaggacatgtgttcactgtccggaagaaagaagagtataagatggccctctacaatttgtatccaggcgtgtttgagaccgttgaaatgcttccctctaaagctggcatctggagagtagagtgcttgatcggagaacatcttcacgcaggtatgagcaccttgttcctcgtgtacagcaacaaatgtcagaatccacttggcatggccagtggacacattcgcgactttcagatcacagcatctggccagtatggacaatgggccccaaagttggctcgcctccattactccggtagcataaatgcgtggtccactaaagaacctttcagctggattaaggtcgatcttcttgcccccatgatcatccacggcattaagacacagggagcgaggcagaaattctcctccctctacatctcacagttcattattatgtatagtttggacggcaagaagtggcaaacttatagaggtaacagtactggaacagacatggtgttcttcggcaacgttgatagctctggcatcaaacacaacatctttaatcctcccataatagctcggtacatcagattgcatccgacccactacagcattaggagtacactccgaatggagcttatgggttgcgacttgaattcctgttcaatgccactcggaatggagtctaaagccatctctgatgcacagataaccgccagtagctactttacgaacatgtttgctacgtggtcaccctctaaggcaaggcttcatttgcaaggccggtctaatgcctggagacctcaggtgaacaacccgaaagaatggctccaggtggactttcagaagaccatgaaagtaacaggtgtcactactcagggagttaagtccttggatactagcatgtatgtgaaggagttccttatttcctcatcacaagatggccaccagtggaccctcttctttcagaatggtaaggtcaaagtgtttcagggcaatcaagacagcttcacacccgtggtgaacagtcttgatcctccactcttgacacgataccttcgaatccatccacagtcttgggagcaccagattgcattgcgcatggaagtacttggatgcgaggctcaggacctctac

SEQ ID NO: 2054 - protein, 1457 aa, synthetic construct
  REGION 1..1457: note = Variant of human B-domain deleted Factor VIII
MQIELSTCFFLCLLRFCFSATRRYYLGAVELSWDYMQSDLGELPVDARFPPRVPKSFPFNTSQVYKKTLFVEFTDHLFNIAKPRPPWMGLLGPTIQAEVYDTVVITLKNMASHPVSLHAVGVSYWKASEGAEYDDQTSQREKEDDKVFPGGSHTYVWQVLKENGPMASDPPCLTYSYLSHVDLVKDLNSGLIGALLVCREGSLAKEKTQTLAKFILLFAVFDEGKSWHSETKNSLMQDRDAASARAWPKMHTVNGYVNRTLPGLIGCHRKSVYWHVIGMGTTPEVHSIFLEGHTFLVRNHRQASLGISPITFLTAQTLLRDLGQFLLFCHIPSHQHDGMEAYVKVDSCPEEPQLRMKNNEEAEDYDDDLTDSEMDVVRFDDDNSPSIIQARSGAKKHPKTWVHYIAAEEEDWDYAPLVLAPDDRSYKSQYLNNGPQRIGRKYKKVRFMAYTDETFKTREAIQHESGILGPLLYGEVGDTLLIIFKNQASRPYNIYPHGITDVRPLYSRRLPKGVKHLKDFPILPGEIFKYKWTITVEDGPTKSDPRCLTRYYSSEVNWERDLASGLIGPLLICYKESVDQRGNQIMSDKRNVILFSVFDENRSWYLTENIQRFLPNPAGVQLEDPEFQASNIMHSINGYVFDSLQLSVCLHEVAYWYILSIGAQTDFLSVFFSGYTFKHKGVYEDTLTLFPFSGETVFMSMENPGLWILGCHNSDFRNRGMTALLKVSSCDWNTGDYYEDSYEDISAYFDSKNNAIEPRSFSQNPPVLKRHQREGTRTTLQSDQEEIDYDDTISVEMKKEDFDIYDEDENQSPRSFQKKTRHYFIAAVERLWDYGMSSSPHVLRNRAQSGSVPQFKKVVFQEFTDGSFTQPLYRGELNEHLGLLGPYIRAEVEDNIMVTFRNQASRPYSFYSSLISYEEDQRQGAEPRKNFVKPNETKTYFWKVQHHMAPTKDEFDCKAWAYFSDVDLEKDVHSGLIGPLLVCHTNTLNPAHGRQVTVQEFALFFTIFDETKSWYFTENMERNCRAPCNIQMEDPTFKENYRFHAINGYIMDTLPGLVMAQDQRIRWYLLSMGSNENIHSIHFSGHVFTVRKKEEYKMALYNLYPGVFETVEMLPSKAGIWRVECLIGEHLHAGMSTLFLVYSNKCQNPLGMASGHIRDFQITASGQYGQWAPKLARLHYSGSINAWSTKEPFSWIKVDLLAPMIIHGIKTQGARQKFSSLYISQFIIMYSLDGKKWQTYRGNSTGTDMVFFGNVDSSGIKHNIFNPPIIARYIRLHPTHYSIRSTLRMELMGCDLNSCSMPLGMESKAISDAQITASSYFTNMFATWSPSKARLHLQGRSNAWRPQVNNPKEWLQVDFQKTMKVTGVTTQGVKSLDTSMYVKEFLISSSQDGHQWTLFFQNGKVKVFQGNQDSFTPVVNSLDPPLLTRYLRIHPQSWEHQIALRMEVLGCEAQDLY

SEQ ID NO: 2055 - DNA, 4371 bp, synthetic construct
  misc_feature 1..4371: note = Variant of human B-domain deleted Factor VIII
  source 1..4371: mol_type = other DNA
atgcagattgaactgtctacctgcttcttcctctgtttgctgaggttctgctttagcgccactagacggtactaccttggcgctgtggagctgtcctgggactatatgcagagtgatttgggagagcttcccgtcgacgcacgatttcctcctcgcgttccaaagtcatttccctttaacacaagccaggtgtacaagaagacgctcttcgtcgaattcaccgatcacctgttcaatatcgccaaacccagaccaccatggatgggtcttttggggcctaccatacaagcggaggtgtatgacacagttgttatcactctcaagaacatggcttctcatccggtaagtcttcacgcagtgggcgtgtcctactggaaagcttcagaaggagccgagtatgatgatcagacatcccagagggagaaagaagacgacaaggtatttccaggtgggtctcatacctatgtgtggcaagtgctcaaagagaatggccctatggcaagcgatccgccgtgtttgacttacagctacctttcacacgttgacctcgtcaaggacctcaactccgggttgattggagccttgttggtatgcagggaaggatctcttgccaaagagaagacacagaccctggccaagtttatccttctctttgctgtgttcgatgagggcaaaagttggcatagcgaaacgaagaattccctcatgcaggatcgcgacgcagccagcgccagagcttggcccaagatgcacactgtgaacggatatgtcaataggacgcttcctggcttgattgggtgtcatcggaaaagtgtctactggcacgtgatcggaatggggacaacaccagaggtccactccatatttctcgaaggccataccttccttgttcgaaaccacagacaggcatccttggggatctctcccattacctttctcactgcccaaacgctccttcgtgacttgggtcagttccttctcttttgccatatcccgtcacaccagcatgatggtatggaagcttatgtgaaagtcgacagttgtcctgaggagccacagttgcgcatgaagaataatgaagaagccgaggattacgacgacgatctcaccgattctgagatggacgtggtgaggtttgatgacgacaactctccctccatcattcaagctcggagcggggcgaagaaacaccccaagacttgggtccactatatagcggcggaagaggaggattgggattacgctcctcttgtattggcaccagatgaccgctcatacaaaagccagtacctcaacaacggaccgcagagaattggccggaagtataagaaagtgcgatttatggcctatacagacgaaacctttaagacaagggaggccatccagcatgagagtgggattttgggacctcttctttacggcgaagttggtgataccctcctcatcatcttcaagaatcaagcttctcgcccctataacatttacccacacgggatcactgacgttaggcctttgtatagcagaagacttcccaaaggcgtgaagcatctcaaagacttccccattttgccaggcgagatctttaagtacaaatggaccattacagtggaagatggaccgactaaatcagaccctcgatgccttacgcggtactattcctccttcgtgaattgggagagagatttggcaagcggactcataggaccactcctcatctgttacaaggaatctgtagaccagaggggtaaccagattatgagtgataaacgcaatgtgatcctttttagcgtcttcgacgagaaccggtcctggtacttgaccgagaatatacaaaggttccttcccaaccccgcaggcgttcagttggaagaccctgagtttcaggccagcaatattatgcactcaatcaacggctatgtgtttgatagtctccagctttctgtttgcctccatgaagtagcctattggtacatcttgtcaattggtgctcaaacagacttcctctccgtcttcttctccggctacacctttaagcacaagggcgtgtatgaggacactctcacactctttccattttctggagaaaccgtgttcatgagcatggagaatccaggcctttggatcttgggttgccacaacagtgattttcgcaatcggggaatgactgctctcctcaaagtcagcagctgtgataagaacacaggcgactattacgaagattcttacgaggacataagtgcctactttgactccaagaataacgccattgagcccagatcattctcccagaatcctcccgtgcttaaaaggcatcagcgcgaaggtaccagaactactcttcagtctgatcaagaggagattgactatgacgacaccattagcgtggaaatgaagaaggaggatttcgatatctatgacgaagatgagaaccagtctccgcggagctttcagaagaagacgcgacactacttcattgcagcagtcgaaaggctttgggactacggtatgtcatcaagccctcatgtgttgcgcaatagagctcagagtggaagtgttccacagttcaagaaagtcgtctttcaagagtttacagatggcagcttcacacagcctctctatcggggcgagcttaacgaacatttgggactccttggtccctatatccgagccgaagtggaggacaacattatggttacctttaggaatcaagcctctcgcccctacagcttctactcctccctcatcagttatgaggaggatcagagacaaggcgctgaaccacggaagaactttgtgaaaccgaatgagacgaagacctacttctggaaagtacagcaccacatggcccccacaaaagacgaattcgattgcaaagcatgggcgtatttttcagacgttgacttggagaaagatgtacattcaggacttattggtcctttgttggtgtgtcacactaacactctcaatccagcccatggcaggcaggtgacagtccaggaattcgctcttttctttaccatctttgatgagaccaagtcctggtacttcacggaaaacatggagcgcaattgcagagccccctgtaacatacagatggaggaccctacctttaaggaaaattatcggttccacgcaatcaacggatacattatggatacactccctggccttgtgatggctcaggaccaacgaatcaggtggtacctcctcagcatgggttctaatgagaacatacactccattcacttttcaggacatgtgttcactgtccggaagaaagaagagtataagatggccctctacaatttgtatccaggcgtgtttgagaccgttgaaatgcttccctctaaagctggcatctggagagtagagtgcttgatcggagaacatcttcacgcaggtatgagcaccttgttcctcgtgtacagcaacaaatgtcagaatccacttggcatggccagtggacacattcgcgactttcagatcacagcatctggccagtatggacaatgggccccaaagttggctcgcctccattactccggtagcataaatgcgtggtccactaaagaacctttcagctggattaaggtcgatcttcttgcccccatgatcatccacggcattaagacacagggagcgaggcagaaattctcctccctctacatctcacagttcattattatgtatagtttggacggcaagaagtggcaaacttatagaggtaacagtactggaacagacatggtgttcttcggcaacgttgatagctctggcatcaaacacaacatctttaatcctcccataatagctcggtacatcagattgcatccgacccactacagcattaggagtacactccgaatggagcttatgggttgcgacttgaattcctgttcaatgccactcggaatggagtctaaagccatctctgatgcacagataaccgccagtagctactttacgaacatgtttgctacgtggtcaccctctaaggcaaggcttcatttgcaaggccggtctaatgcctggagacctcaggtgaacaacccgaaagaatggctccaggtggactttcagaagaccatgaaagtaacaggtgtcactactcagggagttaagtccttggatactagcatgtatgtgaaggagttccttatttcctcatcacaagatggccaccagtggaccctcttctttcagaatggtaaggtcaaagtgtttcagggcaatcaagacagcttcacacccgtggtgaacagtcttgatcctccactcttgacacgataccttcgaatccatccacagtcttgggagcaccagattgcattgcgcatggaagtacttggatgcgaggctcaggacctctac

SEQ ID NO: 2056 - protein, 1457 aa, synthetic construct
  REGION 1..1457: note = Variant of human B-domain deleted Factor VIII
MQIELSTCFFLCLLRFCFSATRRYYLGAVELSWDYMQSDLGELPVDARFPPRVPKSFPFNTSQVYKKTLFVEFTDHLFNIAKPRPPWMGLLGPTIQAEVYDTVVITLKNMASHPVSLHAVGVSYWKASEGAEYDDQTSQREKEDDKVFPGGSHTYVWQVLKENGPMASDPPCLTYSYLSHVDLVKDLNSGLIGALLVCREGSLAKEKTQTLAKFILLFAVFDEGKSWHSETKNSLMQDRDAASARAWPKMHTVNGYVNRTLPGLIGCHRKSVYWHVIGMGTTPEVHSIFLEGHTFLVRNHRQASLGISPITFLTAQTLLRDLGQFLLFCHIPSHQHDGMEAYVKVDSCPEEPQLRMKNNEEAEDYDDDLTDSEMDVVRFDDDNSPSIIQARSGAKKHPKTWVHYIAAEEEDWDYAPLVLAPDDRSYKSQYLNNGPQRIGRKYKKVRFMAYTDETFKTREAIQHESGILGPLLYGEVGDTLLIIFKNQASRPYNIYPHGITDVRPLYSRRLPKGVKHLKDFPILPGEIFKYKWTITVEDGPTKSDPRCLTRYYSSFVNWERDLASGLIGPLLICYKESVDQRGNQIMSDKRNVILFSVFDENRSWYLTENIQRFLPNPAGVQLEDPEFQASNIMHSINGYVFDSLQLSVCLHEVAYWYILSIGAQTDFLSVFFSGYTFKHKGVYEDTLTLFPFSGETVFMSMENPGLWILGCHNSDFRNRGMTALLKVSSCDKNTGDYYEDSYEDISAYFDSKNNAIEPRSFSQNPPVLKRHQREGTRTTLQSDQEEIDYDDTISVEMKKEDFDIYDEDENQSPRSFQKKTRHYFIAAVERLWDYGMSSSPHVLRNRAQSGSVPQFKKVVFQEFTDGSFTQPLYRGELNEHLGLLGPYIRAEVEDNIMVTFRNQASRPYSFYSSLISYEEDQRQGAEPRKNFVKPNETKTYFWKVQHHMAPTKDEFDCKAWAYFSDVDLEKDVHSGLIGPLLVCHTNTLNPAHGRQVTVQEFALFFTIFDETKSWYFTENMERNCRAPCNIQMEDPTFKENYRFHAINGYIMDTLPGLVMAQDQRIRWYLLSMGSNENIHSIHFSGHVFTVRKKEEYKMALYNLYPGVFETVEMLPSKAGIWRVECLIGEHLHAGMSTLFLVYSNKCQNPLGMASGHIRDFQITASGQYGQWAPKLARLHYSGSINAWSTKEPFSWIKVDLLAPMIIHGIKTQGARQKFSSLYISQFIIMYSLDGKKWQTYRGNSTGTDMVFFGNVDSSGIKHNIFNPPIIARYIRLHPTHYSIRSTLRMELMGCDLNSCSMPLGMESKAISDAQITASSYFTNMFATWSPSKARLHLQGRSNAWRPQVNNPKEWLQVDFQKTMKVTGVTTQGVKSLDTSMYVKEFLISSSQDGHQWTLFFQNGKVKVFQGNQDSFTPVVNSLDPPLLTRYLRIHPQSWEHQIALRMEVLGCEAQDLY

SEQ ID NO: 2057 - DNA, 4371 bp, synthetic construct
  misc_feature 1..4371: note = Variant of human B-domain deleted Factor VIII
  source 1..4371: mol_type = other DNA
atgcagattgaactgtctacctgcttcttcctctgtttgctgaggttctgctttagcgccactagacggtactaccttggcgctgtggagctgtcctgggactatatgcagagtgatttgggagagcttcccgtcgacgcacgatttcctcctcgcgttccaaagtcatttccctttaacacaagccaggtgtacaagaagacgctcttcgtcgaattcaccgatcacctgttcaatatcgccaaacccagaccaccatggatgggtcttttggggcctaccatacaagcggaggtgtatgacacagttgttatcactctcaagaacatggcttctcatccggtaagtcttcacgcagtgggcgtgtcctactggaaagcttcagaaggagccgagtatgatgatcagacatcccagagggagaaagaagacgacaaggtatttccaggtgggtctcatacctatgtgtggcaagtgctcaaagagaatggccctatggcaagcgatccgccgtgtttgacttacagctacctttcacacgttgacctcgtcaaggacctcaactccgggttgattggagccttgttggtatgcagggaaggatctcttgccaaagagaagacacagaccctggccaagtttatccttctctttgctgtgttcgatgagggcaaaagttggcatagcgaaacgaagaattccctcatgcaggatcgcgacgcagccagcgccagagcttggcccaagatgcacactgtgaacggatatgtcaataggacgcttcctggcttgattgggtgtcatcggaaaagtgtctactggcacgtgatcggaatggggacaacaccagaggtccactccatatttctcgaaggccataccttccttgttcgaaaccacagacaggcatccttggggatctctcccattacctttctcactgcccaaacgctccttcgtgacttgggtcagttccttctcttttgccatatcccgtcacaccagcatgatggtatggaagcttatgtgaaagtcgacagttgtcctgaggagccacagttgcgcatgaagaataatgaagaagccgaggattacgacgacgatctcaccgattctgagatggacgtggtgaggtttgatgacgacaactctccctccatcattcaagctcggagcggggcgaagaaacaccccaagacttgggtccactatatagcggcggaagaggaggattgggattacgctcctcttgtattggcaccagatgaccgctcatacaaaagccagtacctcaacaacggaccgcagagaattggccggaagtataagaaagtgcgatttatggcctatacagacgaaacctttaagacaagggaggccatccagcatgagagtgggattttgggacctcttctttacggcgaagttggtgataccctcctcatcatcttcaagaatcaagcttctcgcccctataacatttacccacacgggatcactgacgttaggcctttgtatagcagaagacttcccaaaggcgtgaagcatctcaaagacttccccattttgccaggcgagatctttaagtacaaatggaccattacagtggaagatggaccgactaaatcagaccctcgatgccttacgcggtactattcctccttcgtgaattgggagagagatttggcaagcggactcataggaccactcctcatctgttacaaggaatctgtagaccagaggggtaaccagattatgagtgataaacgcaatgtgatcctttttagcgtcttcgacgagaaccggtcctggtacttgaccgagaatatacaaaggttccttcccaaccccgcagaggttcagttggaagaccctgagtttcaggccagcaatattatgcactcaatcaacggctatgtgtttgatagtctccagctttctgtttgcctccatgaagtagcctattggtacatcttgtcaattggtgctcaaacagacttcctctccgtcttcttctccggctacacctttaagcacaagggcgtgtatgaggacactctcacactctttccattttctggagaaaccgtgttcatgagcatggagaatccaggcctttggatcttgggttgccacaacagtgattttcgcaatcggggaatgactgctctcctcaaagtcagcagctgtgattggaacacaggcgactattacgaagattcttacgaggacataagtgcctactttgactccaagaataacgccattgagcccagatcattctcccagaatcctcccgtgcttaaaaggcatcagcgcgaaggtaccagaactactcttcagtctgatcaagaggagattgactatgacgacaccattagcgtggaaatgaagtcggaggatttcgatatctatgacgaagatgagaaccagtctccgcggagctttcagaagaagacgcgacactacttcattgcagcagtcgaaaggctttgggactacggtatgtcatcaagccctcatgtgttgcgcaatagagctcagagtggaagtgttccacagttcaagaaagtcgtctttcaagagtttacagatggcagcttcacacagcctctctatcggggcgagcttaacgaacatttgggactccttggtccctatatccgagccgaagtggaggacaacattatggttacctttaggaatcaagcctctcgcccctacagcttctactcctccctcatcagttatgaggaggatcagagacaaggcgctgaaccacggaagaactttgtgaaaccgaatgagacgaagacctacttctggaaagtacagcaccacatggcccccacaaaagacgaattcgattgcaaagcatgggcgtatttttcagacgttgacttggagaaagatgtacattcaggacttattggtcctttgttggtgtgtcacactaacactctcaatccagcccatggcaggcaggtgacagtccaggaattcgctcttttctttaccatctttgatgagaccaagtcctggtacttcacggaaaacatggagcgcaattgcagagccccctgtaacatacagatggaggaccctacctttaaggaaaattatcggttccacgcaatcaacggatacattatggatacactccctggccttgtgatggctcaggaccaacgaatcaggtggtacctcctcagcatgggttctaatgagaacatacactccattcacttttcaggacatgtgttcactgtccggaagaaagaagagtataagatggccctctacaatttgtatccaggcgtgtttgagaccgttgaaatgcttccctctaaagctggcatctggagagtagagtgcttgatcggagaacatcttcacgcaggtatgagcaccttgttcctcgtgtacagcaacaaatgtcagaatccacttggcatggccagtggacacattcgcgactttcagatcacagcatctggccagtatggacaatgggccccaaagttggctcgcctccattactccggtagcataaatgcgtggtccactaaagaacctttcagctggattaaggtcgatcttcttgcccccatgatcatccacggcattaagacacagggagcgaggcagaaattctcctccctctacatctcacagttcattattatgtatagtttggacggcaagaagtggcaaacttatagaggtaacagtactggaacagacatggtgttcttcggcaacgttgatagctctggcatcaaacacaacatctttaatcctcccataatagctcggtacatcagattgcatccgacccactacagcattaggagtacactccgaatggagcttatgggttgcgacttgaattcctgttcaatgccactcggaatggagtctaaagccatctctgatgcacagataaccgccagtagctactttacgaacatgtttgctacgtggtcaccctctaaggcaaggcttcatttgcaaggccggtctaatgcctggagacctcaggtgaacaacccgaaagaatggctccaggtggactttcagaagaccatgaaagtaacaggtgtcactactcagggagttaagtccttggatactagcatgtatgtgaaggagttccttatttcctcatcacaagatggccaccagtggaccctcttctttcagaatggtaaggtcaaagtgtttcagggcaatcaagacagcttcacacccgtggtgaacagtcttgatcctccactcttgacacgataccttcgaatccatccacagtcttgggagcaccagattgcattgcgcatggaagtacttggatgcgaggctcaggacctctac

SEQ ID NO: 2058 - protein, 1457 aa, synthetic construct
  REGION 1..1457: note = Variant of human B-domain deleted Factor VIII
MQIELSTCFFLCLLRFCFSATRRYYLGAVELSWDYMQSDLGELPVDARFPPRVPKSFPFNTSQVYKKTLFVEFTDHLFNIAKPRPPWMGLLGPTIQAEVYDTVVITLKNMASHPVSLHAVGVSYWKASEGAEYDDQTSQREKEDDKVFPGGSHTYVWQVLKENGPMASDPPCLTYSYLSHVDLVKDLNSGLIGALLVCREGSLAKEKTQTLAKFILLFAVFDEGKSWHSETKNSLMQDRDAASARAWPKMHTVNGYVNRTLPGLIGCHRKSVYWHVIGMGTTPEVHSIFLEGHTFLVRNHRQASLGISPITFLTAQTLLRDLGQFLLFCHIPSHQHDGMEAYVKVDSCPEEPQLRMKNNEEAEDYDDDLTDSEMDVVRFDDDNSPSIIQARSGAKKHPKTWVHYIAAEEEDWDYAPLVLAPDDRSYKSQYLNNGPQRIGRKYKKVRFMAYTDETFKTREAIQHESGILGPLLYGEVGDTLLIIFKNQASRPYNIYPHGITDVRPLYSRRLPKGVKHLKDFPILPGEIFKYKWTITVEDGPTKSDPRCLTRYYSSFVNWERDLASGLIGPLLICYKESVDQRGNQIMSDKRNVILFSVFDENRSWYLTENIQRFLPNPAEVQLEDPEFQASNIMHSINGYVFDSLQLSVCLHEVAYWYILSIGAQTDFLSVFFSGYTFKHKGVYEDTLTLFPFSGETVFMSMENPGLWILGCHNSDFRNRGMTALLKVSSCDWNTGDYYEDSYEDISAYFDSKNNAIEPRSFSQNPPVLKRHQREGTRTTLQSDQEEIDYDDTISVEMKSEDFDIYDEDENQSPRSFQKKTRHYFIAAVERLWDYGMSSSPHVLRNRAQSGSVPQFKKVVFQEFTDGSFTQPLYRGELNEHLGLLGPYIRAEVEDNIMVTFRNQASRPYSFYSSLISYEEDQRQGAEPRKNFVKPNETKTYFWKVQHHMAPTKDEFDCKAWAYFSDVDLEKDVHSGLIGPLLVCHTNTLNPAHGRQVTVQEFALFFTIFDETKSWYFTENMERNCRAPCNIQMEDPTFKENYRFHAINGYIMDTLPGLVMAQDQRIRWYLLSMGSNENIHSIHFSGHVFTVRKKEEYKMALYNLYPGVFETVEMLPSKAGIWRVECLIGEHLHAGMSTLFLVYSNKCQNPLGMASGHIRDFQITASGQYGQWAPKLARLHYSGSINAWSTKEPFSWIKVDLLAPMIIHGIKTQGARQKFSSLYISQFIIMYSLDGKKWQTYRGNSTGTDMVFFGNVDSSGIKHNIFNPPIIARYIRLHPTHYSIRSTLRMELMGCDLNSCSMPLGMESKAISDAQITASSYFTNMFATWSPSKARLHLQGRSNAWRPQVNNPKEWLQVDFQKTMKVTGVTTQGVKSLDTSMYVKEFLISSSQDGHQWTLFFQNGKVKVFQGNQDSFTPVVNSLDPPLLTRYLRIHPQSWEHQIALRMEVLGCEAQDLY

SEQ ID NO: 2059 - DNA, 4371 bp, synthetic construct
  misc_feature 1..4371: note = Variant of human B-domain deleted Factor VIII
  source 1..4371: mol_type = other DNA
atgcagattgaactgtctacctgcttcttcctctgtttgctgaggttctgctttagcgccactagacggtactaccttggcgctgtggagctgtcctgggactatatgcagagtgatttgggagagcttcccgtcgacgcacgatttcctcctcgcgttccaaagtcatttccctttaacacaagccaggtgtacaagaagacgctcttcgtcgaattcaccgatcacctgttcaatatcgccaaacccagaccaccatggatgggtcttttggggcctaccatacaagcggaggtgtatgacacagttgttatcactctcaagaacatggcttctcatccggtaagtcttcacgcagtgggcgtgtcctactggaaagcttcagaaggagccgagtatgatgatcagacatcccagagggagaaagaagacgacaaggtatttccaggtgggtctcatacctatgtgtggcaagtgctcaaagagaatggccctatggcaagcgatccgccgtgtttgacttacagctacctttcacacgttgacctcgtcaaggacctcaactccgggttgattggagccttgttggtatgcagggaaggatctcttgccaaagagaagacacagaccctggccaagtttatccttctctttgctgtgttcgatgagggcaaaagttggcatagcgaaacgaagaattccctcatgcaggatcgcgacgcagccagcgccagagcttggcccaagatgcacactgtgaacggatatgtcaataggacgcttcctggcttgattgggtgtcatcggaaaagtgtctactggcacgtgatcggaatggggacaacaccagaggtccactccatatttctcgaaggccataccttccttgttcgaaaccacagacaggcatccttggggatctctcccattacctttctcactgcccaaacgctccttcgtgacttgggtcagttccttctcttttgccatatcccgtcacaccagcatgatggtatggaagcttatgtgaaagtcgacagttgtcctgaggagccacagttgcgcatgaagaataatgaagaagccgaggattacgacgacgatctcaccgattctgagatggacgtggtgaggtttgatgacgacaactctccctccatcattcaagctcggagcggggcgaagaaacaccccaagacttgggtccactatatagcggcggaagaggaggattgggattacgctcctcttgtattggcaccagatgaccgctcatacaaaagccagtacctcaacaacggaccgcagagaattggccggaagtataagaaagtgcgatttatggcctatacagacgaaacctttaagacaagggaggccatccagcatgagagtgggattttgggacctcttctttacggcgaagttggtgataccctcctcatcatcttcaagaatcaagcttctcgcccctataacatttacccacacgggatcactgacgttaggcctttgtatagcagaagacttcccaaaggcgtgaagcatctcaaagacttccccattttgccaggcgagatctttaagtacaaatggaccattacagtagaagatggaccgactaaatcagaccctcgatgccttacgcggtactattcctccttcgtgaattgggagagagatttggcaagcggactcataggaccactcctcatctgttacaaggaatctgtagaccagaggggtaaccagattatgagtgataaacgcaatgtgatcctttttagcgtcttcgacgagaaccggtcctggtacttgaccgagaatatacaaaggttccttcccaaccccgcagaggttcagttggaagaccctgagtttcaggccagcaatattatgcactcaatcaacggctatgtgtttgatagtctccagctttctgtttgcctccatgaagtagcctattggtacatcttgtcaattggtgctcaaacagacttcctctccgtcttcttctccggctacacctttaagcacaagggcgtgtatgaggacactctcacactctttccattttctggagaaaccgtgttcatgagcatggagaatccaggcctttggatcttgggttgccacaacagtgattttcgcaatcggggaatgactgctctcctcaaagtcagcagctgtgattggaacacaggcgactattacgaagattcttacgaggacataagtgcctactttgactccaagaataacgccattgagcccagatcattctcccagaatcctcccgtgcttaaaaggcatcagcgcgaaggtaccagaactactcttcagtctgatcaagaggagattgactatgacgacaccattagcgtggaaatgaagaaggaggatttcgatatctatgacgaggatgagaaccagtctccgcggagctttcagaagaagacgcgacactacttcattgcagcagtcgaaaggctttgggactacggtatgtcatcatcccctcatgtgttgcgcaatagagctcagagtggaagtgttccacagttcaagaaagtcgtctttcaagagtttacagatggcagcttcacacagcctctctatcggggcgagcttaacgaacatttgggactccttggtccctatatccgagccgaagtggaggacaacattatggttacctttaggaatcaagcctctcgcccctacagcttctactcctccctcatcagttatgaggaggatcagagacaaggcgctgaaccacggaagaactttgtgaaaccgaatgagacgaagacctacttctggaaagtacagcaccacatggcccccacaaaagacgaattcgattgcaaagcatgggcgtatttttcagacgttgacttggagaaagatgtacattcaggacttattggtcctttgttggtgtgtcacactaacactctcaatccagcccatggcaggcaggtgacagtccaggaattcgctcttttctttaccatctttgatgagaccaagtcctggtacttcacggaaaacatggagcgcaattgcagagccccctgtaacatacagatggaggaccctacctttaaggaaaattatcggttccacgcaatcaacggatacattatggatacactccctggccttgtgatggctcaggaccaacgaatcaggtggtacctcctcagcatgggttctaatgagaacatacactccattcacttttcaggacatgtgttcactgtccggaagaaagaagagtataagatggccctctacaatttgtatccaggcgtgtttgagaccgttgaaatgcttccctctaaagctggcatctggagagtagagtgcttgatcggagaacatcttcacgcaggtatgagcaccttgttcctcgtgtacagcaacaaatgtcagaatccacttggcatggccagtggacacattcgcgactttcagatcacagcatctggccagtatggacaatgggccccaaagttggctcgcctccattactccggtagcataaatgcgtggtccactaaagaacctttcagctggattaaggtcgatcttcttgcccccatgatcatccacggcattaagacacagggagcgaggcagaaattctcctccctctacatctcacagttcattattatgtatagtttggacggcaagaagtggcaaacttatagaggtaacagtactggaacagacatggtgttcttcggcaacgttgatagctctggcatcaaacacaacatctttaatcctcccataatagctcggtacatcagattgcatccgacccactacagcattaggagtacactccgaatggagcttatgggttgcgacttgaattcctgttcaatgccactcggaatggagtctaaagccatctctgatgcacagataaccgccagtagctactttacgaacatgtttgctacgtggtcaccctctaaggcaaggcttcatttgcaaggccggtctaatgcctggagacctcaggtgaacaacccgaaagaatggctccaggtggactttcagaagaccatgaaagtaacaggtgtcactactcagggagttaagtccttggatactagcatgtatgtgaaggagttccttatttcctcatcacaagatggccaccagtggaccctcttctttcagaatggtaaggtcaaagtgtttcagggcaatcaagacagcttcacacccgtggtgaacagtcttgatcctccactcttgacacgataccttcgaatccatccacagtcttgggagcaccagattgcattgcgcatggaagtacttggatgcgaggctcaggacctctac

SEQ ID NO: 2060 - protein, 1457 aa, synthetic construct
  REGION 1..1457: note = Variant of human B-domain deleted Factor VIII
MQIELSTCFFLCLLRFCFSATRRYYLGAVELSWDYMQSDLGELPVDARFPPRVPKSFPFNTSQVYKKTLFVEFTDHLFNIAKPRPPWMGLLGPTIQAEVYDTVVITLKNMASHPVSLHAVGVSYWKASEGAEYDDQTSQREKEDDKVFPGGSHTYVWQVLKENGPMASDPPCLTYSYLSHVDLVKDLNSGLIGALLVCREGSLAKEKTQTLAKFILLFAVFDEGKSWHSETKNSLMQDRDAASARAWPKMHTVNGYVNRTLPGLIGCHRKSVYWHVIGMGTTPEVHSIFLEGHTFLVRNHRQASLGISPITFLTAQTLLRDLGQFLLFCHIPSHQHDGMEAYVKVDSCPEEPQLRMKNNEEAEDYDDDLTDSEMDVVRFDDDNSPSIIQARSGAKKHPKTWVHYIAAEEEDWDYAPLVLAPDDRSYKSQYLNNGPQRIGRKYKKVRFMAYTDETFKTREAIQHESGILGPLLYGEVGDTLLIIFKNQASRPYNIYPHGITDVRPLYSRRLPKGVKHLKDFPILPGEIFKYKWTITVEDGPTKSDPRCLTRYYSSFVNWERDLASGLIGPLLICYKESVDQRGNQIMSDKRNVILFSVFDENRSWYLTENIQRFLPNPAEVQLEDPEFQASNIMHSINGYVFDSLQLSVCLHEVAYWYILSIGAQTDFLSVFFSGYTFKHKGVYEDTLTLFPFSGETVFMSMENPGLWILGCHNSDFRNRGMTALLKVSSCDWNTGDYYEDSYEDISAYFDSKNNAIEPRSFSQNPPVLKRHQREGTRTTLQSDQEEIDYDDTISVEMKKEDFDIYDEDENQSPRSFQKKTRHYFIAAVERLWDYGMSSSPHVLRNRAQSGSVPQFKKVVFQEFTDGSFTQPLYRGELNEHLGLLGPYIRAEVEDNIMVTFRNQASRPYSFYSSLISYEEDQRQGAEPRKNFVKPNETKTYFWKVQHHMAPTKDEFDCKAWAYFSDVDLEKDVHSGLIGPLLVCHTNTLNPAHGRQVTVQEFALFFTIFDETKSWYFTENMERNCRAPCNIQMEDPTFKENYRFHAINGYIMDTLPGLVMAQDQRIRWYLLSMGSNENIHSIHFSGHVFTVRKKEEYKMALYNLYPGVFETVEMLPSKAGIWRVECLIGEHLHAGMSTLFLVYSNKCQNPLGMASGHIRDFQITASGQYGQWAPKLARLHYSGSINAWSTKEPFSWIKVDLLAPMIIHGIKTQGARQKFSSLYISQFIIMYSLDGKKWQTYRGNSTGTDMVFFGNVDSSGIKHNIFNPPIIARYIRLHPTHYSIRSTLRMELMGCDLNSCSMPLGMESKAISDAQITASSYFTNMFATWSPSKARLHLQGRSNAWRPQVNNPKEWLQVDFQKTMKVTGVTTQGVKSLDTSMYVKEFLISSSQDGHQWTLFFQNGKVKVFQGNQDSFTPVVNSLDPPLLTRYLRIHPQSWEHQIALRMEVLGCEAQDLY

SEQ ID NO: 2061 - DNA, 4371 bp, synthetic construct
  misc_feature 1..4371: note = Variant of human B-domain deleted Factor VIII
  source 1..4371: mol_type = other DNA
atgcagattgaactgtctacctgcttcttcctctgtttgctgaggttctgctttagcgccactagacggtactaccttggcgctgtggagctgtcctgggactatatgcagagtgatttgggagagcttcccgtcgacgcacgatttcctcctcgcgttccaaagtcatttccctttaacacaagccaggtgtacaagaagacgctcttcgtcgaattcaccgatcacctgttcaatatcgccaaacccagaccaccatggatgggtcttttggggcctaccatacaagcggaggtgtatgacacagttgttatcactctcaagaacatggcttctcatccggtaagtcttcacgcagtgggcgtgtcctactggaaagcttcagaaggagccgagtatgatgatcagacatcccagagggagaaagaagacgacaaggtatttccaggtgggtctcatacctatgtgtggcaagtgctcaaagagaatggccctatggcaagcgatccgccgtgtttgacttacagctacctttcacacgttgacctcgtcaaggacctcaactccgggttgattggagccttgttggtatgcagggaaggatctcttgccaaagagaagacacagaccctggccaagtttatccttctctttgctgtgttcgatgagggcaaaagttggcatagcgaaacgaagaattccctcatgcaggatcgcgacgcagccagcgccagagcttggcccaagatgcacactgtgaacggatatgtcaataggacgcttcctggcttgattgggtgtcatcggaaaagtgtctactggcacgtgatcggaatggggacaacaccagaggtccactccatatttctcgaaggccataccttccttgttcgaaaccacagacaggcatccttggggatctctcccattacctttctcactgcccaaacgctccttcgtgacttgggtcagttccttctcttttgccatatcccgtcacaccagcatgatggtatggaagcttatgtgaaagtcgacagttgtcctgaggagccacagttgcgcatgaagaataatgaagaagccgaggattacgacgacgatctcaccgattctgagatggacgtggtgaggtttgatgacgacaactctccctccatcattcaagctcggagcggggcgaagaaacaccccaagacttgggtccactatatagcggcggaagaggaggattgggattacgctcctcttgtattggcaccagatgaccgctcatacaaaagccagtacctcaacaacggaccgcagagaattggccggaagtataagaaagtgcgatttatggcctatacagacgaaacctttaagacaagggaggccatccagcatgagagtgggattttgggacctcttctttacggcgaagttggtgataccctcctcatcatcttcaagaatcaagcttctcgcccctataacatttacccacacgggatcactgacgttaggcctttgtatagcagaagacttcccaaaggcgtgaagcatctcaaagacttccccattttgccaggcgagatctttaagtacaaatggaccattacagtggaagatggaccgactaaatcagaccctcgatgccttacgcggtactattcctccttcgtgaattgggagagagatttggcaagcggactcataggaccactcctcatctgttacaaggaatctgtagaccagaggggtaaccagattatgagtgataaacgcaatgtgatcctttttagcgtcttcgacgagaaccggtcctggtacttgaccgagaatatacaaaggttccttcccaaccccgcaggcgttcagttggaagaccctgagtttcaggccagcaatattatgcactcaatcaacggctatgtgtttgatagtctccagctttctgtttgcctccatgaagtagcctattggtacatcttgtcaattggtgctcaaacagacttcctctccgtcttcttctccggctacacctttaagcacaagaacgtgtatgaggacactctcacactctttccattttctggagaaaccgtgttcatgagcatggagaatccaggcctttggatcttgggttgccacaacagtgattttcgcaatcggggaatgactgctctcctcaaagtcagcagctgtgattggaacacaggcgactattacgaagattcttacgaggacataagtgcctactttgactccaagaataacgccattgagcccagatcattctcccagaatcctcccgtgcttaaaaggcatcagcgcgaaggtaccagaactactcttcagtctgatcaagaggagattgactatgacgacaccattagcgtggaaatgaagaaggaggatttcgatatctatgacgaagatgagaaccagtctccgcggagctttcagaagaagacgcgacactacttcattgcagcagtcgaaaggctttgggactacggtatgtcatcatcccctcatgtgttgcgcaatagagctcagagtggaagtgttccacagttcaagaaagtcgtctttcaagagtttacagatggcagcttcacacagcctctctatcggggcgagcttaacgaacatttgggactccttggtccctatatccgagccgaagtggaggacaacattatggttacctttaggaatcaagcctctcgcccctacagcttctactcctccctcatcagttatgaggaggatcagagacaaggcgctgaaccacggaagaactttgtgaaaccgaatgagacgaagacctacttctggaaagtacagcaccacatggcccccacaaaagacgaattcgattgcaaagcatgggcgtatttttcagacgttgacttggagaaagatgtacattcaggacttattggtcctttgttggtgtgtcacactaacactctcaatccagcccatggcaggcaggtgacagtccaggaattcgctcttttctttaccatctttgatgagaccaagtcctggtacttcacggaaaacatggagcgcaattgcagagccccctgtaacatacagatggaggaccctacctttaaggaaaattatcggttccacgcaatcaacggatacattatggatacactccctggccttgtgatggctcaggaccaacgaatcaggtggtacctcctcagcatgggttctaatgagaacatacactccattcacttttcaggacatgtgttcactgtccggaagaaagaagagtataagatggccctctacaatttgtatccaggcgtgtttgagaccgttgaaatgcttccctctaaagctggcatctggagagtagagtgcttgatcggagaacatcttcacgcaggtatgagcaccttgttcctcgtgtacagcaacaaatgtcagaatccacttggcatggccagtggacacattcgcgactttcagatcacagcatctggccagtatggacaatgggccccaaagttggctcgcctccattactccggtagcataaatgcgtggtccactaaagaacctttcagctggattaaggtcgatcttcttgcccccatgatcatccacggcattaagacacagggagcgaggcagaaattctcctccctctacatctcacagttcattattatgtatagtttggacggcaagaagtggcaaacttatagaggtaacagtactggaacagacatggtgttcttcggcaacgttgatagctctggcatcaaacacaacatctttaatcctcccataatagctcggtacatcagattgcatccgacccactacagcattaggagtacactccgaatggagcttatgggttgcgacttgaattcctgttcaatgccactcggaatggagtctaaagccatctctgatgcacagataaccgccagtagctactttacgaacatgtttgctacgtggtcaccctctaaggcaaggcttcatttgcaaggccggtctaatgcctggagacctcaggtgaacaacccgaaagaatggctccaggtggactttcagaagaccatgaaagtaacaggtgtcactactcagggagttaagtccttggatactagcatgtatgtgaaggagttccttatttcctcatcacaagatggccaccagtggaccctcttctttcagaatggtaaggtcaaagtgtttcagggcaatcaagacagcttcacacccgtggtgaacagtcttgatcctccactcttgacacgataccttcgaatccatccacagtcttgggagcaccagattgcattgcgcatggaagtacttggatgcgaggctcaggacctctac

SEQ ID NO: 2062 - protein, 1457 aa, synthetic construct
  REGION 1..1457: note = Variant of human B-domain deleted Factor VIII
MQIELSTCFFLCLLRFCFSATRRYYLGAVELSWDYMQSDLGELPVDARFPPRVPKSFPFNTSQVYKKTLFVEFTDHLFNIAKPRPPWMGLLGPTIQAEVYDTVVITLKNMASHPVSLHAVGVSYWKASEGAEYDDQTSQREKEDDKVFPGGSHTYVWQVLKENGPMASDPPCLTYSYLSHVDLVKDLNSGLIGALLVCREGSLAKEKTQTLAKFILLFAVFDEGKSWHSETKNSLMQDRDAASARAWPKMHTVNGYVNRTLPGLIGCHRKSVYWHVIGMGTTPEVHSIFLEGHTFLVRNHRQASLGISPITFLTAQTLLRDLGQFLLFCHIPSHQHDGMEAYVKVDSCPEEPQLRMKNNEEAEDYDDDLTDSEMDVVRFDDDNSPSIIQARSGAKKHPKTWVHYIAAEEEDWDYAPLVLAPDDRSYKSQYLNNGPQRIGRKYKKVRFMAYTDETFKTREAIQHESGILGPLLYGEVGDTLLIIFKNQASRPYNIYPHGITDVRPLYSRRLPKGVKHLKDFPILPGEIFKYKWTITVEDGPTKSDPRCLTRYYSSFVNWERDLASGLIGPLLICYKESVDQRGNQIMSDKRNVILFSVFDENRSWYLTENIQRFLPNPAGVQLEDPEFQASNIMHSINGYVFDSLQLSVCLHEVAYWYILSIGAQTDFLSVFFSGYTFKHKNVYEDTLTLFPFSGETVFMSMENPGLWILGCHNSDFRNRGMTALLKVSSCDWNTGDYYEDSYEDISAYFDSKNNAIEPRSFSQNPPVLKRHQREGTRTTLQSDQEEIDYDDTISVEMKKEDFDIYDEDENQSPRSFQKKTRHYFIAAVERLWDYGMSSSPHVLRNRAQSGSVPQFKKVVFQEFTDGSFTQPLYRGELNEHLGLLGPYIRAEVEDNIMVTFRNQASRPYSFYSSLISYEEDQRQGAEPRKNFVKPNETKTYFWKVQHHMAPTKDEFDCKAWAYFSDVDLEKDVHSGLIGPLLVCHTNTLNPAHGRQVTVQEFALFFTIFDETKSWYFTENMERNCRAPCNIQMEDPTFKENYRFHAINGYIMDTLPGLVMAQDQRIRWYLLSMGSNENIHSIHFSGHVFTVRKKEEYKMALYNLYPGVFETVEMLPSKAGIWRVECLIGEHLHAGMSTLFLVYSNKCQNPLGMASGHIRDFQITASGQYGQWAPKLARLHYSGSINAWSTKEPFSWIKVDLLAPMIIHGIKTQGARQKFSSLYISQFIIMYSLDGKKWQTYRGNSTGTDMVFFGNVDSSGIKHNIFNPPIIARYIRLHPTHYSIRSTLRMELMGCDLNSCSMPLGMESKAISDAQITASSYFTNMFATWSPSKARLHLQGRSNAWRPQVNNPKEWLQVDFQKTMKVTGVTTQGVKSLDTSMYVKEFLISSSQDGHQWTLFFQNGKVKVFQGNQDSFTPVVNSLDPPLLTRYLRIHPQSWEHQIALRMEVLGCEAQDLY

SEQ ID NO: 2063 - DNA, 4371 bp, synthetic construct
  misc_feature 1..4371: note = Variant of human B-domain deleted Factor VIII
  source 1..4371: mol_type = other DNA
atgcagattgaactgtctacctgcttcttcctctgtttgctgaggttctgctttagcgccactagacggtactaccttggcgctgtggagctgtcctgggactatatgcagagtgatttgggagagcttcccgtcgacgcacgatttcctcctcgcgttccaaagtcatttccctttaacacaagccaggtgtacaagaagacgctcttcgtcgaattcaccgatcacctgttcaatatcgccaaacccagaccaccatggatgggtcttttggggcctaccatacaagcggaggtgtatgacacagttgttatcactctcaagaacatggcttctcatccggtaagtcttcacgcagtgggcgtgtcctactggaaagcttcagaaggagccgagtatgatgatcagacatcccagagggagaaagaagacgacaaggtatttccaggtgggtctcatacctatgtgtggcaagtgctcaaagagaatggccctatggcaagcgatccgccgtgtttgacttacagctacctttcacacgttgacctcgtcaaggacctcaactccgggttgattggagccttgttggtatgcagggaaggatctcttgccaaagagaagacacagaccctggccaagtttatccttctctttgctgtgttcgatgagggcaaaagttggcatagcgaaacgaagaattccctcatgcaggatcgcgacgcagccagcgccagagcttggcccaagatgcacactgtgaacggatatgtcaataggacgcttcctggcttgattgggtgtcatcggaaaagtgtctactggcacgtgatcggaatggggacaacaccagaggtccactccatatttctcgaaggccataccttccttgttcgaaaccacagacaggcatccttggggatctctcccattacctttctcactgcccaaacgctccttcgtgacttgggtcagttccttctcttttgccatatcccgtcacaccagcatgatggtatggaagcttatgtgaaagtcgacagttgtcctgaggagccacagttgcgcatgaagaataatgaagaagccgaggattacgacgacgatctcaccgattctgagatggacgtggtgaggtttgatgacgacaactctccctccatcattcaagctcggagcggggcgaagaaacaccccaagacttgggtccactatatagcggcggaagaggaggattgggattacgctcctcttgtattggcaccagatgaccgctcatacaaaagccagtacctcaacaacggaccgcagagaattggccggaagtataagaaagtgcgatttatggcctatacagacgaaacctttaagacaagggaggccatccagcatgagagtgggattttgggacctcttctttacggcgaagttggtgataccctcctcatcatcttcaagaatcaagcttctcgcccctataacatttacccacacgggatcactgacgttaggcctttgtatagcagaagacttcccaaaggcgtgaagcatctcaaagacttccccattttgccaggcgagatctttaagtacaaatggaccattacagtggaagatggaccgactaaatcagaccctcgatgccttacgcggtactattcctccggggtgaattgggagagagatttggcaagcggactcataggaccactcctcatctgttacaaggaatctgtagaccagaggggtaaccagattatgagtgataaacgcaatgtgatcctttttagcgtcttcgacgagaaccggtcctggtacttgaccgagaatatacaaaggttccttcccaaccccgcaggcgttcagttggaagaccctgagtttcaggccagcaatattatgcactcaatcaacggctatgtgtttgatagtctccagctttctgtttgcctccatgaagtagcctattggtacatcttgtcaattggtgctcaaacagacttcctctccgtcttcttctccggctacacctttaagcacaagggcgtgtatgaggacactctcacactctttccattttctggagaaaccgtgttcatgagcatggagaatccaggcctttggatcttgggttgccacaacagtgattttcgcaatcggggaatgactgctctcctcaaagtcagcagctgtgattggaacacaggcgactattacgaagattcttacgaggacataagtgcctactttgactccaagaataacgccattgagcccagatcattctcccagaatcctcccgtgcttaaaaggcatcagcgcgaaggtaccagaactactcttcagtctgatcaagaggagattgactatgacgacaccattagcgtggaaatgaagaaggaggatttcgatatctatgacgaagatgagaaccagtctccgcggagctttcagaagaagacgcgacactacttcattgcagcagtcgaaaggctttgggactacggtatgtcatcatcccctcatgtgttgcgcaatagagctcagagtggaagtgttccacagttcaagaaagtcgtctttcaagagtttacagatggcagcttcacacagcctctctatcggggcgagcttaacgaacatttgggactccttggtccctatatccgagccgaagtggaggacaacattatggttacctttaggaatcaagcctctcgcccctacagcttctactcctccctcatcacctatgaggaggatcaaagacaaggcgctgaaccacggaagaactttgtgaaaccgaatgagacgaagacctacttctggaaagtacagcaccacatggcccccacaaaagacgaattcgattgcaaagcatgggcgtatttttcagacgttgacttggagaaagatgtacattcaggacttattggtcctttgttggtgtgtcacactaacactctcaatccagcccatggcaggcaggtgacagtccaggaattcgctcttttctttaccatctttgatgagaccaagtcctggtacttcacggaaaacatggagcgcaattgcagagccccctgtaacatacagatggaggaccctacctttaaggaaaattatcggttccacgcaatcaacggatacattatggatacactccctggccttgtgatggctcaggaccaacgaatcaggtggtacctcctcagcatgggttctaatgagaacatacactccattcacttttcaggacatgtgttcactgtccggaagaaagaagagtataagatggccctctacaatttgtatccaggcgtgtttgagaccgttgaaatgcttccctctaaagctggcatctggagagtagagtgcttgatcggagaacatcttcacgcaggtatgagcaccttgttcctcgtgtacagcaacaaatgtcagaatccacttggcatggccagtggacacattcgcgactttcagatcacagcatctggccagtatggacaatgggccccaaagttggctcgcctccattactccggtagcataaatgcgtggtccactaaagaacctttcagctggattaaggtcgatcttcttgcccccatgatcatccacggcattaagacacagggagcgaggcagaaattctcctccctctacatctcacagttcattattatgtatagtttggacggcaagaagtggcaaacttatagaggtaacagtactggaacagacatggtgttcttcggcaacgttgatagctctggcatcaaacacaacatctttaatcctcccataatagctcggtacatcagattgcatccgacccactacagcattaggagtacactccgaatggagcttatgggttgcgacttgaattcctgttcaatgccactcggaatggagtctaaagccatctctgatgcacagataaccgccagtagctactttacgaacatgtttgctacgtggtcaccctctaaggcaaggcttcatttgcaaggccggtctaatgcctggagacctcaggtgaacaacccgaaagaatggctccaggtggactttcagaagaccatgaaagtaacaggtgtcactactcagggagttaagtccttggatactagcatgtatgtgaaggagttccttatttcctcatcacaagatggccaccagtggaccctcttctttcagaatggtaaggtcaaagtgtttcagggcaatcaagacagcttcacacccgtggtgaacagtcttgatcctccactcttgacacgataccttcgaatccatccacagtcttgggagcaccagattgcattgcgcatggaagtacttggatgcgaggctcaggacctctac

SEQ ID NO: 2064 - protein, 1457 aa, synthetic construct
  REGION 1..1457: note = Variant of human B-domain deleted Factor VIII
MQIELSTCFFLCLLRFCFSATRRYYLGAVELSWDYMQSDLGELPVDARFPPRVPKSFPFNTSQVYKKTLFVEFTDHLFNIAKPRPPWMGLLGPTIQAEVYDTVVITLKNMASHPVSLHAVGVSYWKASEGAEYDDQTSQREKEDDKVFPGGSHTYVWQVLKENGPMASDPPCLTYSYLSHVDLVKDLNSGLIGALLVCREGSLAKEKTQTLAKFILLFAVFDEGKSWHSETKNSLMQDRDAASARAWPKMHTVNGYVNRTLPGLIGCHRKSVYWHVIGMGTTPEVHSIFLEGHTFLVRNHRQASLGISPITFLTAQTLLRDLGQFLLFCHIPSHQHDGMEAYVKVDSCPEEPQLRMKNNEEAEDYDDDLTDSEMDVVRFDDDNSPSIIQARSGAKKHPKTWVHYIAAEEEDWDYAPLVLAPDDRSYKSQYLNNGPQRIGRKYKKVRFMAYTDETFKTREAIQHESGILGPLLYGEVGDTLLIIFKNQASRPYNIYPHGITDVRPLYSRRLPKGVKHLKDFPILPGEIFKYKWTITVEDGPTKSDPRCLTRYYSSGVNWERDLASGLIGPLLICYKESVDQRGNQIMSDKRNVILFSVFDENRSWYLTENIQRFLPNPAGVQLEDPEFQASNIMHSINGYVFDSLQLSVCLHEVAYWYILSIGAQTDFLSVFFSGYTFKHKGVYEDTLTLFPFSGETVFMSMENPGLWILGCHNSDFRNRGMTALLKVSSCDWNTGDYYEDSYEDISAYFDSKNNAIEPRSFSQNPPVLKRHQREGTRTTLQSDQEEIDYDDTISVEMKKEDFDIYDEDENQSPRSFQKKTRHYFIAAVERLWDYGMSSSPHVLRNRAQSGSVPQFKKVVFQEFTDGSFTQPLYRGELNEHLGLLGPYIRAEVEDNIMVTFRNQASRPYSFYSSLITYEEDQRQGAEPRKNFVKPNETKTYFWKVQHHMAPTKDEFDCKAWAYFSDVDLEKDVHSGLIGPLLVCHTNTLNPAHGRQVTVQEFALFFTIFDETKSWYFTENMERNCRAPCNIQMEDPTFKENYRFHAINGYIMDTLPGLVMAQDQRIRWYLLSMGSNENIHSIHFSGHVFTVRKKEEYKMALYNLYPGVFETVEMLPSKAGIWRVECLIGEHLHAGMSTLFLVYSNKCQNPLGMASGHIRDFQITASGQYGQWAPKLARLHYSGSINAWSTKEPFSWIKVDLLAPMIIHGIKTQGARQKFSSLYISQFIIMYSLDGKKWQTYRGNSTGTDMVFFGNVDSSGIKHNIFNPPIIARYIRLHPTHYSIRSTLRMELMGCDLNSCSMPLGMESKAISDAQITASSYFTNMFATWSPSKARLHLQGRSNAWRPQVNNPKEWLQVDFQKTMKVTGVTTQGVKSLDTSMYVKEFLISSSQDGHQWTLFFQNGKVKVFQGNQDSFTPVVNSLDPPLLTRYLRIHPQSWEHQIALRMEVLGCEAQDLY

SEQ ID NO: 2065 - DNA, 4371 bp, synthetic construct
  misc_feature 1..4371: note = Variant of human B-domain deleted Factor VIII
  source 1..4371: mol_type = other DNA
atgcagattgaactgtctacctgcttcttcctctgtttgctgaggttctgctttagcgccactagacggtactaccttggcgctgtggagctgtcctgggactatatgcagagtgatttgggagagcttcccgtcgacgcacgatttcctcctcgcgttccaaagtcatttccctttaacacaagccaggtgtacaagaagacgctcttcgtcgaattcaccgatcacctgttcaatatcgccaaacccagaccaccatggatgggtcttttggggcctaccatacaagcggaggtgtatgacacagttgttatcactctcaagaacatggcttctcatccggtaagtcttcacgcagtgggcgtgtcctactggaaagcttcagaaggagccgagtatgatgatcagacatcccagagggagaaagaagacgacaaggtatttccaggtgggtctcatacctatgtgtggcaagtgctcaaagagaatggccctatggcaagcgatccgccgtgtttgacttacagctacctttcacacgttgacctcgtcaaggacctcaactccgggttgattggagccttgttggtatgcagggaaggatctcttgccaaagagaagacacagaccctggccaagtttatccttctctttgctgtgttcgatgagggcaaaagttggcatagcgaaacgaagaattccctcatgcaggatcgcgacgcagccagcgccagagcttggcccaagatgcacactgtgaacggatatgtcaataggacgcttcctggcttgattgggtgtcatcggaaaagtgtctactggcacgtgatcggaatggggacaacaccagaggtccactccatatttctcgaaggccataccttccttgttcgaaaccacagacaggcatccttggggatctctcccattacctttctcactgcccaaacgctccttcgtgacttgggtcagttccttctcttttgccatatcccgtcacaccagcatgatggtatggaagcttatgtgaaagtcgacagttgtcctgaggagccacagttgcgcatgaagaataatgaagaagccgaggattacgacgacgatctcaccgattctgagatggacgtggtgaggtttgatgacgacaactctccctccatcattcaagctcggagcggggcgaagaaacaccccaagacttgggtccactatatagcggcggaagaggaggattgggattacgctcctcttgtattggcaccagatgaccgctcatacaaaagccagtacctcaacaacggaccgcagagaattggccggaagtataagaaagtgcgatttatggcctatacagacgaaacctttaagacaagggaggccatccagcatgagagtgggattttgggacctcttctttacggcgaagttggtgataccctcctcatcatcttcaagaatcaagcttctcgcccctataacatttacccacacgggatcactgacgttaggcctttgtatagcagaagacttcccaaaggcgtgaagcatctcaaagacttccccattttgccaggcgagatctttaagtacaaatggaccattacagtagaagatggaccgactaaatcagaccctcgatgccttacgcggtactattcctccttcgtgaattgggagagagatttggcaagcggactcataggaccactcctcatctgttacaaggaatctgtagaccagaggggtaaccagattatgagtgataaacgcaatgtgatcctttttagcgtcttcgacgagaaccggtcctggtacttgaccgagaatatacaaaggttccttcccaaccccgcaggcgttcagttggaagaccctgagtttcaggccagcaatattatgcactcaatcaacggctatgtgtttgatagtctccagctttctgtttgcctccatgaagtagcctattggtacatcttgtcaattggtgctcaaacagacttcctctccgtcttcttctccggctacacctttaagcacaagggcgtgtatgaggacactctcacactctttccattttctggagaaaccgtgttcatgagcatggagaatccaggcctttggatcttgggttgccacaacagtgattttcgcaatcggggaatgactgctctcctcaaagtcagcagctgtgattggaacacaggcgactattacgaagattcttacgaggacataagtgcctactttgactccaagaataacgccattgagcccagatcattctcccagaatcctcccgtgcttaaaaggcatcagcgcgaaggtaccagaactactcttcagtctgatcaagaggagattgactatgacgacaccattagcgtggaaatgaagaaggaggatttcgatatctatgacgaagatgagaaccagtctccgcggagctttcagaagaagacgcgacactacttcattgcagcagtcgaaaggctttgggactacggtatgtcatcaaaacctcatgtgttgcgcaatagagctcagagtggaagtgttccacagttcaagaaagtcgtctttcaagagtttacagatggcagcttcacacagcctctctatcggggcgagcttaacgaacatttgggactccttggtccctatatccgagccgaagtggaggacaacattatggttacctttaggaatcaagcctctcgcccctacagcttctactcctccctcatcagttatgaggaggatcagagacaaggcgctgaaccacggaagaactttgtgaaaccgaatgagacgaagacctacttctggaaagtacagcaccacatggcccccacaaaagacgaattcgattgcaaagcatgggcgtatttttcagacgttgacttggagaaagatgtacattcaggacttattggtcctttgttggtgtgtcacactaacactctcaatccagcccatggcaggcaggtgacagtccaggaattcgctcttttctttaccatctttgatgagaccaagtcctggtacttcacggaaaacatggagcgcaattgcagagccccctgtaacatacagatggaggaccctacctttaaggaaaattatcggttccacgcaatcaacggatacattatggatacactccctggccttgtgatggctcaggaccaacgaatcaggtggtacctcctcagcatgggttctaatgagaacatacactccattcacttttcaggacatgtgttcactgtccggaagaaagaagagtataagatggccctctacaatttgtatccaggcgtgtttgagaccgttgaaatgcttccctctaaagctggcatctggagagtagagtgcttgatcggagaacatcttcacgcaggtatgagcaccttgttcctcgtgtacagcaacaaatgtcagaatccacttggcatggccagtggacacattcgcgactttcagatcacagcatctggccagtatggacaatgggccccaaagttggctcgcctccattactccggtagcataaatgcgtggtccactaaagaacctttcagctggattaaggtcgatcttcttgcccccatgatcatccacggcattaagacacagggagcgaggcagaaattctcctccctctacatctcacagttcattattatgtatagtttggacggcaagaagtggcaaacttatagaggtaacagtactggaacagacatggtgttcttcggcaacgttgatagctctggcatcaaacacaacatctttaatcctcccataatagctcggtacatcagattgcatccgacccactacagcattaggagtacactccgaatggagcttatgggttgcgacttgaattcctgttcaatgccactcggaatggagtctaaagccatctctgatgcacagataaccgccagtagctactttacgaacatgtttgctacgtggtcaccctctaaggcaaggcttcatttgcaaggccggtctaatgcctggagacctcaggtgaacaacccgaaagaatggctccaggtggactttcagaagaccatgaaagtaacaggtgtcactactcagggagttaagtccttggatactagcatgtatgtgaaggagttccttatttcctcatcacaagatggccaccagtggaccctcttctttcagaatggtaaggtcaaagtgtttcagggcaatcaagacagcttcacacccgtggtgaacagtcttgatcctccactcttgacacgataccttcgaatccatccacagtcttgggagcaccagattgcattgcgcatggaagtacttggatgcgaggctcaggacctctac

SEQ ID NO: 2066 - protein, 1457 aa, synthetic construct
  REGION 1..1457: note = Variant of human B-domain deleted Factor VIII
MQIELSTCFFLCLLRFCFSATRRYYLGAVELSWDYMQSDLGELPVDARFPPRVPKSFPFNTSQVYKKTLFVEFTDHLFNIAKPRPPWMGLLGPTIQAEVYDTVVITLKNMASHPVSLHAVGVSYWKASEGAEYDDQTSQREKEDDKVFPGGSHTYVWQVLKENGPMASDPPCLTYSYLSHVDLVKDLNSGLIGALLVCREGSLAKEKTQTLAKFILLFAVFDEGKSWHSETKNSLMQDRDAASARAWPKMHTVNGYVNRTLPGLIGCHRKSVYWHVIGMGTTPEVHSIFLEGHTFLVRNHRQASLGISPITFLTAQTLLRDLGQFLLFCHIPSHQHDGMEAYVKVDSCPEEPQLRMKNNEEAEDYDDDLTDSEMDVVRFDDDNSPSIIQARSGAKKHPKTWVHYIAAEEEDWDYAPLVLAPDDRSYKSQYLNNGPQRIGRKYKKVRFMAYTDETFKTREAIQHESGILGPLLYGEVGDTLLIIFKNQASRPYNIYPHGITDVRPLYSRRLPKGVKHLKDFPILPGEIFKYKWTITVEDGPTKSDPRCLTRYYSSFVNWERDLASGLIGPLLICYKESVDQRGNQIMSDKRNVILFSVFDENRSWYLTENIQRFLPNPAGVQLEDPEFQASNIMHSINGYVFDSLQLSVCLHEVAYWYILSIGAQTDFLSVFFSGYTFKHKGVYEDTLTLFPFSGETVFMSMENPGLWILGCHNSDFRNRGMTALLKVSSCDWNTGDYYEDSYEDISAYFDSKNNAIEPRSFSQNPPVLKRHQREGTRTTLQSDQEEIDYDDTISVEMKKEDFDIYDEDENQSPRSFQKKTRHYFIAAVERLWDYGMSSKPHVLRNRAQSGSVPQFKKVVFQEFTDGSFTQPLYRGELNEHLGLLGPYIRAEVEDNIMVTFRNQASRPYSFYSSLISYEEDQRQGAEPRKNFVKPNETKTYFWKVQHHMAPTKDEFDCKAWAYFSDVDLEKDVHSGLIGPLLVCHTNTLNPAHGRQVTVQEFALFFTIFDETKSWYFTENMERNCRAPCNIQMEDPTFKENYRFHAINGYIMDTLPGLVMAQDQRIRWYLLSMGSNENIHSIHFSGHVFTVRKKEEYKMALYNLYPGVFETVEMLPSKAGIWRVECLIGEHLHAGMSTLFLVYSNKCQNPLGMASGHIRDFQITASGQYGQWAPKLARLHYSGSINAWSTKEPFSWIKVDLLAPMIIHGIKTQGARQKFSSLYISQFIIMYSLDGKKWQTYRGNSTGTDMVFFGNVDSSGIKHNIFNPPIIARYIRLHPTHYSIRSTLRMELMGCDLNSCSMPLGMESKAISDAQITASSYFTNMFATWSPSKARLHLQGRSNAWRPQVNNPKEWLQVDFQKTMKVTGVTTQGVKSLDTSMYVKEFLISSSQDGHQWTLFFQNGKVKVFQGNQDSFTPVVNSLDPPLLTRYLRIHPQSWEHQIALRMEVLGCEAQDLY

SEQ ID NO: 2067 - DNA, 4371 bp, synthetic construct
  misc_feature 1..4371: note = Variant of human B-domain deleted Factor VIII
  source 1..4371: mol_type = other DNA
atgcagattgaactgtctacctgcttcttcctctgtttgctgaggttctgctttagcgccactagacggtactaccttggcgctgtggagctgtcctgggactatatgcagagtgatttgggagagcttcccgtcgacgcacgatttcctcctcgcgttccaaagtcatttccctttaacacaagccaggtgtacaagaagacgctcttcgtcgaattcaccgatcacctgttcaatatcgccaaacccagaccaccatggatgggtcttttggggcctaccatacaagcggaggtgtatgacacagttgttatcactctcaagaacatggcttctcatccggtaagtcttcacgcagtgggcgtgtcctactggaaagcttcagaaggagccgagtatgatgatcagacatcccagagggagaaagaagacgacaaggtatttccaggtgggtctcatacctatgtgtggcaagtgctcaaagagaatggccctatggcaagcgatccgccgtgtttgacttacagctacctttcacacgttgacctcgtcaaggacctcaactccgggttgattggagccttgttggtatgcagggaaggatctcttgccaaagagaagacacagaccctggccaagtttatccttctctttgctgtgttcgatgagggcaaaagttggcatagcgaaacgaagaattccctcatgcaggatcgcgacgcagccagcgccagagcttggcccaagatgcacactgtgaacggatatgtcaataggacgcttcctggcttgattgggtgtcatcggaaaagtgtctactggcacgtgatcggaatggggacaacaccagaggtccactccatatttctcgaaggccataccttccttgttcgaaaccacagacaggcatccttggggatctctcccattacctttctcactgcccaaacgctccttcgtgacttgggtcagttccttctcttttgccatatcccgtcacaccagcatgatggtatggaagcttatgtgaaagtcgacagttgtcctgaggagccacagttgcgcatgaagaataatgaagaagccgaggattacgacgacgatctcaccgattctgagatggacgtggtgaggtttgatgacgacaactctccctccatcattcaagctcggagcggggcgaagaaacaccccaagacttgggtccactatatagcggcggaagaggaggattgggattacgctcctcttgtattggcaccagatgaccgctcatacaaaagccagtacctcaacaacggaccgcagagaattggccggaagtataagaaagtgcgatttatggcctatacagacgaaacctttaagacaagggaggccatccagcatgagagtgggattttgggacctcttctttacggcgaagttggtgataccctcctcatcatcttcaagaatcaagcttctcgcccctataacatttacccacacgggatcactgacgttaggcctttgtatagcagaagacttcccaaaggcgtgaagcatctcaaagacttccccattttgccaggcgagatctttaagtacaaatggaccattacagtggaagatggaccgactaaatcagaccctcgatgccttacgcggtactattcctccttcgtgaattgggagagagatttggcaagcggactcataggaccactcctcatctgttacaaggaatctgtagaccagaggggtaaccagattatgagtgataaacgcaatgtgatcctttttagcgtcttcgacgagaaccggtcctggtacttgaccgagaatatacaaaggttccttcccaaccccgcaggcgttcagttggaagaccctgagtttcaggccagcaatattatgcactcaatcaacggctatgtgtttgatagtctccagctttctgtttgcctccatgaagtagcctattggtacatcttgtcaattggtgctcaaacagacttcctctccgtcttcttctccggctacacctttaagcacaagggtgtgtatgaggacactctcacactctttccattttctggagaaaccgtgttcatgagcatggagaatccaggcctttggatcttgggttgccacaacagtgattttcgcaatcggggaatgactgctctcctcaaagtcagcagctgtgattggaacacaggcgactattacgaagattcttacgaggacataagtgcctactttgactccaagaataacgccattgagcccagatcattctcccagaatcctcccgtgcttaaaaggcatcagcgcgaaggtaccagaactactcttcagtctgatcaagaggagattgactatgacgacaccattagcgtggaaatgaagcaggaggatttcgatatctatgacgaagatgagaaccagtctccgcggagctttcagaagaagacgcgacactacttcattgcagcagtcgaaaggctttgggactacggtatgtcatcaagccctcatgtgttgcgcaatagagctcagagtggaagtgttccacagttcaagaaagtcgtctttcaagagtttacagatggcagcttcacacagcctctctatcggggcgagcttaacgaacatttgggactccttggtccctatatccgagccgaagtggaggacaacattatggttacctttaggaatcaagcctctcgcccctacagcttctactcctccctcatcagttatgaggaggatcagagacaaggcgctgaaccacggaagaactttgtgaaaccgaatgagacgaagacctacttctggaaagtacagcaccacatggcccccacaaaagacgaattcgattgcaaagcatgggcgtatttttcagacgttgacttggagaaagatgtacattcaggacttattggtcctttgttggtgtgtcacactaacactctcaatccagcccatggcaggcaggtgacagtccaggaattcgctcttttctttaccatctttgatgagaccaagtcctggtacttcacggaaaacatggagcgcaattgcagagccccctgtaacatacagatggaggaccctacctttaaggaaaattatcggttccacgcaatcaacggatacattatggatacactccctggccttgtgatggctcaggaccaacgaatcaggtggtacctcctcagcatgggttctaatgagaacatacactccattcacttttcaggacatgtgttcactgtccggaagaaagaagagtataagatggccctctacaatttgtatccaggcgtgtttgagaccgttgaaatgcttccctctaaagctggcatctggagagtagagtgcttgatcggagaacatcttcacgcaggtatgagcaccttgttcctcgtgtacagcaacaaatgtcagaatccacttggcatggccagtggacacattcgcgactttcagatcacagcatctggccagtatggacaatgggccccaaagttggctcgcctccattactccggtagcataaatgcgtggtccactaaagaacctttcagctggattaaggtcgatcttcttgcccccatgatcatccacggcattaagacacagggagcgaggcagaaattctcctccctctacatctcacagttcattattatgtatagtttggacggcaagaagtggcaaacttatagaggtaacagtactggaacagacatggtgttcttcggcaacgttgatagctctggcatcaaacacaacatctttaatcctcccataatagctcggtacatcagattgcatccgacccactacagcattaggagtacactccgaatggagcttatgggttgcgacttgaattcctgttcaatgccactcggaatggagtctaaagccatctctgatgcacagataaccgccagtagctactttacgaacatgtttgctacgtggtcaccctctaaggcaaggcttcatttgcaaggccggtctaatgcctggagacctcaggtgaacaacccgaaagaatggctccaggtggactttcagaagaccatgaaagtaacaggtgtcactactcagggagttaagtccttggatactagcatgtatgtgaaggagttccttatttcctcatcacaagatggccaccagtggaccctcttctttcagaatggtaaggtcaaagtgtttcagggcaatcaagacagcttcacacccgtggtgaacagtcttgatcctccactcttgacacgataccttcgaatccatccacagtcttgggagcaccagattgcattgcgcatggaagtacttggatgcgaggctcaggacctctac

SEQ ID NO: 2068 - protein, 1457 aa, synthetic construct
  REGION 1..1457: note = Variant of human B-domain deleted Factor VIII
MQIELSTCFFLCLLRFCFSATRRYYLGAVELSWDYMQSDLGELPVDARFPPRVPKSFPFNTSQVYKKTLFVEFTDHLFNIAKPRPPWMGLLGPTIQAEVYDTVVITLKNMASHPVSLHAVGVSYWKASEGAEYDDQTSQREKEDDKVFPGGSHTYVWQVLKENGPMASDPPCLTYSYLSHVDLVKDLNSGLIGALLVCREGSLAKEKTQTLAKFILLFAVFDEGKSWHSETKNSLMQDRDAASARAWPKMHTVNGYVNRTLPGLIGCHRKSVYWHVIGMGTTPEVHSIFLEGHTFLVRNHRQASLGISPITFLTAQTLLRDLGQFLLFCHIPSHQHDGMEAYVKVDSCPEEPQLRMKNNEEAEDYDDDLTDSEMDVVRFDDDNSPSIIQARSGAKKHPKTWVHYIAAEEEDWDYAPLVLAPDDRSYKSQYLNNGPQRIGRKYKKVRFMAYTDETFKTREAIQHESGILGPLLYGEVGDTLLIIFKNQASRPYNIYPHGITDVRPLYSRRLPKGVKHLKDFPILPGEIFKYKWTITVEDGPTKSDPRCLTRYYSSFVNWERDLASGLIGPLLICYKESVDQRGNQIMSDKRNVILFSVFDENRSWYLTENIQRFLPNPAGVQLEDPEFQASNIMHSINGYVFDSLQLSVCLHEVAYWYILSIGAQTDFLSVFFSGYTFKHKGVYEDTLTLFPFSGETVFMSMENPGLWILGCHNSDFRNRGMTALLKVSSCDWNTGDYYEDSYEDISAYFDSKNNAIEPRSFSQNPPVLKRHQREGTRTTLQSDQEEIDYDDTISVEMKQEDFDIYDEDENQSPRSFQKKTRHYFIAAVERLWDYGMSSSPHVLRNRAQSGSVPQFKKVVFQEFTDGSFTQPLYRGELNEHLGLLGPYIRAEVEDNIMVTFRNQASRPYSFYSSLISYEEDQRQGAEPRKNFVKPNETKTYFWKVQHHMAPTKDEFDCKAWAYFSDVDLEKDVHSGLIGPLLVCHTNTLNPAHGRQVTVQEFALFFTIFDETKSWYFTENMERNCRAPCNIQMEDPTFKENYRFHAINGYIMDTLPGLVMAQDQRIRWYLLSMGSNENIHSIHFSGHVFTVRKKEEYKMALYNLYPGVFETVEMLPSKAGIWRVECLIGEHLHAGMSTLFLVYSNKCQNPLGMASGHIRDFQITASGQYGQWAPKLARLHYSGSINAWSTKEPFSWIKVDLLAPMIIHGIKTQGARQKFSSLYISQFIIMYSLDGKKWQTYRGNSTGTDMVFFGNVDSSGIKHNIFNPPIIARYIRLHPTHYSIRSTLRMELMGCDLNSCSMPLGMESKAISDAQITASSYFTNMFATWSPSKARLHLQGRSNAWRPQVNNPKEWLQVDFQKTMKVTGVTTQGVKSLDTSMYVKEFLISSSQDGHQWTLFFQNGKVKVFQGNQDSFTPVVNSLDPPLLTRYLRIHPQSWEHQIALRMEVLGCEAQDLY

SEQ ID NO: 2069 - DNA, 4371 bp, synthetic construct
  misc_feature 1..4371: note = Variant of human B-domain deleted Factor VIII
  source 1..4371: mol_type = other DNA
atgcagattgaactgtctacctgcttcttcctctgtttgctgaggttctgctttagcgccactagacggtactaccttggcgctgtggagctgtcctgggactatatgcagagtgatttgggagagcttcccgtcgacgcacgatttcctcctcgcgttccaaagtcatttccctttaacacaagccaggtgtacaagaagacgctcttcgtcgaattcaccgatcacctgttcaatatcgccaaacccagaccaccatggatgggtcttttggggcctaccatacaagcggaggtgtatgacacagttgttatcactctcaagaacatggcttctcatccggtaagtcttcacgcagtgggcgtgtcctactggaaagcttcagaaggagccgagtatgatgatcagacatcccagagggagaaagaagacgacaaggtatttccaggtgggtctcatacctatgtgtggcaagtgctcaaagagaatggccctatggcaagcgatccgccgtgtttgacttacagctacctttcacacgttgacctcgtcaaggacctcaactccgggttgattggagccttgttggtatgcagggaaggatctcttgccaaagagaagacacagaccctggccaagtttatccttctctttgctgtgttcgatgagggcaaaagttggcatagcgaaacgaagaattccctcatgcaggatcgcgacgcagccagcgccagagcttggcccaagatgcacactgtgaacggatatgtcaataggacgcttcctggcttgattgggtgtcatcggaaaagtgtctactggcacgtgatcggaatggggacaacaccagaggtccactccatatttctcgaaggccataccttccttgttcgaaaccacagacaggcatccttggggatctctcccattacctttctcactgcccaaacgggtcttcgtgacttgggtcagttccttctcttttgccatatcccgtcacaccagcatgatggtatggaagcttatgtgaaagtcgacagttgtcctgaggagccacagttgcgcatgaagaataatgaagaagccgaggattacgacgacgatctcaccgattctgagatggacgtggtgaggtttgatgacgacaactctccctccatcattcaagctcggagcggggcgaagaaacaccccaagacttgggtccactatatagcggcggaagaggaggattgggattacgctcctcttgtattggcaccagatgaccgctcatacaaaagccagtacctcaacaacggaccgcagagaattggccggaagtataagaaagtgcgatttatggcctatacagacgaaacctttaagacaagggaggccatccagcatgagagtgggattttgggacctcttctttacggcgaagttggtgataccctcctcatcatcttcaagaatcaagcttctcgcccctataacatttacccacacgggatcactgacgttaggcctttgtatagcagaagacttcccaaaggcgtgaagcatctcaaagacttccccattttgccaggcgagatctttaagtacaaatggaccattacagtggaagatggaccgactaaatcagaccctcgatgccttacgcggtactattcctccttcgtgaattgggagagagatttggcaagcggactcataggaccactcctcatctgttacaaggaatctgtagaccagaggggtaaccagattatgagtgataaacgcaatgtgatcctttttagcgtcttcgacgagaaccggtcctggtacttgaccgagaatatacaaaggttccttcccaaccccgcaggcgttcagttggaagaccctgagtttcaggccagcaatattatgcactcaatcaacggctatgtgtttgatagtctccagctttctgtttgcctccatgaagtagcctattggtacatcttgtcaattggtgctcaaacagacttcctctccgtcttcttctccggctacacctttaagcacaagggcgtgtatgaggacactctcacactctttccattttctggagaaaccgtgttcatgagcatggagaatccaggcctttggatcttgggttgccacaacagtgattttcgcaatcggggaatgactgctctcctcaaagtcagcagctgtgattggaacacaggcgactattacgaagattcttacgaggacataagtgcctactttgactccaagaataacgccattgagcccagatcattctcccagaatcctcccgtgcttaaaaggcatcagcgcgaaggtaccagaactactcttcagtctgatcaagaggagattgactatgacgacaccattagcgtggaaatgaagaaggaggatttcgatatctatgacgaagatgagaaccagtctccgcggagctttcagaagaagacgcgacactacttcattgcagcagtcgaaaggctttgggactacggtatgtcatcatcccctcatgtgttgcgcaatagagctcagagtggaagtgttccacagttcaagaaagtcgtctttcaagagtttacagatggcagcttcacacagcctctctatcggggcgagcttaacgaacatttgggactccttggtccctatatccgagccgaagtggaggacaacattatggttacctttaggaatcaagcctctcgcccctacagcttctactcctccctcatcagttatgaggaggatcagagacaaggcgctgaaccacggaagaactttgtgaaaccgaatgagacgaagacctacttctggaaagtacagcaccacatggcccccacaaaagacgaattcgattgcaaagcatgggcgtatttttcagacgttgacttggagaaagatgtacattcaggacttattggtcctttgttggtgtgtcacactaacactctcaatccagcccatggcaggcaggtgacagtccaggaattcgctcttttctttaccatctttgatgagaccaagtcctggtacttcacggaaaacatggagcgcaattgcagagccccctgtaacatacagatggaggaccctacctttaaggaaaattatcggttccacgcaatcaacggatacattatggatacactccctggccttgtgatggctcaggaccaacgaatcaggtggtacctcctcagcatgggttctaatgagaacatacactccattcacttttcaggacatgtgttcactgtccggaagaaagaagagtataagatggccctctacaatttgtatccaggcgtgtttgagaccgttgaaatgcttccctctaaagctggcatctggagagtagagtgcttgatcggagaacatcttcacgcaggtatgagcaccttgttcctcgtgtacagcaacaaatgtcagaatccacttggcatggccagtggacacattcgcgactttcagatcacagcatctggccagtatggacaatgggccccaaagttggctcgcctccattactccggtagcataaatgcgtggtccactaaagaacctttcagctggattaaggtcgatcttcttgcccccatgatcatccacggcattaagacacagggagcgaggcagaaattctcctccctctacatctcacagttcattattatgtatagtttggacggcaagaagtggcaaacttatagaggtaacagtactggaacagacatggtgttcttcggcaacgttgatagctctggcatcaaacacaacatctttaatcctcccataatagctcggtacatcagattgcatccgacccactacagcattaggagtacactccgaatggagcttatgggttgcgacttgaattcctgttcaatgccactcggaatggagtctaaagccatctctgatgcacagataaccgccagtagctactttacgaacatgtttgctacgtggtcaccctctaaggcaaggcttcatttgcaaggccggtctaatgcctggagacctcaggtgaacaacccgaaagaatggctccaggtggactttcagaagaccatgaaagtaacaggtgtcactactcagggagttaagtccttggatactagcatgtatgtgaaggagttccttatttcctcatcacaagatggccaccagtggaccctcttctttcagaatggtaaggtcaaagtgtttcagggcaatcaagacagcttcacacccgtggtgaacagtcttgatcctccactcttgacacgataccttcgaatccatccacagtcttgggagcaccagattgcattgcgcatggaagtacttggatgcgaggctcaggacctctac

SEQ ID NO: 2070 - protein, 1457 aa, synthetic construct
  REGION 1..1457: note = Variant of human B-domain deleted Factor VIII
MQIELSTCFFLCLLRFCFSATRRYYLGAVELSWDYMQSDLGELPVDARFPPRVPKSFPFNTSQVYKKTLFVEFTDHLFNIAKPRPPWMGLLGPTIQAEVYDTVVITLKNMASHPVSLHAVGVSYWKASEGAEYDDQTSQREKEDDKVFPGGSHTYVWQVLKENGPMASDPPCLTYSYLSHVDLVKDLNSGLIGALLVCREGSLAKEKTQTLAKFILLFAVFDEGKSWHSETKNSLMQDRDAASARAWPKMHTVNGYVNRTLPGLIGCHRKSVYWHVIGMGTTPEVHSIFLEGHTFLVRNHRQASLGISPITFLTAQTGLRDLGQFLLFCHIPSHQHDGMEAYVKVDSCPEEPQLRMKNNEEAEDYDDDLTDSEMDVVRFDDDNSPSIIQARSGAKKHPKTWVHYIAAEEEDWDYAPLVLAPDDRSYKSQYLNNGPQRIGRKYKKVRFMAYTDETFKTREAIQHESGILGPLLYGEVGDTLLIIFKNQASRPYNIYPHGITDVRPLYSRRLPKGVKHLKDFPILPGEIFKYKWTITVEDGPTKSDPRCLTRYYSSFVNWERDLASGLIGPLLICYKESVDQRGNQIMSDKRNVILFSVFDENRSWYLTENIQRFLPNPAGVQLEDPEFQASNIMHSINGYVFDSLQLSVCLHEVAYWYILSIGAQTDFLSVFFSGYTFKHKGVYEDTLTLFPFSGETVFMSMENPGLWILGCHNSDFRNRGMTALLKVSSCDWNTGDYYEDSYEDISAYFDSKNNAIEPRSFSQNPPVLKRHQREGTRTTLQSDQEEIDYDDTISVEMKKEDFDIYDEDENQSPRSFQKKTRHYFIAAVERLWDYGMSSSPHVLRNRAQSGSVPQFKKVVFQEFTDGSFTQPLYRGELNEHLGLLGPYIRAEVEDNIMVTFRNQASRPYSFYSSLISYEEDQRQGAEPRKNFVKPNETKTYFWKVQHHMAPTKDEFDCKAWAYFSDVDLEKDVHSGLIGPLLVCHTNTLNPAHGRQVTVQEFALFFTIFDETKSWYFTENMERNCRAPCNIQMEDPTFKENYRFHAINGYIMDTLPGLVMAQDQRIRWYLLSMGSNENIHSIHFSGHVFTVRKKEEYKMALYNLYPGVFETVEMLPSKAGIWRVECLIGEHLHAGMSTLFLVYSNKCQNPLGMASGHIRDFQITASGQYGQWAPKLARLHYSGSINAWSTKEPFSWIKVDLLAPMIIHGIKTQGARQKFSSLYISQFIIMYSLDGKKWQTYRGNSTGTDMVFFGNVDSSGIKHNIFNPPIIARYIRLHPTHYSIRSTLRMELMGCDLNSCSMPLGMESKAISDAQITASSYFTNMFATWSPSKARLHLQGRSNAWRPQVNNPKEWLQVDFQKTMKVTGVTTQGVKSLDTSMYVKEFLISSSQDGHQWTLFFQNGKVKVFQGNQDSFTPVVNSLDPPLLTRYLRIHPQSWEHQIALRMEVLGCEAQDLY

SEQ ID NO: 2071 - DNA, 4371 bp, synthetic construct
  misc_feature 1..4371: note = Variant of human B-domain deleted Factor VIII
  source 1..4371: mol_type = other DNA
atgcagattgaactgtctacctgcttcttcctctgtttgctgaggttctgctttagcgccactagacggtactaccttggcgctgtggagctgtcctgggactatatgcagagtgatttgggagagcttcccgtcgacgcacgatttcctcctcgcgttccaaagtcatttccctttaacacaagccaggtgtacaagaagacgctcttcgtcgaattcaccgatcacctgttcaatatcgccaaacccagaccaccatggatgggtcttttggggcctaccatacaagcggaggtgtatgacacagttgttatcactctcaagaacatggcttctcatccggtaagtcttcacgcagtgggcgtgtcctactggaaagcttcagaaggagccgagtatgatgatcagacatcccagagggagaaagaagacgacaaggtatttccaggtgggtctcatacctatgtgtggcaagtgctcaaagagaatggccctatggcaagcgatccgccgtgtttgacttacagctacctttcacacgttgacctcgtcaaggacctcaactccgggttgattggagccttgttggtatgcagggaaggatctcttgccaaagagaagacacagaccctggccaagtttatccttctctttgctgtgttcgatgagggcaaaagttggcatagcgaaacgaagaattccctcatgcaggatcgcgacgcagccagcgccagagcttggcccaagatgcacactgtgaacggatatgtcaataggacgcttcctggcttgattgggtgtcatcggaaaagtgtctactggcacgtgatcggaatggggacaacaccagaggtccactccatatttctcgaaggccataccttccttgttcgaaaccacagacaggcatccttggggatctctcccattacctttctcactgcccaaacgggtcttcgtgacttgggtcagttccttctcttttgccatatcccgtcacaccagcatgatggtatggaagcttatgtgaaagtcgacagttgtcctgaggagccacagttgcgcatgaagaataatgaagaagccgaggattacgacgacgatctcaccgattctgagatggacgtggtgaggtttgatgacgacaactctccctccatcattcaagctcggagcggggcgaagaaacaccccaagacttgggtccactatatagcggcggaagaggaggattgggattacgctcctcttgtattggcaccagatgaccgctcatacaaaagccagtacctcaacaacggaccgcagagaattggccggaagtataagaaagtgcgatttatggcctatacagacgaaacctttaagacaagggaggccatccagcatgagagtgggattttgggacctcttctttacggcgaagttggtgataccctcctcatcatcttcaagaatcaagcttctcgcccctataacatttacccacacgggatcactgacgttaggcctttgtatagcagaagacttcccaaaggcgtgaagcatctcaaagacttccccattttgccaggcgagatctttaagtacaaatggaccattacagtggaagatggaccgactaaatcagaccctcgatgccttacgcggtactattcctccttcgtgaattgggagagagatttggcaagcggactcataggaccactcctcatctgttacaaggaatctgtagaccagaggggtaaccagattatgagtgataaacgcaatgtgatcctttttagcgtcttcgacgagaaccggtcctggtacttgaccgagaatatacaaaggttccttcccaaccccgcaggcgttcagttggaagaccctgagtttcaggccagcaatattatgcactcaatcaacggctatgtgtttgatagtctccagctttctgtttgcctccatgaagtagcctattggtacatcttgtcaattggtgctcaaacagacttcctctccgtcttcttctccggctacacctttaagcacaagggcgtgtatgaggacactctcacactctttccattttctggagaaaccgtgttcatgagcatggagaatccaggcctttggatcttgggttgccacaacagtgattttcgcaatcggggaatgactgctctcctcaaagtcagcagctgtgattggaacacaggcgactatgaggaagattcttacgaggacataagtgcctactttgactccaagaataacgccattgagcccagatcattctcccagaatcctcccgtgcttaaaaggcatcagcgcgaaggtaccagaactactcttcagtctgatcaagaggagattgactatgacgacaccattagcgtggaaatgaagaaggaggatttcgatatctatgacgaagatgagaaccagtctccgcggagctttcagaagaagacgcgacactacttcattgcagcagtcgaaaggctttgggactacggtatgtcatcatcccctcatgtgttgcgcaatagagctcagagtggaagtgttccacagttcaagaaagtcgtctttcaagagtttacagatggcagcttcacacagcctctctatcggggcgagcttaacgaacatttgggactccttggtccctatatccgagccgaagtggaggacaacattatggttacctttaggaatcaagcctctcgcccctacagcttctactcctccctcatcagttatgaggaggatcagagacaaggcgctgaaccacggaagaactttgtgaaaccgaatgagacgaagacctacttctggaaagtacagcaccacatggcccccacaaaagacgaattcgattgcaaagcatgggcgtatttttcagacgttgacttggagaaagatgtacattcaggacttattggtcctttgttggtgtgtcacactaacactctcaatccagcccatggcaggcaggtgacagtccaggaattcgctcttttctttaccatctttgatgagaccaagtcctggtacttcacggaaaacatggagcgcaattgcagagccccctgtaacatacagatggaggaccctacctttaaggaaaattatcggttccacgcaatcaacggatacattatggatacactccctggccttgtgatggctcaggaccaacgaatcaggtggtacctcctcagcatgggttctaatgagaacatacactccattcacttttcaggacatgtgttcactgtccggaagaaagaagagtataagatggccctctacaatttgtatccaggcgtgtttgagaccgttgaaatgcttccctctaaagctggcatctggagagtagagtgcttgatcggagaacatcttcacgcaggtatgagcaccttgttcctcgtgtacagcaacaaatgtcagaatccacttggcatggccagtggacacattcgcgactttcagatcacagcatctggccagtatggacaatgggccccaaagttggctcgcctccattactccggtagcataaatgcgtggtccactaaagaacctttcagctggattaaggtcgatcttcttgcccccatgatcatccacggcattaagacacagggagcgaggcagaaattctcctccctctacatctcacagttcattattatgtatagtttggacggcaagaagtggcaaacttatagaggtaacagtactggaacagacatggtgttcttcggcaacgttgatagctctggcatcaaacacaacatctttaatcctcccataatagctcggtacatcagattgcatccgacccactacagcattaggagtacactccgaatggagcttatgggttgcgacttgaattcctgttcaatgccactcggaatggagtctaaagccatctctgatgcacagataaccgccagtagctactttacgaacatgtttgctacgtggtcaccctctaaggcaaggcttcatttgcaaggccggtctaatgcctggagacctcaggtgaacaacccgaaagaatggctccaggtggactttcagaagaccatgaaagtaacaggtgtcactactcagggagttaagtccttggatactagcatgtatgtgaaggagttccttatttcctcatcacaagatggccaccagtggaccctcttctttcagaatggtaaggtcaaagtgtttcagggcaatcaagacagcttcacacccgtggtgaacagtcttgatcctccactcttgacacgataccttcgaatccatccacagtcttgggagcaccagattgcattgcgcatggaagtacttggatgcgaggctcaggacctctac

SEQ ID NO: 2072 - protein, 1457 aa, synthetic construct
  REGION 1..1457: note = Variant of human B-domain deleted Factor VIII
MQIELSTCFFLCLLRFCFSATRRYYLGAVELSWDYMQSDLGELPVDARFPPRVPKSFPFNTSQVYKKTLFVEFTDHLFNIAKPRPPWMGLLGPTIQAEVYDTVVITLKNMASHPVSLHAVGVSYWKASEGAEYDDQTSQREKEDDKVFPGGSHTYVWQVLKENGPMASDPPCLTYSYLSHVDLVKDLNSGLIGALLVCREGSLAKEKTQTLAKFILLFAVFDEGKSWHSETKNSLMQDRDAASARAWPKMHTVNGYVNRTLPGLIGCHRKSVYWHVIGMGTTPEVHSIFLEGHTFLVRNHRQASLGISPITFLTAQTGLRDLGQFLLFCHIPSHQHDGMEAYVKVDSCPEEPQLRMKNNEEAEDYDDDLTDSEMDVVRFDDDNSPSIIQARSGAKKHPKTWVHYIAAEEEDWDYAPLVLAPDDRSYKSQYLNNGPQRIGRKYKKVRFMAYTDETFKTREAIQHESGILGPLLYGEVGDTLLIIFKNQASRPYNIYPHGITDVRPLYSRRLPKGVKHLKDFPILPGEIFKYKWTITVEDGPTKSDPRCLTRYYSSFVNWERDLASGLIGPLLICYKESVDQRGNQIMSDKRNVILFSVFDENRSWYLTENIQRFLPNPAGVQLEDPEFQASNIMHSINGYVFDSLQLSVCLHEVAYWYILSIGAQTDFLSVFFSGYTFKHKGVYEDTLTLFPFSGETVFMSMENPGLWILGCHNSDFRNRGMTALLKVSSCDWNTGDYEEDSYEDISAYFDSKNNAIEPRSFSQNPPVLKRHQREGTRTTLQSDQEEIDYDDTISVEMKKEDFDIYDEDENQSPRSFQKKTRHYFIAAVERLWDYGMSSSPHVLRNRAQSGSVPQFKKVVFQEFTDGSFTQPLYRGELNEHLGLLGPYIRAEVEDNIMVTFRNQASRPYSFYSSLISYEEDQRQGAEPRKNFVKPNETKTYFWKVQHHMAPTKDEFDCKAWAYFSDVDLEKDVHSGLIGPLLVCHTNTLNPAHGRQVTVQEFALFFTIFDETKSWYFTENMERNCRAPCNIQMEDPTFKENYRFHAINGYIMDTLPGLVMAQDQRIRWYLLSMGSNENIHSIHFSGHVFTVRKKEEYKMALYNLYPGVFETVEMLPSKAGIWRVECLIGEHLHAGMSTLFLVYSNKCQNPLGMASGHIRDFQITASGQYGQWAPKLARLHYSGSINAWSTKEPFSWIKVDLLAPMIIHGIKTQGARQKFSSLYISQFIIMYSLDGKKWQTYRGNSTGTDMVFFGNVDSSGIKHNIFNPPIIARYIRLHPTHYSIRSTLRMELMGCDLNSCSMPLGMESKAISDAQITASSYFTNMFATWSPSKARLHLQGRSNAWRPQVNNPKEWLQVDFQKTMKVTGVTTQGVKSLDTSMYVKEFLISSSQDGHQWTLFFQNGKVKVFQGNQDSFTPVVNSLDPPLLTRYLRIHPQSWEHQIALRMEVLGCEAQDLY

SEQ ID NO: 2073 - DNA, 4371 bp, synthetic construct
  misc_feature 1..4371: note = Variant of human B-domain deleted Factor VIII
  source 1..4371: mol_type = other DNA
atgcagattgaactgtctacctgcttcttcctctgtttgctgaggttctgctttagcgccactagacggtactaccttggcgctgtggagctgtcctgggactatatgcagagtgatttgggagagcttcccgtcgacgcacgatttcctcctcgcgttccaaagtcatttccctttaacacaagccaggtgtacaagaagacgctcttcgtcgaattcaccgatcacctgttcaatatcgccaaacccagaccaccatggatgggtcttttggggcctaccatacaagcggaggtgtatgacacagttgttatcactctcaagaacatggcttctcatccggtaagtcttcacgcagtgggcgtgtcctactggaaagcttcagaaggagccgagtatgatgatcagacatcccagagggagaaagaagacgacaaggtatttccaggtgggtctcatacctatgtgtggcaagtgctcaaagagaatggccctatgggcagcgatccgccgtgtttgacttacagctacctttcacacgttgacctcgtcaaggacctcaactccgggttgattggagccttgttggtatgcagggaaggatctcttgccaaagagaagacacagaccctggccaagtttatccttctctttgctgtgttcgatgagggcaaaagttggcatagcgaaacgaagaattccctcatgcaggatcgcgacgcagccagcgccagagcttggcccaagatgcacactgtgaacggatatgtcaataggacgcttcctggcttgattgggtgtcatcggaaaagtgtctactggcacgtgatcggaatggggacaacaccagaggtccactccatatttctcgaaggccataccttccttgttcgaaaccacagacaggcatccttggggatctctcccattacctttctcactgcccaaacgggtcttcgtgacttgggtcagttccttctcttttgccatatcccgtcacaccagcatgatggtatggaagcttatgtgaaagtcgacagttgtcctgaggagccacagttgcgcatgaagaataatgaagaagccgaggattacgacgacgatctcaccgattctgagatggacgtggtgaggtttgatgacgacaactctccctccatcattcaagctcggagcggggcgaagaaacaccccaagacttgggtccactatatagcggcggaagaggaggattgggattacgctcctcttgtattggcaccagatgaccgctcatacaaaagccagtacctcaacaacggaccgcagagaattggccggaagtataagaaagtgcgatttatggcctatacagacgaaacctttaagacaagggaggccatccagcatgagagtgggattttgggacctcttctttacggcgaagttggtgataccctcctcatcatcttcaagaatcaagcttctcgcccctataacatttacccacacgggatcactgacgttaggcctttgtatagcagaagacttcccaaaggcgtgaagcatctcaaagacttccccattttgccaggcgagatctttaagtacaaatggaccattacagtggaagatggaccgactaaatcagaccctcgatgccttacgcggtactattcctccttcgtgaattgggagagagatttggcaagcggactcataggaccactcctcatctgttacaaggaatctgtagaccagaggggtaaccagattatgagtgataaacgcaatgtgatcctttttagcgtcttcgacgagaaccggtcctggtacttgaccgagaatatacaaaggttccttcccaaccccgcaggcgttcagttggaagaccctgagtttcaggccagcaatattatgcactcaatcaacggctatgtgtttgatagtctccagctttctgtttgcctccatgaagtagcctattggtacatcttgtcaattggtgctcaaacagacttcctctccgtcttcttctccggctacacctttaagcacaagggcgtgtatgaggacactctcacactctttccattttctggagaaaccgtgttcatgagtatggagaatccaggcctttggatcttgggttgccacaacagtgattttcgcaatcggggaatgactgctctcctcaaagtcagcagctgtgattggaacacaggcgactatgaggaagattcttacgaggacataagtgcctactttgactccaagaataacgccattgagcccagatcattctcccagaatcctcccgtgcttaaaaggcatcagcgcgaaggtaccagaactactcttcagtctgatcaagaggagattgactatgacgacaccattagcgtggaaatgaagaaggaggatttcgatatctatgacgaagatgagaaccagtctccgcggagctttcagaagaagacgcgacactacttcattgcagcagtcgaaaggctttgggactacggtatgtcatcatcccctcatgtgttgcgcaatagagctcagagtggaagtgttccacagttcaagaaagtcgtctttcaagagtttacagatggcagcttcacacagcctctctatcggggcgagcttaacgaacatttgggactccttggtccctatatccgagccgaagtggaggacaacattatggttacctttaggaatcaagcctctcgcccctacagcttctactcctccctcatcagttatgaggaggatcagagacaaggcgctgaaccacggaagaactttgtgaaaccgaatgagacgaagacctacttctggaaagtacagcaccacatggcccccacaaaagacgaattcgattgcaaagcatgggcgtatttttcagacgttgacttggagaaagatgtacattcaggacttattggtcctttgttggtgtgtcacactaacactctcaatccagcccatggcaggcaggtgacagtccaggaattcgctcttttctttaccatctttgatgagaccaagtcctggtacttcacggaaaacatggagcgcaattgcagagccccctgtaacatacagatggaggaccctacctttaaggaaaattatcggttccacgcaatcaacggatacattatggatacactccctggccttgtgatggctcaggaccaacgaatcaggtggtacctcctcagcatgggttctaatgagaacatacactccattcacttttcaggacatgtgttcactgtccggaagaaagaagagtataagatggccctctacaatttgtatccaggcgtgtttgagaccgttgaaatgcttccctctaaagctggcatctggagagtagagtgcttgatcggagaacatcttcacgcaggtatgagcaccttgttcctcgtgtacagcaacaaatgtcagaatccacttggcatggccagtggacacattcgcgactttcagatcacagcatctggccagtatggacaatgggccccaaagttggctcgcctccattactccggtagcataaatgcgtggtccactaaagaacctttcagctggattaaggtcgatcttcttgcccccatgatcatccacggcattaagacacagggagcgaggcagaaattctcctccctctacatctcacagttcattattatgtatagtttggacggcaagaagtggcaaacttatagaggtaacagtactggaacagacatggtgttcttcggcaacgttgatagctctggcatcaaacacaacatctttaatcctcccataatagctcggtacatcagattgcatccgacccactacagcattaggagtacactccgaatggagcttatgggttgcgacttgaattcctgttcaatgccactcggaatggagtctaaagccatctctgatgcacagataaccgccagtagctactttacgaacatgtttgctacgtggtcaccctctaaggcaaggcttcatttgcaaggccggtctaatgcctggagacctcaggtgaacaacccgaaagaatggctccaggtggactttcagaagaccatgaaagtaacaggtgtcactactcagggagttaagtccttggatactagcatgtatgtgaaggagttccttatttcctcatcacaagatggccaccagtggaccctcttctttcagaatggtaaggtcaaagtgtttcagggcaatcaagacagcttcacacccgtggtgaacagtcttgatcctccactcttgacacgataccttcgaatccatccacagtcttgggagcaccagattgcattgcgcatggaagtacttggatgcgaggctcaggacctctac

SEQ ID NO: 2074 - protein, 1457 aa, synthetic construct
  REGION 1..1457: note = Variant of human B-domain deleted Factor VIII
MQIELSTCFFLCLLRFCFSATRRYYLGAVELSWDYMQSDLGELPVDARFPPRVPKSFPFNTSQVYKKTLFVEFTDHLFNIAKPRPPWMGLLGPTIQAEVYDTVVITLKNMASHPVSLHAVGVSYWKASEGAEYDDQTSQREKEDDKVFPGGSHTYVWQVLKENGPMGSDPPCLTYSYLSHVDLVKDLNSGLIGALLVCREGSLAKEKTQTLAKFILLFAVFDEGKSWHSETKNSLMQDRDAASARAWPKMHTVNGYVNRTLPGLIGCHRKSVYWHVIGMGTTPEVHSIFLEGHTFLVRNHRQASLGISPITFLTAQTGLRDLGQFLLFCHIPSHQHDGMEAYVKVDSCPEEPQLRMKNNEEAEDYDDDLTDSEMDVVRFDDDNSPSIIQARSGAKKHPKTWVHYIAAEEEDWDYAPLVLAPDDRSYKSQYLNNGPQRIGRKYKKVRFMAYTDETFKTREAIQHESGILGPLLYGEVGDTLLIIFKNQASRPYNIYPHGITDVRPLYSRRLPKGVKHLKDFPILPGEIFKYKWTITVEDGPTKSDPRCLTRYYSSFVNWERDLASGLIGPLLICYKESVDQRGNQIMSDKRNVILFSVFDENRSWYLTENIQRFLPNPAGVQLEDPEFQASNIMHSINGYVFDSLQLSVCLHEVAYWYILSIGAQTDFLSVFFSGYTFKHKGVYEDTLTLFPFSGETVFMSMENPGLWILGCHNSDFRNRGMTALLKVSSCDWNTGDYEEDSYEDISAYFDSKNNAIEPRSFSQNPPVLKRHQREGTRTTLQSDQEEIDYDDTISVEMKKEDFDIYDEDENQSPRSFQKKTRHYFIAAVERLWDYGMSSSPHVLRNRAQSGSVPQFKKVVFQEFTDGSFTQPLYRGELNEHLGLLGPYIRAEVEDNIMVTFRNQASRPYSFYSSLISYEEDQRQGAEPRKNFVKPNETKTYFWKVQHHMAPTKDEFDCKAWAYFSDVDLEKDVHSGLIGPLLVCHTNTLNPAHGRQVTVQEFALFFTIFDETKSWYFTENMERNCRAPCNIQMEDPTFKENYRFHAINGYIMDTLPGLVMAQDQRIRWYLLSMGSNENIHSIHFSGHVFTVRKKEEYKMALYNLYPGVFETVEMLPSKAGIWRVECLIGEHLHAGMSTLFLVYSNKCQNPLGMASGHIRDFQITASGQYGQWAPKLARLHYSGSINAWSTKEPFSWIKVDLLAPMIIHGIKTQGARQKFSSLYISQFIIMYSLDGKKWQTYRGNSTGTDMVFFGNVDSSGIKHNIFNPPIIARYIRLHPTHYSIRSTLRMELMGCDLNSCSMPLGMESKAISDAQITASSYFTNMFATWSPSKARLHLQGRSNAWRPQVNNPKEWLQVDFQKTMKVTGVTTQGVKSLDTSMYVKEFLISSSQDGHQWTLFFQNGKVKVFQGNQDSFTPVVNSLDPPLLTRYLRIHPQSWEHQIALRMEVLGCEAQDLY

SEQ ID NO: 2075 - DNA, 4371 bp, synthetic construct
  misc_feature 1..4371: note = Variant of human B-domain deleted Factor VIII
  source 1..4371: mol_type = other DNA
atgcagattgaactgtctacctgcttcttcctctgtttgctgaggttctgctttagcgccactagacggtactaccttggcgctgtggagctgtcctgggactatatgcagagtgatttgggagagcttcccgtcgacgcacgatttcctcctcgcgttccaaagtcatttccctttaacacaagccaggtgtacaagaagacgctcttcgtcgaattcaccgatcacctgttcaatatcgccaaacccagaccaccatggatgggtcttttggggcctaccatacaagcggaggtgtatgacacagttgttatcactctcaagaacatggcttctcatccggtaagtcttcacgcagtgggcgtgtcctactggaaagcttcagaaggagccgagtatgatgatcagacatcccagagggagaaagaagacgacaaggtatttccaggtgggtctcatacctatgtgtggcaagtgctcaaagagaatggccctatgggcagcgatccgccgtgtttgacttacagctacctgtcacacgttgacctcgtcaaggacctcaactccgggttgattggagccttgttggtatgcagggaaggatctcttgccaaagagaagacacagaccctggccaagtttatccttctctttgctgtgttcgatgagggcaaaagttggcatagcgaaacgaagaattccctcatgcaggatcgcgacgcagccagcgccagagcttggcccaagatgcacactgtgaacggatatgtcaataggacgcttcctggcttgattgggtgtcatcggaaaagtgtctactggcacgtgatcggaatggggacaacaccagaggtccactccatatttctcgaaggccataccttccttgttcgaaaccacagacaggcatccttggggatctctcccattacctttctcactgcccaaacgggtcttcgtgacttgggtcagttccttctcttttgccatatcccgtcacaccagcatgatggtatggaagcttatgtgaaagtcgacagttgtcctgaggagccacagttgcgcatgaagaataatgaagaagccgaggattacgacgacgatctcaccgattctgagatggacgtggtgaggtttgatgacgacaactctccctccatcattcaagctcggagcggggcgaagaaacaccccaagacttgggtccactatatagcggcggaagaggaggattgggattacgctcctcttgtattggcaccagatgaccgctcatacaaaagccagtacctcaacaacggaccgcagagaattggccggaagtataagaaagtgcgatttatggcctatacagacgaaacctttaagacaagggaggccatccagcatgagagtgggattttgggacctcttctttacggcgaagttggtgataccctcctcatcatcttcaagaatcaagcttctcgcccctataacatttacccacacgggatcactgacgttaggcctttgtatagcagaagacttcccaaaggcgtgaagcatctcaaagacttccccattttgccaggcgagatctttaagtacaaatggaccattacagtggaagatggaccgactaaatcggaccctcgatgccttacgcggtactattcctccttcgtgaattgggagagagatttggcaagcggactcataggaccactcctcatctgttacaaggaatctgtagaccagaggggtaaccagattatgagtgataaacgcaatgtgatcctttttagcgtcttcgacgagaaccggtcctggtacttgaccgagaatatacaaaggttccttcccaaccccgcaggcgttcagttggaagaccctgagtttcaggccagcaatattatgcactcaatcaacggctatgtgtttgatagtctccagctttctgtttgcctccatgaagtagcctattggtacatcttgtcaattggtgctcaaacagacttcctctccgtcttcttctccggctacacctttaagcacaagggcgtgtatgaggacactctcacactctttccattttctggagaaaccgtgttcatgagtatggagaatccaggcctttggatcttgggttgccacaacagtgattttcgcaatcggggaatgactgctctcctcaaagtcagcagctgtgattggaacacaggcgactattatgaggattcttacgaggacataagtgcctactttgactccaagaataacgccattgagcccagatcattctcccagaatcctcccgtgcttaaaaggcatcagcgcgaaggtaccagaactactcttcagtctgatcaagaggagattgactatgacgacaccattagcgtggaaatgaagaaggaggatttcgatatctatgacgaagatgagaaccagtctccgcggagctttcagaagaagacgcgacactacttcattgcagcagtcgaaaggctttgggactacggtatgtcatcatcccctcatgtgttgcgcaatagagctcagagtggaagtgttccacagttcaagaaagtcgtctttcaagagtttacagatggcagcttcacacagcctctctatcggggcgagcttaacgaacatttgggactccttggtccctatatccgagccgaagtggaggacaacattatggttacctttaggaatcaagcctctcgcccctacagcttctactcctccctcatcagttatgaggaggatcagagacaaggcgctgaaccacggaagaactttgtgaaaccgaatgagacgaagacctacttctggaaagtacagcaccacatggcccccacaaaagacgaattcgattgcaaagcatgggcgtatttttcagacgttgacttggagaaagatgtacattcaggacttattggtcctttgttggtgtgtcacactaacactctcaatccagcccatggcaggcaggtgacagtccaggaattcgctcttttctttaccatctttgatgagaccaagtcctggtacttcacggaaaacatggagcgcaattgcagagccccctgtaacatacagatggaggaccctacctttaaggaaaattatcggttccacgcaatcaacggatacattatggatacactccctggccttgtgatggctcaggaccaacgaatcaggtggtacctcctcagcatgggttctaatagtaacatacactccattcacttttcaggacatgtgttcactgtccggaagggggaagagtataagatggccctctacaatttgtatccaggcgtgtttgagaccgttgaaatgcttccctctaaagctggcatctggagagtagagtgcttgatcggagaacatcttcacgcaggtatgagcaccttgttcctcgtgtacagcaacaaatgtcagaatccacttggcatggccagtggacacattcgcgactttcagatcacagcatctggccagtatggacaatgggccccaaagttggctcgcctccattactccggtagcataaatgcgtggtccactaaagaacctttcagctggattaaggtcgatcttcttgcccccatgatcatccacggcattaagacacagggagcgaggcagaaattctcctccctctacatctcacagttcattattatgtatagtttggacggcaagaagtggcaaacttatagaggtaacagtactggaacagacatggtgttcttcggcaacgttgatagctctggcatcaaacacaacatctttaatcctcccataatagctcggtacatcagattgcatccgacccactacagcattaggagtacactccgaatggagcttatgggttgcgacttgaattcctgttcaatgccactcggaatggagtctaaagccatctctgatgcacagataaccgccagtagctactttacgaacatgtttgctacgtggtcaccctctaaggcaaggcttcatttgcaaggccggtctaatgcctggagacctcaggtgaacaacccgaaagaatggctccaggtggactttcagaagaccatgaaagtaacaggtgtcactactcagggagttaagtccttggatactagcatgtatgtgaaggagttccttatttcctcatcacaagatggccaccagtggaccctcttctttcagaatggtaaggtcaaagtgtttcagggcaatcaagacagcttcacacccgtggtgaacagtcttgatcctccactcttgacacgataccttcgaatccatccacagtcttgggagcaccagattgcattgcgcatggaagtacttggatgcgaggctcaggacctctac

SEQ ID NO: 2076 - protein, 1457 aa, synthetic construct
  REGION 1..1457: note = Variant of human B-domain deleted Factor VIII
MQIELSTCFFLCLLRFCFSATRRYYLGAVELSWDYMQSDLGELPVDARFPPRVPKSFPFNTSQVYKKTLFVEFTDHLFNIAKPRPPWMGLLGPTIQAEVYDTVVITLKNMASHPVSLHAVGVSYWKASEGAEYDDQTSQREKEDDKVFPGGSHTYVWQVLKENGPMGSDPPCLTYSYLSHVDLVKDLNSGLIGALLVCREGSLAKEKTQTLAKFILLFAVFDEGKSWHSETKNSLMQDRDAASARAWPKMHTVNGYVNRTLPGLIGCHRKSVYWHVIGMGTTPEVHSIFLEGHTFLVRNHRQASLGISPITFLTAQTGLRDLGQFLLFCHIPSHQHDGMEAYVKVDSCPEEPQLRMKNNEEAEDYDDDLTDSEMDVVRFDDDNSPSIIQARSGAKKHPKTWVHYIAAEEEDWDYAPLVLAPDDRSYKSQYLNNGPQRIGRKYKKVRFMAYTDETFKTREAIQHESGILGPLLYGEVGDTLLIIFKNQASRPYNIYPHGITDVRPLYSRRLPKGVKHLKDFPILPGEIFKYKWTITVEDGPTKSDPRCLTRYYSSFVNWERDLASGLIGPLLICYKESVDQRGNQIMSDKRNVILFSVFDENRSWYLTENIQRFLPNPAGVQLEDPEFQASNIMHSINGYVFDSLQLSVCLHEVAYWYILSIGAQTDFLSVFFSGYTFKHKGVYEDTLTLFPFSGETVFMSMENPGLWILGCHNSDFRNRGMTALLKVSSCDWNTGDYYEDSYEDISAYFDSKNNAIEPRSFSQNPPVLKRHQREGTRTTLQSDQEEIDYDDTISVEMKKEDFDIYDEDENQSPRSFQKKTRHYFIAAVERLWDYGMSSSPHVLRNRAQSGSVPQFKKVVFQEFTDGSFTQPLYRGELNEHLGLLGPYIRAEVEDNIMVTFRNQASRPYSFYSSLISYEEDQRQGAEPRKNFVKPNETKTYFWKVQHHMAPTKDEFDCKAWAYFSDVDLEKDVHSGLIGPLLVCHTNTLNPAHGRQVTVQEFALFFTIFDETKSWYFTENMERNCRAPCNIQMEDPTFKENYRFHAINGYIMDTLPGLVMAQDQRIRWYLLSMGSNSNIHSIHFSGHVFTVRKGEEYKMALYNLYPGVFETVEMLPSKAGIWRVECLIGEHLHAGMSTLFLVYSNKCQNPLGMASGHIRDFQITASGQYGQWAPKLARLHYSGSINAWSTKEPFSWIKVDLLAPMIIHGIKTQGARQKFSSLYISQFIIMYSLDGKKWQTYRGNSTGTDMVFFGNVDSSGIKHNIFNPPIIARYIRLHPTHYSIRSTLRMELMGCDLNSCSMPLGMESKAISDAQITASSYFTNMFATWSPSKARLHLQGRSNAWRPQVNNPKEWLQVDFQKTMKVTGVTTQGVKSLDTSMYVKEFLISSSQDGHQWTLFFQNGKVKVFQGNQDSFTPVVNSLDPPLLTRYLRIHPQSWEHQIALRMEVLGCEAQDLY

SEQ ID NO: 2077 - DNA, 4371 bp, synthetic construct
  misc_feature 1..4371: note = Variant of human B-domain deleted Factor VIII
  source 1..4371: mol_type = other DNA
atgcagattgaactgtctacctgcttcttcctctgtttgctgaggttctgctttagcgccactagacggtactaccttggcgctgtggagctgtcctgggactatatgcagagtgatttgggagagcttcccgtcgacgcacgatttcctcctcgcgttccaaagtcatttccctttaacacaagccaggtgtacaagaagacgctcttcgtcgaattcaccgatcacctgttcaatatcgccaaacccagaccaccatggatgggtcttttggggcctaccatacaagcggaggtgtatgacacagttgttatcactctcaagaacatggcttctcatccggtaagtcttcacgcagtgggcgtgtcctactggaaagcttcagaaggagccgagtatgatgatcagacatcccagagggagaaagaagacgacaaggtatttccaggtgggtctcatacctatgtgtggcaagtgctcaaagagaatggccctatgggcagcgatccgccgtgtttgacttacagctacctttcacacgttgacctcgtcaaggacctcaactccgggttgattggagccttgttggtatgcagggaaggatctcttgccaaagagaagacacagaccctggccaagtttatccttctctttgctgtgttcgatgagggcaaaagttggcatagcgaaacgaagaattccctcatgcaggatcgcgacgcagccagcgccagagcttggcccaagatgcacactgtgaacggatatgtcaataggacgcttcctggcttgattgggtgtcatcggaaaagtgtctactggcacgtgatcggaatggggacaacaccagaggtccactccatatttctcgaaggccataccttccttgttcgaaaccacagacaggcatccttggggatctctcccattacctttctcactgcccaaacgggtcttcgtgacttgggtcagttccttctcttttgccatatcccgtcacaccagcatgatggtatggaagcttatgtgaaagtcgacagttgtcctgaggagccacagttgcgcatgaagaataatgaagaagccgaggattacgacgacgatctcaccgattctgagatggacgtggtgaggtttgatgacgacaactctccctccatcattcaagctcggagcggggcgaagaaacaccccaagacttgggtccactatatagcggcggaagaggaggattgggattacgctcctcttgtattggcaccagatgaccgctcatacaaaagccagtacctcaacaacggaccgcagagaattggccggaagtataagaaagtgcgatttatggcctatacagacgaaacctttaagacaagggaggccatccagcatgagagtgggattttgggacctcttctttacggcgaagttggtgataccctcctcatcatcttcaagaatcaagcttctcgcccctataacatttacccacacgggatcactgacgttaggcctttgtatagcagaagacttcccaaaggcgtgaagcatctcaaagacttccccattttgccaggcgagatctttaagtacaaatggaccattacagtggaagatggaccgactaaatcagaccctcgatgccttacgcggtactattcctccttcgtgaattgggagagagatttggcaagcggactcataggaccactcctcatctgttacaaggaatctgtagaccagaggggtaaccagattatgagtgataaacgcaatgtgatcctttttagcgtcttcgacgagaaccggtcctggtacttgaccgagaatatacaaaggttccttcccaaccccgcaggcgttcagttggaagaccctgagtttcaggccagcaatattatgcactcaatcaacggctatgtgtttgatagtctccagctttctgtttgcctccatgaagtagcctattggtacatcttgtcaattggtgctcaaacagacttcctctccgtcttcttctccggctacacctttaagcacaagggcgtgtatgaggacactctcacactctttccattttctggagaaaccgtgttcatgagcatggagaatccaggcctttggatcttgggttgccacaacagtgattttcgcaatcggggaatgactgctctcctcaaagtcagcagctgtgattggaacacaggcgactattatgaggattcttacgaggacataagtgcctactttgactccgagaataacgccattgagcccagatcattctcccagaatcctcccgtgcttaaaaggcatcagcgcgaaggtaccagaactactcttcagtctgatcaagaggagattgactatgacgacaccattagcgtggaaatgaagaaggtagatttcgatatccaggacgagtcggggaaccagtctccgcggagctttcagaagaagacgcgacactacttcattgcagcagtcgaaaggctttgggactacggtatgtcatcatcccctcatgtgttgcgcaatagagctcagagtggaagtgttccacagttcaagaaagtcgtctttcaagagtttacagatggcagcttcacacagcctctctatcggggcgagcttaacgaacatttgggactccttggtccctatatccgagccgaagtggaggacaacattatggttacctttaggaatcaagcctctcgcccctacagcttctactcctccctcatcagttatgaggaggatcagagacaaggcgctgaaccacggaagaactttgtgaaaccgaatgagacgaagacctacttctggaaagtacagcaccacatggcccccacaaaagacgaattcgattgcaaagcatgggcgtatttttcagacgttgacttggagaaagatgtacattcaggacttattggtcctttgttggtgtgtcacactaacactctcaatccagcccatggcaggcaggtgacagtccaggaattcgctcttttctttaccatctttgatgagaccaagtcctggtacttcacggaaaacatggagcgcaattgcagagccccctgtaacatacagatggaggaccctacctttaaggaaaattatcggttccacgcaatcaacggatacattatggatacactccctggccttgtgatggctcaggaccaacgaatcaggtggtacctcctcagcatgggttctaatgaaaacatacactccattcacttttcaggacatgtgttcactgtccggaagaaagaagagtataagatggccctctacaatttgtatccaggcgtgtttgagaccgttgaaatgcttcccattaaagctggcatctggagagtagagtgcttgatcggagaacatcttcacgcaggtatgagcaccttgttcctcgtgtacagcaacaaatgtcagaatccacttggcatggccagtggacacattcgcgactttcagatcacagcatctggccagtatggacaatgggccccaaagttggctcgcctccattactccggtagcataaatgcgtggtccactaaagaacctttcagctggattaaggtcgatcttcttgcccccatgatcatccacggcattaagacacagggagcgaggcagaaattctcctccctctacatctcacagttcattattatgtatagtttggacggcaagaagtggcaaacttatagaggtaacagtactggaacagacatggtgttcttcggcaacgttgatagctctggcatcaaacacaacatctttaatcctcccataatagctcggtacatcagattgcatccgacccactacagcattaggagtacactccgaatggagcttatgggttgcgacttgaattcctgttcaatgccactcggaatggagtctaaagccatctctgatgcacagataaccgccagtagctactttacgaacatgtttgctacgtggtcaccctctaaggcaaggcttcatttgcaaggccggtctaatgcctggagacctcaggtgaacaacccgaaagaatggctccaggtggactttcagaagaccatgaaagtaacaggtgtcactactcagggagttaagtccttggatactagcatgtatgtgaaggagttccttatttcctcatcacaagatggccaccagtggaccctcttctttcagaatggtaaggtcaaagtgtttcagggcaatcaagacagcttcacacccgtggtgaacagtcttgatcctccactcttgacacgataccttcgaatccatccacagtcttgggagcaccagattgcattgcgcatggaagtacttggatgcgaggctcaggacctctac

SEQ ID NO: 2078 - protein, 1457 aa, synthetic construct
  REGION 1..1457: note = Variant of human B-domain deleted Factor VIII
MQIELSTCFFLCLLRFCFSATRRYYLGAVELSWDYMQSDLGELPVDARFPPRVPKSFPFNTSQVYKKTLFVEFTDHLFNIAKPRPPWMGLLGPTIQAEVYDTVVITLKNMASHPVSLHAVGVSYWKASEGAEYDDQTSQREKEDDKVFPGGSHTYVWQVLKENGPMGSDPPCLTYSYLSHVDLVKDLNSGLIGALLVCREGSLAKEKTQTLAKFILLFAVFDEGKSWHSETKNSLMQDRDAASARAWPKMHTVNGYVNRTLPGLIGCHRKSVYWHVIGMGTTPEVHSIFLEGHTFLVRNHRQASLGISPITFLTAQTGLRDLGQFLLFCHIPSHQHDGMEAYVKVDSCPEEPQLRMKNNEEAEDYDDDLTDSEMDVVRFDDDNSPSIIQARSGAKKHPKTWVHYIAAEEEDWDYAPLVLAPDDRSYKSQYLNNGPQRIGRKYKKVRFMAYTDETFKTREAIQHESGILGPLLYGEVGDTLLIIFKNQASRPYNIYPHGITDVRPLYSRRLPKGVKHLKDFPILPGEIFKYKWTITVEDGPTKSDPRCLTRYYSSFVNWERDLASGLIGPLLICYKESVDQRGNQIMSDKRNVILFSVFDENRSWYLTENIQRFLPNPAGVQLEDPEFQASNIMHSINGYVFDSLQLSVCLHEVAYWYILSIGAQTDFLSVFFSGYTFKHKGVYEDTLTLFPFSGETVFMSMENPGLWILGCHNSDFRNRGMTALLKVSSCDWNTGDYYEDSYEDISAYFDSENNAIEPRSFSQNPPVLKRHQREGTRTTLQSDQEEIDYDDTISVEMKKVDFDIQDESGNQSPRSFQKKTRHYFIAAVERLWDYGMSSSPHVLRNRAQSGSVPQFKKVVFQEFTDGSFTQPLYRGELNEHLGLLGPYIRAEVEDNIMVTFRNQASRPYSFYSSLISYEEDQRQGAEPRKNFVKPNETKTYFWKVQHHMAPTKDEFDCKAWAYFSDVDLEKDVHSGLIGPLLVCHTNTLNPAHGRQVTVQEFALFFTIFDETKSWYFTENMERNCRAPCNIQMEDPTFKENYRFHAINGYIMDTLPGLVMAQDQRIRWYLLSMGSNENIHSIHFSGHVFTVRKKEEYKMALYNLYPGVFETVEMLPIKAGIWRVECLIGEHLHAGMSTLFLVYSNKCQNPLGMASGHIRDFQITASGQYGQWAPKLARLHYSGSINAWSTKEPFSWIKVDLLAPMIIHGIKTQGARQKFSSLYISQFIIMYSLDGKKWQTYRGNSTGTDMVFFGNVDSSGIKHNIFNPPIIARYIRLHPTHYSIRSTLRMELMGCDLNSCSMPLGMESKAISDAQITASSYFTNMFATWSPSKARLHLQGRSNAWRPQVNNPKEWLQVDFQKTMKVTGVTTQGVKSLDTSMYVKEFLISSSQDGHQWTLFFQNGKVKVFQGNQDSFTPVVNSLDPPLLTRYLRIHPQSWEHQIALRMEVLGCEAQDLY

SEQ ID NO: 2079 - DNA, 4371 bp, synthetic construct
  misc_feature 1..4371: note = Variant of human B-domain deleted Factor VIII
  source 1..4371: mol_type = other DNA
atgcagattgaactgtctacctgcttcttcctctgtttgctgaggttctgctttagcgccactagacggtactaccttggcgctgtggagctgtcctgggactatatgcagagtgatttgggagagcttcccgtcgacgcacgatttcctcctcgcgttccaaagtcatttccctttaacacaagccaggtgtacaagaagacgctcttcgtcgaattcaccgatcacctgttcaatatcgccaaacccagaccaccatggatgggtcttttggggcctaccatacaagcggaggtgtatgacacagttgttatcactctcaagaacatggcttctcatccggtaagtcttcacgcagtgggcgtgtcctactggaaagcttcagaaggagccgagtatgatgatcagacatcccagagggagaaagaagacgacaaggtatttccaggtgggtctcatacctatgtgtggcaagtgctcaaagagaatggccctatgggcagcgatccgccgtgtttgacttacagctacctttcacacgttgacctcgtcaaggacctcaactccgggttgattggagccttgttggtatgcagggaaggatctcttgccaaagagaagacacagaccctggccaagtttatccttctctttgctgtgttcgatgagggcaaaagttggcatagcgaaacgaagaattccctcatgcaggatcgcgacgcagccagcgccagagcttggcccaagatgcacactgtgaacggatatgtcaataggacgcttcctggcttgattgggtgtcatcggaaaagtgtctactggcacgtgatcggaatggggacaacaccagaggtccactccatatttctcgaaggccataccttccttgttcgaaaccacagacaggcatccttggggatctctcccattacctttctcactgcccaaacgggtcttcgtgacttgggtcagttccttctcttttgccatatcccgtcacaccagcatgatggtatggaagcttatgtgaaagtcgacagttgtcctgaggagccacagttgcgcatgaagaataatgaagaagccgaggattacgacgacgatctcaccgattctgagatggacgtggtgaggtttgatgacgacaactctccctccatcattcaagctcggagcggggcgaagaaacaccccaagacttgggtccactatatagcggcggaagaggaggattgggattacgctcctcttgtattggcaccagatgaccgctcatacaaaagccagtacctcaacaacggaccgcagagaattggccggaagtataagaaagtgcgatttatggcctatacagacgaaacctttaagacaagggaggccatccagcatgagagtgggattttgggacctcttctttacggcgaagttggtgataccctcctcatcatcttcaagaatcaagcttctcgcccctataacatttacccacacgggatcactgacgttaggcctttgtatagcagaagacttcccaaaggcgtgaagcatctcaaagacttccccattttgccaggcgagatctttaagtacaaatggaccattacagtggaagatggaccgactaaatcggaccctcgatgccttacgcggtactattcctccttcgtgaattgggagagagatttggcaagcggactcataggaccactcctcatctgttacaaggaatctgtagaccagaggggtaaccagattatgagtgataaacgcaatgtgatcctttttagcgtcttcgacgagaaccggtcctggtacttgaccgagaatatacaaaggttccttcccaaccccgcaggcgttcagttggaagaccctgagtttcaggccagcaatattatgcactcaatcaacggctatgtgtttgatagtctccagctttctgtttgcctccatgaagtagcctattggtacatcttgtcaattggtgctcaaacagacttcctctccgtcttcttctccggctacacctttaagcacaagggcgtgtatgaggacactctcacactctttccattttctggagaaaccgtgttcatgagtatggagaatccaggcctttggatcttgggttgccacaacagtgattttcgcaatcggggaatgactgctctcctcaaagtcagcagctgtgattggaacacaggcgactatgaggaagattcttacgaggacataagtgcctactttgactccaagaataacgccattgagcccagatcattctcccagaatcctcccgtgcttaaaaggcatcagcgcgaaggtaccagaactactcttcagtctgatcaagaggagattgactatgacgacaccattagcgtggaaatgaagaaggtagatttcgatatctacgacgaggacgggaaccagtctccgcggagctttcagaagaagacgcgacactacttcattgcagcagtcgaaaggctttgggactacggtatgtcatcatcccctcatgtgttgcgcaatagagctcagagtggaagtgttccacagttcaagaaagtcgtctttcaagagtttacagatggcagcttcacacagcctctctatcggggcgagcttaacgaacatttgggactccttggtccctatatccgagccgaagtggaggacaacattatggttacctttaggaatcaagcctctcgcccctacagcttctactcctccctcatcagttatgaggaggatcagagacaaggcgctgaaccacggaagaactttgtgaaaccgaatgagacgaagacctacttctggaaagtacagcaccacatggcccccacaaaagacgaattcgattgcaaagcatgggcgtatttttcagacgttgacttggagaaagatgtacattcaggacttattggtcctttgttggtgtgtcacactaacactctcaatccagcccatggcaggcaggtgacagtccaggaattcgctcttttctttaccatctttgatgagaccaagtcctggtacttcacggaaaacatggagcgcaattgcagagccccctgtaacatacagatggaggaccctacctttaaggaaaattatcggttccacgcaatcaacggatacattatggatacactccctggccttgtgatggctcaggaccaacgaatcaggtggtacctcctcagcatgggttctaatagtaacatacactccattcacttttcaggacatgtgttcactgtccggaagaaagaagagtataagatggccctctacaatttgtatccaggcgtgtttgagaccgttgaaatgcttcccagtaaagctggcatctggagagtagagtgcttgatcggagaacatcttcacgcaggtatgagcaccttgttcctcgtgtacagcaacaaatgtcagaatccacttggcatggccagtggacacattcgcgactttcagatcacagcatctggccagtatggacaatgggccccaaagttggctcgcctccattactccggtagcataaatgcgtggtccactaaagaacctttcagctggattaaggtcgatcttcttgcccccatgatcatccacggcattaagacacagggagcgaggcagaaattctcctccctctacatctcacagttcattattatgtatagtttggacggcaagaagtggcaaacttatagaggtaacagtactggaacagacatggtgttcttcggcaacgttgatagctctggcatcaaacacaacatctttaatcctcccataatagctcggtacatcagattgcatccgacccactacagcattaggagtacactccgaatggagcttatgggttgcgacttgaattcctgttcaatgccactcggaatggagtctaaagccatctctgatgcacagataaccgccagtagctactttacgaacatgtttgctacgtggtcaccctctaaggcaaggcttcatttgcaaggccggtctaatgcctggagacctcaggtgaacaacccgaaagaatggctccaggtggactttcagaagaccatgaaagtaacaggtgtcactactcagggagttaagtccttggatactagcatgtatgtgaaggagttccttatttcctcatcacaagatggccaccagtggaccctcttctttcagaatggtaaggtcaaagtgtttcagggcaatcaagacagcttcacacccgtggtgaacagtcttgatcctccactcttgacacgataccttcgaatccatccacagtcttgggagcaccagattgcattgcgcatggaagtacttggatgcgaggctcaggacctctac

SEQ ID NO: 2080 - protein, 1457 aa, synthetic construct
  REGION 1..1457: note = Variant of human B-domain deleted Factor VIII
MQIELSTCFFLCLLRFCFSATRRYYLGAVELSWDYMQSDLGELPVDARFPPRVPKSFPFNTSQVYKKTLFVEFTDHLFNIAKPRPPWMGLLGPTIQAEVYDTVVITLKNMASHPVSLHAVGVSYWKASEGAEYDDQTSQREKEDDKVFPGGSHTYVWQVLKENGPMGSDPPCLTYSYLSHVDLVKDLNSGLIGALLVCREGSLAKEKTQTLAKFILLFAVFDEGKSWHSETKNSLMQDRDAASARAWPKMHTVNGYVNRTLPGLIGCHRKSVYWHVIGMGTTPEVHSIFLEGHTFLVRNHRQASLGISPITFLTAQTGLRDLGQFLLFCHIPSHQHDGMEAYVKVDSCPEEPQLRMKNNEEAEDYDDDLTDSEMDVVRFDDDNSPSIIQARSGAKKHPKTWVHYIAAEEEDWDYAPLVLAPDDRSYKSQYLNNGPQRIGRKYKKVRFMAYTDETFKTREAIQHESGILGPLLYGEVGDTLLIIFKNQASRPYNIYPHGITDVRPLYSRRLPKGVKHLKDFPILPGEIFKYKWTITVEDGPTKSDPRCLTRYYSSFVNWERDLASGLIGPLLICYKESVDQRGNQIMSDKRNVILFSVFDENRSWYLTENIQRFLPNPAGVQLEDPEFQASNIMHSINGYVFDSLQLSVCLHEVAYWYILSIGAQTDFLSVFFSGYTFKHKGVYEDTLTLFPFSGETVFMSMENPGLWILGCHNSDFRNRGMTALLKVSSCDWNTGDYEEDSYEDISAYFDSKNNAIEPRSFSQNPPVLKRHQREGTRTTLQSDQEEIDYDDTISVEMKKVDFDIYDEDGNQSPRSFQKKTRHYFIAAVERLWDYGMSSSPHVLRNRAQSGSVPQFKKVVFQEFTDGSFTQPLYRGELNEHLGLLGPYIRAEVEDNIMVTFRNQASRPYSFYSSLISYEEDQRQGAEPRKNFVKPNETKTYFWKVQHHMAPTKDEFDCKAWAYFSDVDLEKDVHSGLIGPLLVCHTNTLNPAHGRQVTVQEFALFFTIFDETKSWYFTENMERNCRAPCNIQMEDPTFKENYRFHAINGYIMDTLPGLVMAQDQRIRWYLLSMGSNSNIHSIHFSGHVFTVRKKEEYKMALYNLYPGVFETVEMLPSKAGIWRVECLIGEHLHAGMSTLFLVYSNKCQNPLGMASGHIRDFQITASGQYGQWAPKLARLHYSGSINAWSTKEPFSWIKVDLLAPMIIHGIKTQGARQKFSSLYISQFIIMYSLDGKKWQTYRGNSTGTDMVFFGNVDSSGIKHNIFNPPIIARYIRLHPTHYSIRSTLRMELMGCDLNSCSMPLGMESKAISDAQITASSYFTNMFATWSPSKARLHLQGRSNAWRPQVNNPKEWLQVDFQKTMKVTGVTTQGVKSLDTSMYVKEFLISSSQDGHQWTLFFQNGKVKVFQGNQDSFTPVVNSLDPPLLTRYLRIHPQSWEHQIALRMEVLGCEAQDLY

SEQ ID NO: 2081 - DNA, 4371 bp, synthetic construct
  misc_feature 1..4371: note = Variant of human B-domain deleted Factor VIII
  source 1..4371: mol_type = other DNA
atgcagattgaactgtctacctgcttcttcctctgtttgctgaggttctgctttagcgccactagacggtactaccttggcgctgtggagctgtcctgggactatatgcagagtgatttgggagagcttcccgtcgacgcacgatttcctcctcgcgttccaaagtcatttccctttaacacaagccaggtgtacaagaagacgctcttcgtcgaattcaccgatcacctgttcaatatcgccaaacccagaccaccatggatgggtcttttggggcctaccatacaagcggaggtgtatgacacagttgttatcactctcaagaacatggcttctcatccggtaagtcttcacgcagtgggcgtgtcctactggaaagcttcagaaggagccgagtatgatgatcagacatcccagagggagaaagaagacgacaaggtatttccaggtgggtctcatacctatgtgtggcaagtgctcaaagagaatggccctatgggcagcgatccgccgtgtttgacttacagctacctttcacacgttgacctcgtcaaggacctcaactccgggttgattggagccttgttggtatgcagggaaggatctcttgccaaagagaagacacagaccctggccaagtttatccttctctttgctgtgttcgatgagggcaaaagttggcatagcgaaacgaagaattccctcatgcaggatcgcgacgcagccagcgccagagcttggcccaagatgcacactgtgaacggatatgtcaataggacgcttcctggcttgattgggtgtcatcggaaaagtgtctactggcacgtgatcggaatggggacaacaccagaggtccactccatatttctcgaaggccataccttccttgttcgaaaccacagacaggcatccttggggatctctcccattacctttctcactgcccaaacgctgcttcgtgacttgggtcagttccttctcttttgccatatcccgtcacaccagcatgatggtatggaagcttatgtgaaagtcgacagttgtcctgaggagccacagttgcgcatgaagaataatgaagaagccgaggattacgacgacgatctcaccgattctgagatggacgtggtgaggtttgatgacgacaactctccctccatcattcaagctcggagcggggcgaagaaacaccccaagacttgggtccactatatagcggcggaagaggaggattgggattacgctcctcttgtattggcaccagatgaccgctcatacaaaagccagtacctcaacaacggaccgcagagaattggccggaagtataagaaagtgcgatttatggcctatacagacgaaacctttaagacaagggaggccatccagcatgagagtgggattttgggacctcttctttacggcgaagttggtgataccctcctcatcatcttcaagaatcaagcttctcgcccctataacatttacccacacgggatcactgacgttaggcctttgtatagcagaagacttcccaaaggcgtgaagcatctcaaagacttccccattttgccaggcgagatctttaagtacaaatggaccattacagtggaagatggaccgactaaatcggaccctcgatgccttacgcggtactattcctccttcgtgaattgggagagagatttggcaagcggactcataggaccactcctcatctgttacaaggaatctgtagaccagaggggtaaccagattatgagtgataaacgcaatgtgatcctttttagcgtcttcgacgagaaccggtcctggtacttgaccgagaatatacaaaggttccttcccaaccccgcaggcgttcagttggaagaccctgagtttcaggccagcaatattatgcactcaatcaacggctatgtgtttgatagtctccagctttctgtttgcctccatgaagtagcctattggtacatcttgtcaattggtgctcaaacagacttcctctccgtcttcttctccggctacacctttaagcacaagggcgtgtatgaggacactctcacactctttccattttctggagaaaccgtgttcatgagtatggagaatccaggcctttggatcttgggttgccacaacagtgattttcgcaatcggggaatgactgctctcctcaaagtcagcagctgtgattggaacacaggcgactatgaagaggattcttacgaggacataagtgcctactttgactccaagaataacgccattgagcccagatcattctcccagaatcctcccgtgcttaaaaggcatcagcgcgaaggtaccagaactactcttcagtctgatcaagaggagattgactatgacgacaccattagcgtggaaatgaagaaggaggatttcgatatctatgacgaagatgagaaccagtctccgcggagctttcagaagaagacgcgacactacttcattgcagcagtcgaaaggctttgggactacggtatgtcatcatcccctcatgtgttgcgcaatagagctcagagtggaagtgttccacagttcaagaaagtcgtctttcaagagtttacagatggcagcttcacacagcctctctatcggggcgagcttaacgaacatttgggactccttggtccctatatccgagccgaagtggaggacaacattatggttacctttaggaatcaagcctctcgcccctacagcttctactcctccctcatcagttatgaggaggatcagagacaaggcgctgaaccacggaagaactttgtgaaaccgaatgagacgaagacctacttctggaaagtacagcaccacatggcccccacaaaagacgaattcgattgcaaagcatgggcgtatttttcagacgttgacttggagaaagatgtacattcaggacttattggtcctttgttggtgtgtcacactaacactctcaatccagcccatggcaggcaggtgacagtccaggaattcgctcttttctttaccatctttgatgagaccaagtcctggtacttcacggaaaacatggagcgcaattgcagagccccctgtaacatacagatggaggaccctacctttaaggaaaattatcggttccacgcaatcaacggatacattatggatacactccctggccttgtgatggctcaggaccaacgaatcaggtggtacctcctcagcatgggttctaatgagaacatacactccattcacttttcaggacatgtgttcactgtccggaagaaagaagagtataagatggccctctacaatttgtatccaggcgtgtttgagaccgttgaaatgcttccctctaaagctggcatctggagagtagagtgcttgatcggagaacatcttcacgcaggtatgagcaccttgttcctcgtgtacagcaacaaatgtcagaatccacttggcatggccagtggacacattcgcgactttcagatcacagcatctggccagtatggacaatgggccccaaagttggctcgcctccattactccggtagcataaatgcgtggtccactaaagaacctttcagctggattaaggtcgatcttcttgcccccatgatcatccacggcattaagacacagggagcgaggcagaaattctcctccctctacatctcacagttcattattatgtatagtttggacggcaagaagtggcaaacttatagaggtaacagtactggaacagacatggtgttcttcggcaacgttgatagctctggcatcaaacacaacatctttaatcctcccataatagctcggtacatcagattgcatccgacccactacagcattaggagtacactccgaatggagcttatgggttgcgacttgaattcctgttcaatgccactcggaatggagtctaaagccatctctgatgcacagataaccgccagtagctactttacgaacatgtttgctacgtggtcaccctctaaggcaaggcttcatttgcaaggccggtctaatgcctggagacctcaggtgaacaacccgaaagaatggctccaggtggactttcagaagaccatgaaagtaacaggtgtcactactcagggagttaagtccttggatactagcatgtatgtgaaggagttccttatttcctcatcacaagatggccaccagtggaccctcttctttcagaatggtaaggtcaaagtgtttcagggcaatcaagacagcttcacacccgtggtgaacagtcttgatcctccactcttgacacgataccttcgaatccatccacagtcttgggagcaccagattgcattgcgcatggaagtacttggatgcgaggctcaggacctctac

SEQ ID NO: 2082 - protein, 1457 aa, synthetic construct
  REGION 1..1457: note = Variant of human B-domain deleted Factor VIII
MQIELSTCFFLCLLRFCFSATRRYYLGAVELSWDYMQSDLGELPVDARFPPRVPKSFPFNTSQVYKKTLFVEFTDHLFNIAKPRPPWMGLLGPTIQAEVYDTVVITLKNMASHPVSLHAVGVSYWKASEGAEYDDQTSQREKEDDKVFPGGSHTYVWQVLKENGPMGSDPPCLTYSYLSHVDLVKDLNSGLIGALLVCREGSLAKEKTQTLAKFILLFAVFDEGKSWHSETKNSLMQDRDAASARAWPKMHTVNGYVNRTLPGLIGCHRKSVYWHVIGMGTTPEVHSIFLEGHTFLVRNHRQASLGISPITFLTAQTLLRDLGQFLLFCHIPSHQHDGMEAYVKVDSCPEEPQLRMKNNEEAEDYDDDLTDSEMDVVRFDDDNSPSIIQARSGAKKHPKTWVHYIAAEEEDWDYAPLVLAPDDRSYKSQYLNNGPQRIGRKYKKVRFMAYTDETFKTREAIQHESGILGPLLYGEVGDTLLIIFKNQASRPYNIYPHGITDVRPLYSRRLPKGVKHLKDFPILPGEIFKYKWTITVEDGPTKSDPRCLTRYYSSFVNWERDLASGLIGPLLICYKESVDQRGNQIMSDKRNVILFSVFDENRSWYLTENIQRFLPNPAGVQLEDPEFQASNIMHSINGYVFDSLQLSVCLHEVAYWYILSIGAQTDFLSVFFSGYTFKHKGVYEDTLTLFPFSGETVFMSMENPGLWILGCHNSDFRNRGMTALLKVSSCDWNTGDYEEDSYEDISAYFDSKNNAIEPRSFSQNPPVLKRHQREGTRTTLQSDQEEIDYDDTISVEMKKEDFDIYDEDENQSPRSFQKKTRHYFIAAVERLWDYGMSSSPHVLRNRAQSGSVPQFKKVVFQEFTDGSFTQPLYRGELNEHLGLLGPYIRAEVEDNIMVTFRNQASRPYSFYSSLISYEEDQRQGAEPRKNFVKPNETKTYFWKVQHHMAPTKDEFDCKAWAYFSDVDLEKDVHSGLIGPLLVCHTNTLNPAHGRQVTVQEFALFFTIFDETKSWYFTENMERNCRAPCNIQMEDPTFKENYRFHAINGYIMDTLPGLVMAQDQRIRWYLLSMGSNENIHSIHFSGHVFTVRKKEEYKMALYNLYPGVFETVEMLPSKAGIWRVECLIGEHLHAGMSTLFLVYSNKCQNPLGMASGHIRDFQITASGQYGQWAPKLARLHYSGSINAWSTKEPFSWIKVDLLAPMIIHGIKTQGARQKFSSLYISQFIIMYSLDGKKWQTYRGNSTGTDMVFFGNVDSSGIKHNIFNPPIIARYIRLHPTHYSIRSTLRMELMGCDLNSCSMPLGMESKAISDAQITASSYFTNMFATWSPSKARLHLQGRSNAWRPQVNNPKEWLQVDFQKTMKVTGVTTQGVKSLDTSMYVKEFLISSSQDGHQWTLFFQNGKVKVFQGNQDSFTPVVNSLDPPLLTRYLRIHPQSWEHQIALRMEVLGCEAQDLY

SEQ ID NO: 2083 - DNA, 4371 bp, synthetic construct
  misc_feature 1..4371: note = Variant of human B-domain deleted Factor VIII
  source 1..4371: mol_type = other DNA
atgcagattgaactgtctacctgcttcttcctctgtttgctgaggttctgctttagcgccactagacggtactaccttggcgctgtggagctgtcctgggactatatgcagagtgatttgggagagcttcccgtcgacgcacgatttcctcctcgcgttccaaagtcatttccctttaacacaagccaggtgtacaagaagacgctcttcgtcgaattcaccgatcacctgttcaatatcgccaaacccagaccaccatggatgggtcttttggggcctaccatacaagcggaggtgtatgacacagttgttatcactctcaagaacatggcttctcatccggtaagtcttcacgcagtgggcgtgtcctactggaaagcttcagaaggagccgagtatgatgatcagacatcccagagggagaaagaagacgacaaggtatttccaggtgggtctcatacctatgtgtggcaagtgctcaaagagaatggccctatgggcagcgatccgccgtgtttgacttacagctacctttcacacgttgacctcgtcaaggacctcaactccgggttgattggagccttgttggtatgcagggaaggatctcttgccaaagagaagacacagaccctggccaagtttatccttctctttgctgtgttcgatgagggcaaaagttggcatagcgaaacgaagaattccctcatgcaggatcgcgacgcagccagcgccagagcttggcccaagatgcacactgtgaacggatatgtcaataggacgcttcctggcttgattgggtgtcatcggaaaagtgtctactggcacgtgatcggaatggggacaacaccagaggtccactccatatttctcgaaggccataccttccttgttcgaaaccacagacaggcatccttggggatctctcccattacctttctcactgcccaaacgctgcttcgtgacttgggtcagttccttctcttttgccatatcccgtcacaccagcatgatggtatggaagcttatgtgaaagtcgacagttgtcctgaggagccacagttgcgcatgaagaataatgaagaagccgaggattacgacgacgatctcaccgattctgagatggacgtggtgaggtttgatgacgacaactctccctccatcattcaagctcggagcggggcgaagaaacaccccaagacttgggtccactatatagcggcggaagaggaggattgggattacgctcctcttgtattggcaccagatgaccgctcatacaaaagccagtacctcaacaacggaccgcagagaattggccggaagtataagaaagtgcgatttatggcctatacagacgaaacctttaagacaagggaggccatccagcatgagagtgggattttgggacctcttctttacggcgaagttggtgataccctcctcatcatcttcaagaatcaagcttctcgcccctataacatttacccacacgggatcactgacgttaggcctttgtatagcagaagacttcccaaaggcgtgaagcatctcaaagacttccccattttgccaggcgagatctttaagtacaaatggaccattacagtggaagatggaccgactaaatcggaccctcgatgccttacgcggtactattcctccttcgtgaattgggagagagatttggcaagcggactcataggaccactcctcatctgttacaaggaatctgtagaccagaggggtaaccagattatgagtgataaacgcaatgtgatcctttttagcgtcttcgacgagaaccggtcctggtacttgaccgagaatatacaaaggttccttcccaaccccgcaggcgttcagttggaagaccctgagtttcaggccagcaatattatgcactcaatcaacggctatgtgtttgatagtctccagctttctgtttgcctccatgaagtagcctattggtacatcttgtcaattggtgctcaaacagacttcctctccgtcttcttctccggctacacctttaagcacaagggcgtgtatgaggacactctcacactctttccattttctggagaaaccgtgttcatgagtatggagaatccaggcctttggatcttgggttgccacaacagtgattttcgcaatcggggaatgactgctctcctcaaagtcagcagctgtgattggaacacaggcgactatgaggaagattcttacgaggacataagtgcctactttgactccaagaataacgccattgagcccagatcattctcccagaatcctcccgtgcttaaaaggcatcagcgcgaaggtaccagaactactcttcagtctgatcaagaggagattgactatgacgacaccattagcgtggaaatgaagaaggtagatttcgatatccaggacgagtcggggaaccagtctccgcggagctttcagaagaagacgcgacactacttcattgcagcagtcgaaaggctttgggactacggtatgtcatcatcccctcatgtgttgcgcaatagagctcagagtggaagtgttccacagttcaagaaagtcgtctttcaagagtttacagatggcagcttcacacagcctctctatcggggcgagcttaacgaacatttgggactccttggtccctatatccgagccgaagtggaggacaacattatggttacctttaggaatcaagcctctcgcccctacagcttctactcctccctcatcagttatgaggaggatcagagacaaggcgctgaaccacggaagaactttgtgaaaccgaatgagacgaagacctacttctggaaagtacagcaccacatggcccccacaaaagacgaattcgattgcaaagcatgggcgtatttttcagacgttgacttggagaaagatgtacattcaggacttattggtcctttgttggtgtgtcacactaacactctcaatccagcccatggcaggcaggtgacagtccaggaattcgctcttttctttaccatctttgatgagaccaagtcctggtacttcacggaaaacatggagcgcaattgcagagccccctgtaacatacagatggaggaccctacctttaaggaaaattatcggttccacgcaatcaacggatacattatggatacactccctggccttgtgatggctcaggaccaacgaatcaggtggtacctcctcagcatgggttctaatgagaacatacactccattcacttttcaggacatgtgttcactgtccggaagaaagaagagtataagatggccctctacaatttgtatccaggcgtgtttgagaccgttgaaatgcttccctctaaagctggcatctggagagtagagtgcttgatcggagaacatcttcacgcaggtatgagcaccttgttcctcgtgtacagcaacaaatgtcagaatccacttggcatggccagtggacacattcgcgactttcagatcacagcatctggccagtatggacaatgggccccaaagttggctcgcctccattactccggtagcataaatgcgtggtccactaaagaacctttcagctggattaaggtcgatcttcttgcccccatgatcatccacggcattaagacacagggagcgaggcagaaattctcctccctctacatctcacagttcattattatgtatagtttggacggcaagaagtggcaaacttatagaggtaacagtactggaacagacatggtgttcttcggcaacgttgatagctctggcatcaaacacaacatctttaatcctcccataatagctcggtacatcagattgcatccgacccactacagcattaggagtacactccgaatggagcttatgggttgcgacttgaattcctgttcaatgccactcggaatggagtctaaagccatctctgatgcacagataaccgccagtagctactttacgaacatgtttgctacgtggtcaccctctaaggcaaggcttcatttgcaaggccggtctaatgcctggagacctcaggtgaacaacccgaaagaatggctccaggtggactttcagaagaccatgaaagtaacaggtgtcactactcagggagttaagtccttggatactagcatgtatgtgaaggagttccttatttcctcatcacaagatggccaccagtggaccctcttctttcagaatggtaaggtcaaagtgtttcagggcaatcaagacagcttcacacccgtggtgaacagtcttgatcctccactcttgacacgataccttcgaatccatccacagtcttgggagcaccagattgcattgcgcatggaagtacttggatgcgaggctcaggacctctac

SEQ ID NO: 2084 - protein, 1457 aa, synthetic construct
  REGION 1..1457: note = Variant of human B-domain deleted Factor VIII
MQIELSTCFFLCLLRFCFSATRRYYLGAVELSWDYMQSDLGELPVDARFPPRVPKSFPFNTSQVYKKTLFVEFTDHLFNIAKPRPPWMGLLGPTIQAEVYDTVVITLKNMASHPVSLHAVGVSYWKASEGAEYDDQTSQREKEDDKVFPGGSHTYVWQVLKENGPMGSDPPCLTYSYLSHVDLVKDLNSGLIGALLVCREGSLAKEKTQTLAKFILLFAVFDEGKSWHSETKNSLMQDRDAASARAWPKMHTVNGYVNRTLPGLIGCHRKSVYWHVIGMGTTPEVHSIFLEGHTFLVRNHRQASLGISPITFLTAQTLLRDLGQFLLFCHIPSHQHDGMEAYVKVDSCPEEPQLRMKNNEEAEDYDDDLTDSEMDVVRFDDDNSPSIIQARSGAKKHPKTWVHYIAAEEEDWDYAPLVLAPDDRSYKSQYLNNGPQRIGRKYKKVRFMAYTDETFKTREAIQHESGILGPLLYGEVGDTLLIIFKNQASRPYNIYPHGITDVRPLYSRRLPKGVKHLKDFPILPGEIFKYKWTITVEDGPTKSDPRCLTRYYSSFVNWERDLASGLIGPLLICYKESVDQRGNQIMSDKRNVILFSVFDENRSWYLTENIQRFLPNPAGVQLEDPEFQASNIMHSINGYVFDSLQLSVCLHEVAYWYILSIGAQTDFLSVFFSGYTFKHKGVYEDTLTLFPFSGETVFMSMENPGLWILGCHNSDFRNRGMTALLKVSSCDWNTGDYEEDSYEDISAYFDSKNNAIEPRSFSQNPPVLKRHQREGTRTTLQSDQEEIDYDDTISVEMKKVDFDIQDESGNQSPRSFQKKTRHYFIAAVERLWDYGMSSSPHVLRNRAQSGSVPQFKKVVFQEFTDGSFTQPLYRGELNEHLGLLGPYIRAEVEDNIMVTFRNQASRPYSFYSSLISYEEDQRQGAEPRKNFVKPNETKTYFWKVQHHMAPTKDEFDCKAWAYFSDVDLEKDVHSGLIGPLLVCHTNTLNPAHGRQVTVQEFALFFTIFDETKSWYFTENMERNCRAPCNIQMEDPTFKENYRFHAINGYIMDTLPGLVMAQDQRIRWYLLSMGSNENIHSIHFSGHVFTVRKKEEYKMALYNLYPGVFETVEMLPSKAGIWRVECLIGEHLHAGMSTLFLVYSNKCQNPLGMASGHIRDFQITASGQYGQWAPKLARLHYSGSINAWSTKEPFSWIKVDLLAPMIIHGIKTQGARQKFSSLYISQFIIMYSLDGKKWQTYRGNSTGTDMVFFGNVDSSGIKHNIFNPPIIARYIRLHPTHYSIRSTLRMELMGCDLNSCSMPLGMESKAISDAQITASSYFTNMFATWSPSKARLHLQGRSNAWRPQVNNPKEWLQVDFQKTMKVTGVTTQGVKSLDTSMYVKEFLISSSQDGHQWTLFFQNGKVKVFQGNQDSFTPVVNSLDPPLLTRYLRIHPQSWEHQIALRMEVLGCEAQDLY

SEQ ID NO: 2085 - DNA, 4371 bp, synthetic construct
  misc_feature 1..4371: note = Variant of human B-domain deleted Factor VIII
  source 1..4371: mol_type = other DNA
atgcagattgaactgtctacctgcttcttcctctgtttgctgaggttctgctttagcgccactagacggtactaccttggcgctgtggagctgtcctgggactatatgcagagtgatttgggagagcttcccgtcgacgcacgatttcctcctcgcgttccaaagtcatttccctttaacacaagccaggtgtacaagaagacgctcttcgtcgaattcaccgatcacctgttcaatatcgccaaacccagaccaccatggatgggtcttttggggcctaccatacaagcggaggtgtatgacacagttgttatcactctcaagaacatggcttctcatccggtaagtcttcacgcagtgggcgtgtcctactggaaagcttcagaaggagccgagtatgatgatcagacatcccagagggagaaagaagacgacaaggtatttccaggtgggtctcatacctatgtgtggcaagtgctcaaagagaatggccctatgggcagcgatccgccgtgtttgacttacagctacctttcacacgttgacctcgtcaaggacctcaactccgggttgattggagccttgttggtatgcagggaaggatctcttgccaaagagaagacacagaccctggccaagtttatccttctctttgctgtgttcgatgagggcaaaagttggcatagcgaaacgaagaattccctcatgcaggatcgcgacgcagccagcgccagagcttggcccaagatgcacactgtgaacggatatgtcaataggacgcttcctggcttgattgggtgtcatcggaaaagtgtctactggcacgtgatcggaatggggacaacaccagaggtccactccatatttctcgaaggccataccttccttgttcgaaaccacagacaggcatccttggggatctctcccattacctttctcactgcccaaacgctgcttcgtgacttgggtcagttccttctcttttgccatatcccgtcacaccagcatgatggtatggaagcttatgtgaaagtcgacagttgtcctgaggagccacagttgcgcatgaagaataatgaagaagccgaggattacgacgacgatctcaccgattctgagatggacgtggtgaggtttgatgacgacaactctccctccatcattcaagctcggagcggggcgaagaaacaccccaagacttgggtccactatatagcggcggaagaggaggattgggattacgctcctcttgtattggcaccagatgaccgctcatacaaaagccagtacctcaacaacggaccgcagagaattggccggaagtataagaaagtgcgatttatggcctatacagacgaaacctttaagacaagggaggccatccagcatgagagtgggattttgggacctcttctttacggcgaagttggtgataccctcctcatcatcttcaagaatcaagcttctcgcccctataacatttacccacacgggatcactgacgttaggcctttgtatagcagaagacttcccaaaggcgtgaagcatctcaaagacttccccattttgccaggcgagatctttaagtacaaatggaccattacagtggaagatggaccgactaaatcagaccctcgatgccttacgcggtactattcctccttcgtgaattgggagagagatttggcaagcggactcataggaccactcctcatctgttacaaggaatctgtagaccagaggggtaaccagattatgagtgataaacgcaatgtgatcctttttagcgtcttcgacgagaaccggtcctggtacttgaccgagaatatacaaaggttccttcccaaccccgcaggcgttcagttggaagaccctgagtttcaggccagcaatattatgcactcaatcaacggctatgtgtttgatagtctccagctttctgtttgcctccatgaagtagcctattggtacatcttgtcaattggtgctcaaacagacttcctctccgtcttcttctccggctacacctttaagcacaagaacgtgtatgaggacactctcacactctttccattttctggagaaaccgtgttcatgagcatggagaatccaggcctttggatcttgggttgccacaacagtgattttcgcaatcggggaatgactgctctcctcaaagtcagcagctgtgattggaacacaggcgactatgaggaagattcttacgaggacataagtgcctactttgactccaagaataacgccattgagcccagatcattctcccagaatcctcccgtgcttaaaaggcatcagcgcgaaggtaccagaactactcttcagtctgatcaagaggagattgactatgacgacaccattagcgtggaaatgaagaaggaggatttcgatatctatgacgaagatgagaaccagtctccgcggagctttcagaagaagacgcgacactacttcattgcagcagtcgaaaggctttgggactacggtatgtcatcatcccctcatgtgttgcgcaatagagctcagagtggaagtgttccacagttcaagaaagtcgtctttcaagagtttacagatggcagcttcacacagcctctctatcggggcgagcttaacgaacatttgggactccttggtccctatatccgagccgaagtggaggacaacattatggttacctttaggaatcaagcctctcgcccctacagcttctactcctccctcatcagttatgaggaggatcagagacaaggcgctgaaccacggaagaactttgtgaaaccgaatgagacgaagacctacttctggaaagtacagcaccacatggcccccacaaaagacgaattcgattgcaaagcatgggcgtatttttcagacgttgacttggagaaagatgtacattcaggacttattggtcctttgttggtgtgtcacactaacactctcaatccagcccatggcaggcaggtgacagtccaggaattcgctcttttctttaccatctttgatgagaccaagtcctggtacttcacggaaaacatggagcgcaattgcagagccccctgtaacatacagatggaggaccctacctttaaggaaaattatcggttccacgcaatcaacggatacattatggatacactccctggccttgtgatggctcaggaccaacgaatcaggtggtacctcctcagcatgggttctaatgagaacatacactccattcacttttcaggacatgtgttcactgtccggaagaaagaagagtataagatggccctctacaatttgtatccaggcgtgtttgagaccgttgaaatgcttccctctaaagctggcatctggagagtagagtgcttgatcggagaacatcttcacgcaggtatgagcaccttgttcctcgtgtacagcaacaaatgtcagaatccacttggcatggccagtggacacattcgcgactttcagatcacagcatctggccagtatggacaatgggccccaaagttggctcgcctccattactccggtagcataaatgcgtggtccactaaagaacctttcagctggattaaggtcgatcttcttgcccccatgatcatccacggcattaagacacagggagcgaggcagaaattctcctccctctacatctcacagttcattattatgtatagtttggacggcaagaagtggcaaacttatagaggtaacagtactggaacagacatggtgttcttcggcaacgttgatagctctggcatcaaacacaacatctttaatcctcccataatagctcggtacatcagattgcatccgacccactacagcattaggagtacactccgaatggagcttatgggttgcgacttgaattcctgttcaatgccactcggaatggagtctaaagccatctctgatgcacagataaccgccagtagctactttacgaacatgtttgctacgtggtcaccctctaaggcaaggcttcatttgcaaggccggtctaatgcctggagacctcaggtgaacaacccgaaagaatggctccaggtggactttcagaagaccatgaaagtaacaggtgtcactactcagggagttaagtccttggatactagcatgtatgtgaaggagttccttatttcctcatcacaagatggccaccagtggaccctcttctttcagaatggtaaggtcaaagtgtttcagggcaatcaagacagcttcacacccgtggtgaacagtcttgatcctccactcttgacacgataccttcgaatccatccacagtcttgggagcaccagattgcattgcgcatggaagtacttggatgcgaggctcaggacctctac

SEQ ID NO: 2086 - protein, 1457 aa, synthetic construct
  REGION 1..1457: note = Variant of human B-domain deleted Factor VIII
MQIELSTCFFLCLLRFCFSATRRYYLGAVELSWDYMQSDLGELPVDARFPPRVPKSFPFNTSQVYKKTLFVEFTDHLFNIAKPRPPWMGLLGPTIQAEVYDTVVITLKNMASHPVSLHAVGVSYWKASEGAEYDDQTSQREKEDDKVFPGGSHTYVWQVLKENGPMGSDPPCLTYSYLSHVDLVKDLNSGLIGALLVCREGSLAKEKTQTLAKFILLFAVFDEGKSWHSETKNSLMQDRDAASARAWPKMHTVNGYVNRTLPGLIGCHRKSVYWHVIGMGTTPEVHSIFLEGHTFLVRNHRQASLGISPITFLTAQTLLRDLGQFLLFCHIPSHQHDGMEAYVKVDSCPEEPQLRMKNNEEAEDYDDDLTDSEMDVVRFDDDNSPSIIQARSGAKKHPKTWVHYIAAEEEDWDYAPLVLAPDDRSYKSQYLNNGPQRIGRKYKKVRFMAYTDETFKTREAIQHESGILGPLLYGEVGDTLLIIFKNQASRPYNIYPHGITDVRPLYSRRLPKGVKHLKDFPILPGEIFKYKWTITVEDGPTKSDPRCLTRYYSSFVNWERDLASGLIGPLLICYKESVDQRGNQIMSDKRNVILFSVFDENRSWYLTENIQRFLPNPAGVQLEDPEFQASNIMHSINGYVFDSLQLSVCLHEVAYWYILSIGAQTDFLSVFFSGYTFKHKNVYEDTLTLFPFSGETVFMSMENPGLWILGCHNSDFRNRGMTALLKVSSCDWNTGDYEEDSYEDISAYFDSKNNAIEPRSFSQNPPVLKRHQREGTRTTLQSDQEEIDYDDTISVEMKKEDFDIYDEDENQSPRSFQKKTRHYFIAAVERLWDYGMSSSPHVLRNRAQSGSVPQFKKVVFQEFTDGSFTQPLYRGELNEHLGLLGPYIRAEVEDNIMVTFRNQASRPYSFYSSLISYEEDQRQGAEPRKNFVKPNETKTYFWKVQHHMAPTKDEFDCKAWAYFSDVDLEKDVHSGLIGPLLVCHTNTLNPAHGRQVTVQEFALFFTIFDETKSWYFTENMERNCRAPCNIQMEDPTFKENYRFHAINGYIMDTLPGLVMAQDQRIRWYLLSMGSNENIHSIHFSGHVFTVRKKEEYKMALYNLYPGVFETVEMLPSKAGIWRVECLIGEHLHAGMSTLFLVYSNKCQNPLGMASGHIRDFQITASGQYGQWAPKLARLHYSGSINAWSTKEPFSWIKVDLLAPMIIHGIKTQGARQKFSSLYISQFIIMYSLDGKKWQTYRGNSTGTDMVFFGNVDSSGIKHNIFNPPIIARYIRLHPTHYSIRSTLRMELMGCDLNSCSMPLGMESKAISDAQITASSYFTNMFATWSPSKARLHLQGRSNAWRPQVNNPKEWLQVDFQKTMKVTGVTTQGVKSLDTSMYVKEFLISSSQDGHQWTLFFQNGKVKVFQGNQDSFTPVVNSLDPPLLTRYLRIHPQSWEHQIALRMEVLGCEAQDLY

SEQ ID NO: 2087 - DNA, 4371 bp, synthetic construct
  misc_feature 1..4371: note = Variant of human B-domain deleted Factor VIII
  source 1..4371: mol_type = other DNA
atgcagattgaactgtctacctgcttcttcctctgtttgctgaggttctgctttagcgccactagacggtactaccttggcgctgtggagctgtcctgggactatatgcagagtgatttgggagagcttcccgtcgacgcacgatttcctcctcgcgttccaaagtcatttccctttaacacaagccaggtgtacaagaagacgctcttcgtcgaattcaccgatcacctgttcaatatcgccaaacccagaccaccatggatgggtcttttggggcctaccatacaagcggaggtgtatgacacagttgttatcactctcaagaacatggcttctcatccggtaagtcttcacgcagtgggcgtgtcctactggaaagcttcagaaggagccgagtatgatgatcagacatcccagagggagaaagaagacgacaaggtatttccaggtgggtctcatacctatgtgtggcaagtgctcaaagagaatggccctatgggcagcgatccgccgtgtttgacttacagctacctttcacacgttgacctcgtcaaggacctcaactccgggttgattggagccttgttggtatgcagggaaggatctcttgccaaagagaagacacagaccctggccaagtttatccttctctttgctgtgttcgatgagggcaaaagttggcatagcgaaacgaagaattccctcatgcaggatcgcgacgcagccagcgccagagcttggcccaagatgcacactgtgaacggatatgtcaataggacgcttcctggcttgattgggtgtcatcggaaaagtgtctactggcacgtgatcggaatggggacaacaccagaggtccactccatatttctcgaaggccataccttccttgttcgaaaccacagacaggcatccttggggatctctcccattacctttctcactgcccaaacgctgcttcgtgacttgggtcagttccttctcttttgccatatcccgtcacaccagcatgatggtatggaagcttatgtgaaagtcgacagttgtcctgaggagccacagttgcgcatgaagaataatgaagaagccgaggattacgacgacgatctcaccgattctgagatggacgtggtgaggtttgatgacgacaactctccctccatcattcaagctcggagcggggcgaagaaacaccccaagacttgggtccactatatagcggcggaagaggaggattgggattacgctcctcttgtattggcaccagatgaccgctcatacaaaagccagtacctcaacaacggaccgcagagaattggccggaagtataagaaagtgcgatttatggcctatacagacgaaacctttaagacaagggaggccatccagcatgagagtgggattttgggacctcttctttacggcgaagttggtgataccctcctcatcatcttcaagaatcaagcttctcgcccctataacatttacccacacgggatcactgacgttaggcctttgtatagcagaagacttcccaaaggcgtgaagcatctcaaagacttccccattttgccaggcgagatctttaagtacaaatggaccattacagtggaagatggaccgactaaatcagaccctcgatgccttacgcggtactattcctccttcgtgaattgggagagagatttggcaagcggactcataggaccactcctcatctgttacaaggaatctgtagaccagaggggtaaccagattatgagtgataaacgcaatgtgatcctttttagcgtcttcgacgagaaccggtcctggtacttgaccgagaatatacaaaggttccttcccaaccccgcaggcgttcagttggaagaccctgagtttcaggccagcaatattatgcactcaatcaacggctatgtgtttgatagtctccagctttctgtttgcctccatgaagtagcctattggtacatcttgtcaattggtgctcaaacagacttcctctccgtcttcttctccggctacacctttaagcacaagaacgtgtatgaggacactctcacactctttccattttctggagaaaccgtgttcatggaaatggagaatccaggcctttggatcttgggttgccacaacagtgattttcgcaatcggggaatgactgctctcctcaaagtcagcagctgtgattggaacacaggcgactatgaggaagattcttacgaggacataagtgcctactttgactccaagaataacgccattgagcccagatcattctcccagaatcctcccgtgcttaaaaggcatcagcgcgaaggtaccagaactactcttcagtctgatcaagaggagattgactatgacgacaccattagcgtggaaatgaagaaggaagatttcgatatccaggacgagtcggggaaccagtctccgcggagctttcagaagaagacgcgacactacttcattgcagcagtcgaaaggctttgggactacggtatgtcatcatcccctcatgtgttgcgcaatagagctcagagtggaagtgttccacagttcaagaaagtcgtctttcaagagtttacagatggcagcttcacacagcctctctatcggggcgagcttaacgaacatttgggactccttggtccctatatccgagccgaagtggaggacaacattatggttacctttaggaatcaagcctctcgcccctacagcttctactcctccctcatcagttatgaggaggatcagagacaaggcgctgaaccacggaagaactttgtgaaaccgaatgagacgaagacctacttctggaaagtacagcaccacatggcccccacaaaagacgaattcgattgcaaagcatgggcgtatttttcagacgttgacttggagaaagatgtacattcaggacttattggtcctttgttggtgtgtcacactaacactctcaatccagcccatggcaggcaggtgacagtccaggaattcgctcttttctttaccatctttgatgagaccaagtcctggtacttcacggaaaacatggagcgcaattgcagagccccctgtaacatacagatggaggaccctacctttaaggaaaattatcggttccacgcaatcaacggatacattatggatacactccctggccttgtgatggctcaggaccaacgaatcaggtggtacctcctcagcatgggttctaatagtaacatacactccattcacttttcaggacatgtgttcactgtccggaagaaagaagagtataagatggccctctacaatttgtatccaggcgtgtttgagaccgttgaaatgcttcccattaaagctggcatctggagagtagagtgcttgatcggagaacatcttcacgcaggtatgagcaccttgttcctcgtgtacagcaacaaatgtcagaatccacttggcatggccagtggacacattcgcgactttcagatcacagcatctggccagtatggacaatgggccccaaagttggctcgcctccattactccggtagcataaatgcgtggtccactaaagaacctttcagctggattaaggtcgatcttcttgcccccatgatcatccacggcattaagacacagggagcgaggcagaaattctcctccctctacatctcacagttcattattatgtatagtttggacggcaagaagtggcaaacttatagaggtaacagtactggaacagacatggtgttcttcggcaacgttgatagctctggcatcaaacacaacatctttaatcctcccataatagctcggtacatcagattgcatccgacccactacagcattaggagtacactccgaatggagcttatgggttgcgacttgaattcctgttcaatgccactcggaatggagtctaaagccatctctgatgcacagataaccgccagtagctactttacgaacatgtttgctacgtggtcaccctctaaggcaaggcttcatttgcaaggccggtctaatgcctggagacctcaggtgaacaacccgaaagaatggctccaggtggactttcagaagaccatgaaagtaacaggtgtcactactcagggagttaagtccttggatactagcatgtatgtgaaggagttccttatttcctcatcacaagatggccaccagtggaccctcttctttcagaatggtaaggtcaaagtgtttcagggcaatcaagacagcttcacacccgtggtgaacagtcttgatcctccactcttgacacgataccttcgaatccatccacagtcttgggagcaccagattgcattgcgcatggaagtacttggatgcgaggctcaggacctctac

SEQ ID NO: 2088 - protein, 1457 aa, synthetic construct
  REGION 1..1457: note = Variant of human B-domain deleted Factor VIII
MQIELSTCFFLCLLRFCFSATRRYYLGAVELSWDYMQSDLGELPVDARFPPRVPKSFPFNTSQVYKKTLFVEFTDHLFNIAKPRPPWMGLLGPTIQAEVYDTVVITLKNMASHPVSLHAVGVSYWKASEGAEYDDQTSQREKEDDKVFPGGSHTYVWQVLKENGPMGSDPPCLTYSYLSHVDLVKDLNSGLIGALLVCREGSLAKEKTQTLAKFILLFAVFDEGKSWHSETKNSLMQDRDAASARAWPKMHTVNGYVNRTLPGLIGCHRKSVYWHVIGMGTTPEVHSIFLEGHTFLVRNHRQASLGISPITFLTAQTLLRDLGQFLLFCHIPSHQHDGMEAYVKVDSCPEEPQLRMKNNEEAEDYDDDLTDSEMDVVRFDDDNSPSIIQARSGAKKHPKTWVHYIAAEEEDWDYAPLVLAPDDRSYKSQYLNNGPQRIGRKYKKVRFMAYTDETFKTREAIQHESGILGPLLYGEVGDTLLIIFKNQASRPYNIYPHGITDVRPLYSRRLPKGVKHLKDFPILPGEIFKYKWTITVEDGPTKSDPRCLTRYYSSFVNWERDLASGLIGPLLICYKESVDQRGNQIMSDKRNVILFSVFDENRSWYLTENIQRFLPNPAGVQLEDPEFQASNIMHSINGYVFDSLQLSVCLHEVAYWYILSIGAQTDFLSVFFSGYTFKHKNVYEDTLTLFPFSGETVFMEMENPGLWILGCHNSDFRNRGMTALLKVSSCDWNTGDYEEDSYEDISAYFDSKNNAIEPRSFSQNPPVLKRHQREGTRTTLQSDQEEIDYDDTISVEMKKEDFDIQDESGNQSPRSFQKKTRHYFIAAVERLWDYGMSSSPHVLRNRAQSGSVPQFKKVVFQEFTDGSFTQPLYRGELNEHLGLLGPYIRAEVEDNIMVTFRNQASRPYSFYSSLISYEEDQRQGAEPRKNFVKPNETKTYFWKVQHHMAPTKDEFDCKAWAYFSDVDLEKDVHSGLIGPLLVCHTNTLNPAHGRQVTVQEFALFFTIFDETKSWYFTENMERNCRAPCNIQMEDPTFKENYRFHAINGYIMDTLPGLVMAQDQRIRWYLLSMGSNSNIHSIHFSGHVFTVRKKEEYKMALYNLYPGVFETVEMLPIKAGIWRVECLIGEHLHAGMSTLFLVYSNKCQNPLGMASGHIRDFQITASGQYGQWAPKLARLHYSGSINAWSTKEPFSWIKVDLLAPMIIHGIKTQGARQKFSSLYISQFIIMYSLDGKKWQTYRGNSTGTDMVFFGNVDSSGIKHNIFNPPIIARYIRLHPTHYSIRSTLRMELMGCDLNSCSMPLGMESKAISDAQITASSYFTNMFATWSPSKARLHLQGRSNAWRPQVNNPKEWLQVDFQKTMKVTGVTTQGVKSLDTSMYVKEFLISSSQDGHQWTLFFQNGKVKVFQGNQDSFTPVVNSLDPPLLTRYLRIHPQSWEHQIALRMEVLGCEAQDLY

SEQ ID NO: 2089 - DNA, 4371 bp, synthetic construct
  misc_feature 1..4371: note = Variant of human B-domain deleted Factor VIII
  source 1..4371: mol_type = other DNA
atgcagattgaactgtctacctgcttcttcctctgtttgctgaggttctgctttagcgccactagacggtactaccttggcgctgtggagctgtcctgggactatatgcagagtgatttgggagagcttcccgtcgacgcacgatttcctcctcgcgttccaaagtcatttccctttaacacaagccaggtgtacaagaagacgctcttcgtcgaattcaccgatcacctgttcaatatcgccaaacccagaccaccatggatgggtcttttggggcctaccatacaagcggaggtgtatgacacagttgttatcactctcaagaacatggcttctcatccggtaagtcttcacgcagtgggcgtgtcctactggaaagcttcagaaggagccgagtatgatgatcagacatcccagagggagaaagaagacgacaaggtatttccaggtgggtctcatacctatgtgtggcaagtgctcaaagagaatggccctatgggcagcgatccgccgtgtttgacttacagctacctttcacacgttgacctcgtcaaggacctcaactccgggttgattggagccttgttggtatgcagggaaggatctcttgccaaagagaagacacagaccctggccaagtttatccttctctttgctgtgttcgatgagggcaaaagttggcatagcgaaacgaagaattccctcatgcaggatcgcgacgcagccagcgccagagcttggcccaagatgcacactgtgaacggatatgtcaataggacgcttcctggcttgattgggtgtcatcggaaaagtgtctactggcacgtgatcggaatggggacaacaccagaggtccactccatatttctcgaaggccataccttccttgttcgaaaccacagacaggcatccttggggatctctcccattacctttctcactgcccaaacgctgcttcgtgacttgggtcagttccttctcttttgccatatcccgtcacaccagcatgatggtatggaagcttatgtgaaagtcgacagttgtcctgaggagccacagttgcgcatgaagaataatgaagaagccgaggattacgacgacgatctcaccgattctgagatggacgtggtgaggtttgatgacgacaactctccctccatcattcaagctcggagcggggcgaagaaacaccccaagacttgggtccactatatagcggcggaagaggaggattgggattacgctcctcttgtattggcaccagatgaccgctcatacaaaagccagtacctcaacaacggaccgcagagaattggccggaagtataagaaagtgcgatttatggcctatacagacgaaacctttaagacaagggaggccatccagcatgagagtgggattttgggacctcttctttacggcgaagttggtgataccctcctcatcatcttcaagaatcaagcttctcgcccctataacatttacccacacgggatcactgacgttaggcctttgtatagcagaagacttcccaaaggcgtgaagcatctcaaagacttccccattttgccaggcgagatctttaagtacaaatggaccattacagtggaagatggaccgactaaatcagaccctcgatgccttacgcggtactattcctccttcgtgaattgggagagagatttggcaagcggactcataggaccactcctcatctgttacaaggaatctgtagaccagaggggtaaccagattatgagtgataaacgcaatgtgatcctttttagcgtcttcgacgagaaccggtcctggtacttgaccgagaatatacaaaggttccttcccaaccccgcaggcgttcagttggaagaccctgagtttcaggccagcaatattatgcactcaatcaacggctatgtgtttgatagtctccagctttctgtttgcctccatgaagtagcctattggtacatcttgtcaattggtgctcaaacagacttcctctccgtcttcttctccggctacacctttaagcacaagggcgtgtatgaggacactctcacactctttccattttctggagaaaccgtgttcatggaaatggagaatccaggcctttggatcttgggttgccacaacagtgattttcgcaatcggggaatgactgctctcctcaaagtcagcagctgtgattggaacacaggcgactatgaggaagattcttacgaggacataagtgcctactttgactccaagaataacgccattgagcccagatcattctcccagaatcctcccgtgcttaaaaggcatcagcgcgaaggtaccagaactactcttcagtctgatcaagaggagattgactatgacgacaccattagcgtggaaatgaagaaggaggatttcgatatctatgacgaagatgagaaccagtctccgcggagctttcagaagaagacgcgacactacttcattgcagcagtcgaaaggctttgggactacggtatgtcatcatcccctcatgtgttgcgcaatagagctcagagtggaagtgttccacagttcaagaaagtcgtctttcaagagtttacagatggcagcttcacacagcctctctatcggggcgagcttaacgaacatttgggactccttggtccctatatccgagccgaagtggaggacaacattatggttacctttaggaatcaagcctctcgcccctacagcttctactcctccctcatcagttatgaggaggatcagagacaaggcgctgaaccacggaagaactttgtgaaaccgaatgagacgaagacctacttctggaaagtacagcaccacatggcccccacaaaagacgaattcgattgcaaagcatgggcgtatttttcagacgttgacttggagaaagatgtacattcaggacttattggtcctttgttggtgtgtcacactaacactctcaatccagcccatggcaggcaggtgacagtccaggaattcgctcttttctttaccatctttgatgagaccaagtcctggtacttcacggaaaacatggagcgcaattgcagagccccctgtaacatacagatggaggaccctacctttaaggaaaattatcggttccacgcaatcaacggatacattatggatacactccctggccttgtgatggctcaggaccaacgaatcaggtggtacctcctcagcatgggttctaatgaaaacatacactccattcacttttcaggacatgtgttcactgtccggaagaaagaagagtataagatggccctctacaatttgtatccaggcgtgtttgagaccgttgaaatgcttccctctaaagctggcatctggagagtagagtgcttgatcggagaacatcttcacgcaggtatgagcaccttgttcctcgtgtacagcaacaaatgtcagaatccacttggcatggccagtggacacattcgcgactttcagatcacagcatctggccagtatggacaatgggccccaaagttggctcgcctccattactccggtagcataaatgcgtggtccactaaagaacctttcagctggattaaggtcgatcttcttgcccccatgatcatccacggcattaagacacagggagcgaggcagaaattctcctccctctacatctcacagttcattattatgtatagtttggacggcaagaagtggcaaacttatagaggtaacagtactggaacagacatggtgttcttcggcaacgttgatagctctggcatcaaacacaacatctttaatcctcccataatagctcggtacatcagattgcatccgacccactacagcattaggagtacactccgaatggagcttatgggttgcgacttgaattcctgttcaatgccactcggaatggagtctaaagccatctctgatgcacagataaccgccagtagctactttacgaacatgtttgctacgtggtcaccctctaaggcaaggcttcatttgcaaggccggtctaatgcctggagacctcaggtgaacaacccgaaagaatggctccaggtggactttcagaagaccatgaaagtaacaggtgtcactactcagggagttaagtccttggatactagcatgtatgtgaaggagttccttatttcctcatcacaagatggccaccagtggaccctcttctttcagaatggtaaggtcaaagtgtttcagggcaatcaagacagcttcacacccgtggtgaacagtcttgatcctccactcttgacacgataccttcgaatccatccacagtcttgggagcaccagattgcattgcgcatggaagtacttggatgcgaggctcaggacctctac

SEQ ID NO: 2090 - protein, 1457 aa, synthetic construct
  REGION 1..1457: note = Variant of human B-domain deleted Factor VIII
MQIELSTCFFLCLLRFCFSATRRYYLGAVELSWDYMQSDLGELPVDARFPPRVPKSFPFNTSQVYKKTLFVEFTDHLFNIAKPRPPWMGLLGPTIQAEVYDTVVITLKNMASHPVSLHAVGVSYWKASEGAEYDDQTSQREKEDDKVFPGGSHTYVWQVLKENGPMGSDPPCLTYSYLSHVDLVKDLNSGLIGALLVCREGSLAKEKTQTLAKFILLFAVFDEGKSWHSETKNSLMQDRDAASARAWPKMHTVNGYVNRTLPGLIGCHRKSVYWHVIGMGTTPEVHSIFLEGHTFLVRNHRQASLGISPITFLTAQTLLRDLGQFLLFCHIPSHQHDGMEAYVKVDSCPEEPQLRMKNNEEAEDYDDDLTDSEMDVVRFDDDNSPSIIQARSGAKKHPKTWVHYIAAEEEDWDYAPLVLAPDDRSYKSQYLNNGPQRIGRKYKKVRFMAYTDETFKTREAIQHESGILGPLLYGEVGDTLLIIFKNQASRPYNIYPHGITDVRPLYSRRLPKGVKHLKDFPILPGEIFKYKWTITVEDGPTKSDPRCLTRYYSSFVNWERDLASGLIGPLLICYKESVDQRGNQIMSDKRNVILFSVFDENRSWYLTENIQRFLPNPAGVQLEDPEFQASNIMHSINGYVFDSLQLSVCLHEVAYWYILSIGAQTDFLSVFFSGYTFKHKGVYEDTLTLFPFSGETVFMEMENPGLWILGCHNSDFRNRGMTALLKVSSCDWNTGDYEEDSYEDISAYFDSKNNAIEPRSFSQNPPVLKRHQREGTRTTLQSDQEEIDYDDTISVEMKKEDFDIYDEDENQSPRSFQKKTRHYFIAAVERLWDYGMSSSPHVLRNRAQSGSVPQFKKVVFQEFTDGSFTQPLYRGELNEHLGLLGPYIRAEVEDNIMVTFRNQASRPYSFYSSLISYEEDQRQGAEPRKNFVKPNETKTYFWKVQHHMAPTKDEFDCKAWAYFSDVDLEKDVHSGLIGPLLVCHTNTLNPAHGRQVTVQEFALFFTIFDETKSWYFTENMERNCRAPCNIQMEDPTFKENYRFHAINGYIMDTLPGLVMAQDQRIRWYLLSMGSNENIHSIHFSGHVFTVRKKEEYKMALYNLYPGVFETVEMLPSKAGIWRVECLIGEHLHAGMSTLFLVYSNKCQNPLGMASGHIRDFQITASGQYGQWAPKLARLHYSGSINAWSTKEPFSWIKVDLLAPMIIHGIKTQGARQKFSSLYISQFIIMYSLDGKKWQTYRGNSTGTDMVFFGNVDSSGIKHNIFNPPIIARYIRLHPTHYSIRSTLRMELMGCDLNSCSMPLGMESKAISDAQITASSYFTNMFATWSPSKARLHLQGRSNAWRPQVNNPKEWLQVDFQKTMKVTGVTTQGVKSLDTSMYVKEFLISSSQDGHQWTLFFQNGKVKVFQGNQDSFTPVVNSLDPPLLTRYLRIHPQSWEHQIALRMEVLGCEAQDLY

SEQ ID NO: 2091 - DNA, 4371 bp, synthetic construct
  misc_feature 1..4371: note = Variant of human B-domain deleted Factor VIII
  source 1..4371: mol_type = other DNA
atgcagattgaactgtctacctgcttcttcctctgtttgctgaggttctgctttagcgccactagacggtactaccttggcgctgtggagctgtcctgggactatatgcagagtgatttgggagagcttcccgtcgacgcacgatttcctcctcgcgttccaaagtcatttccctttaacacaagccaggtgtacaagaagacgctcttcgtcgaattcaccgatcacctgttcaatatcgccaaacccagaccaccatggatgggtcttttggggcctaccatacaagcggaggtgtatgacacagttgttatcactctcaagaacatggcttctcatccggtaagtcttcacgcagtgggcgtgtcctactggaaagcttcagaaggagccgagtatgatgatcagacatcccagagggagaaagaagacgacaaggtatttccaggtgggtctcatacctatgtgtggcaagtgctcaaagagaatggccctatgggcagcgatccgccgtgtttgacttacagctacctgtcacacgttgacctcgtcaaggacctcaactccgggttgattggagccttgttggtatgcagggaaggatctcttgccaaagagaagacacagaccctggccaagtttatccttctctttgctgtgttcgatgagggcaaaagttggcatagcgaaacgaagaattccctcatgcaggatcgcgacgcagccagcgccagagcttggcccaagatgcacactgtgaacggatatgtcaataggacgcttcctggcttgattgggtgtcatcggaaaagtgtctactggcacgtgatcggaatggggacaacaccagaggtccactccatatttctcgaaggccataccttccttgttcgaaaccacagacaggcatccttggggatctctcccattacctttctcactgcccaaacgctgcttcgtgacttgggtcagttccttctcttttgccatatcccgtcacaccagcatgatggtatggaagcttatgtgaaagtcgacagttgtcctgaggagccacagttgcgcatgaagaataatgaagaagccgaggattacgacgacgatctcaccgattctgagatggacgtggtgaggtttgatgacgacaactctccctccatcattcaagctcggagcggggcgaagaaacaccccaagacttgggtccactatatagcggcggaagaggaggattgggattacgctcctcttgtattggcaccagatgaccgctcatacaaaagccagtacctcaacaacggaccgcagagaattggccggaagtataagaaagtgcgatttatggcctatacagacgaaacctttaagacaagggaggccatccagcatgagagtgggattttgggacctcttctttacggcgaagttggtgataccctcctcatcatcttcaagaatcaagcttctcgcccctataacatttacccacacgggatcactgacgttaggcctttgtatagcagaagacttcccaaaggcgtgaagcatctcaaagacttccccattttgccaggcgagatctttaagtacaaatggaccattacagtggaagatggaccgactaaatcggaccctcgatgccttacgcggtactattcctccttcgtgaattgggagagagatttggcaagcggactcataggaccactcctcatctgttacaaggaatctgtagaccagaggggtaaccagattatgagtgataaacgcaatgtgatcctttttagcgtcttcgacgagaaccggtcctggtacttgaccgagaatatacaaaggttccttcccaaccccgcaggcgttcagttggaagaccctgagtttcaggccagcaatattatgcactcaatcaacggctatgtgtttgatagtctccagctttctgtttgcctccatgaagtagcctattggtacatcttgtcaattggtgctcaaacagacttcctctccgtcttcttctccggctacacctttaagcacaagggcgtgtatgaggacactctcacactctttccattttctggagaaaccgtgttcatggaaatggagaatccaggcctttggatcttgggttgccacaacagtgattttcgcaatcggggaatgactgctctcctcaaagtcagcagctgtgattggaacacaggcgactatgaggaagattcttacgaggacataagtgcctactttgactccaagaataacgccattgagcccagatcattctcccagaatcctcccgtgcttaaaaggcatcagcgcgaaggtaccagaactactcttcagtctgatcaagaggagattgactatgacgacaccattagcgtggaaatgaagaaggaggatttcgatatctatgacgaagatgagaaccagtctccgcggagctttcagaagaagacgcgacactacttcattgcagcagtcgaaaggctttgggactacggtatgtcatcatcccctcatgtgttgcgcaatagagctcagagtggaagtgttccacagttcaagaaagtcgtctttcaagagtttacagatggcagcttcacacagcctctctatcggggcgagcttaacgaacatttgggactccttggtccctatatccgagccgaagtggaggacaacattatggttacctttaggaatcaagcctctcgcccctacagcttctactcctccctcatcagttatgaggaggatcagagacaaggcgctgaaccacggaagaactttgtgaaaccgaatgagacgaagacctacttctggaaagtacagcaccacatggcccccacaaaagacgaattcgattgcaaagcatgggcgtatttttcagacgttgacttggagaaagatgtacattcaggacttattggtcctttgttggtgtgtcacactaacactctcaatccagcccatggcaggcaggtgacagtccaggaattcgctcttttctttaccatctttgatgagaccaagtcctggtacttcacggaaaacatggagcgcaattgcagagccccctgtaacatacagatggaggaccctacctttaaggaaaattatcggttccacgcaatcaacggatacattatggatacactccctggccttgtgatggctcaggaccaacgaatcaggtggtacctcctcagcatgggttctaatagtaacatacactccattcacttttcaggacatgtgttcactgtccggaagaaagaagagtataagatggccctctacaatttgtatccaggcgtgtttgagaccgttgaaatgcttccctctaaagctggcatctggagagtagagtgcttgatcggagaacatcttcacgcaggtatgagcaccttgttcctcgtgtacagcaacaaatgtcagaatccacttggcatggccagtggacacattcgcgactttcagatcacagcatctggccagtatggacaatgggccccaaagttggctcgcctccattactccggtagcataaatgcgtggtccactaaagaacctttcagctggattaaggtcgatcttcttgcccccatgatcatccacggcattaagacacagggagcgaggcagaaattctcctccctctacatctcacagttcattattatgtatagtttggacggcaagaagtggcaaacttatagaggtaacagtactggaacagacatggtgttcttcggcaacgttgatagctctggcatcaaacacaacatctttaatcctcccataatagctcggtacatcagattgcatccgacccactacagcattaggagtacactccgaatggagcttatgggttgcgacttgaattcctgttcaatgccactcggaatggagtctaaagccatctctgatgcacagataaccgccagtagctactttacgaacatgtttgctacgtggtcaccctctaaggcaaggcttcatttgcaaggccggtctaatgcctggagacctcaggtgaacaacccgaaagaatggctccaggtggactttcagaagaccatgaaagtaacaggtgtcactactcagggagttaagtccttggatactagcatgtatgtgaaggagttccttatttcctcatcacaagatggccaccagtggaccctcttctttcagaatggtaaggtcaaagtgtttcagggcaatcaagacagcttcacacccgtggtgaacagtcttgatcctccactcttgacacgataccttcgaatccatccacagtcttgggagcaccagattgcattgcgcatggaagtacttggatgcgaggctcaggacctctac

SEQ ID NO: 2092 - protein, 1457 aa, synthetic construct
  REGION 1..1457: note = Variant of human B-domain deleted Factor VIII
MQIELSTCFFLCLLRFCFSATRRYYLGAVELSWDYMQSDLGELPVDARFPPRVPKSFPFNTSQVYKKTLFVEFTDHLFNIAKPRPPWMGLLGPTIQAEVYDTVVITLKNMASHPVSLHAVGVSYWKASEGAEYDDQTSQREKEDDKVFPGGSHTYVWQVLKENGPMGSDPPCLTYSYLSHVDLVKDLNSGLIGALLVCREGSLAKEKTQTLAKFILLFAVFDEGKSWHSETKNSLMQDRDAASARAWPKMHTVNGYVNRTLPGLIGCHRKSVYWHVIGMGTTPEVHSIFLEGHTFLVRNHRQASLGISPITFLTAQTLLRDLGQFLLFCHIPSHQHDGMEAYVKVDSCPEEPQLRMKNNEEAEDYDDDLTDSEMDVVRFDDDNSPSIIQARSGAKKHPKTWVHYIAAEEEDWDYAPLVLAPDDRSYKSQYLNNGPQRIGRKYKKVRFMAYTDETFKTREAIQHESGILGPLLYGEVGDTLLIIFKNQASRPYNIYPHGITDVRPLYSRRLPKGVKHLKDFPILPGEIFKYKWTITVEDGPTKSDPRCLTRYYSSFVNWERDLASGLIGPLLICYKESVDQRGNQIMSDKRNVILFSVFDENRSWYLTENIQRFLPNPAGVQLEDPEFQASNIMHSINGYVFDSLQLSVCLHEVAYWYILSIGAQTDFLSVFFSGYTFKHKGVYEDTLTLFPFSGETVFMEMENPGLWILGCHNSDFRNRGMTALLKVSSCDWNTGDYEEDSYEDISAYFDSKNNAIEPRSFSQNPPVLKRHQREGTRTTLQSDQEEIDYDDTISVEMKKEDFDIYDEDENQSPRSFQKKTRHYFIAAVERLWDYGMSSSPHVLRNRAQSGSVPQFKKVVFQEFTDGSFTQPLYRGELNEHLGLLGPYIRAEVEDNIMVTFRNQASRPYSFYSSLISYEEDQRQGAEPRKNFVKPNETKTYFWKVQHHMAPTKDEFDCKAWAYFSDVDLEKDVHSGLIGPLLVCHTNTLNPAHGRQVTVQEFALFFTIFDETKSWYFTENMERNCRAPCNIQMEDPTFKENYRFHAINGYIMDTLPGLVMAQDQRIRWYLLSMGSNSNIHSIHFSGHVFTVRKKEEYKMALYNLYPGVFETVEMLPSKAGIWRVECLIGEHLHAGMSTLFLVYSNKCQNPLGMASGHIRDFQITASGQYGQWAPKLARLHYSGSINAWSTKEPFSWIKVDLLAPMIIHGIKTQGARQKFSSLYISQFIIMYSLDGKKWQTYRGNSTGTDMVFFGNVDSSGIKHNIFNPPIIARYIRLHPTHYSIRSTLRMELMGCDLNSCSMPLGMESKAISDAQITASSYFTNMFATWSPSKARLHLQGRSNAWRPQVNNPKEWLQVDFQKTMKVTGVTTQGVKSLDTSMYVKEFLISSSQDGHQWTLFFQNGKVKVFQGNQDSFTPVVNSLDPPLLTRYLRIHPQSWEHQIALRMEVLGCEAQDLY

SEQ ID NO: 2093 - DNA, 4371 bp, synthetic construct
  misc_feature 1..4371: note = Variant of human B-domain deleted Factor VIII
  source 1..4371: mol_type = other DNA
atgcagattgaactgtctacctgcttcttcctctgtttgctgaggttctgctttagcgccactagacggtactaccttggcgctgtggagctgtcctgggactatatgcagagtgatttgggagagcttcccgtcgacgcacgatttcctcctcgcgttccaaagtcatttccctttaacacaagccaggtgtacaagaagacgctcttcgtcgaattcaccgatcacctgttcaatatcgccaaacccagaccaccatggatgggtcttttggggcctaccatacaagcggaggtgtatgacacagttgttatcactctcaagaacatggcttctcatccggtaagtcttcacgcagtgggcgtgtcctactggaaagcttcagaaggagccgagtatgatgatcagacatcccagagggagaaagaagacgacaaggtatttccaggtgggtctcatacctatgtgtggcaagtgctcaaagagaatggccctatgggcagcgatccgccgtgtttgacttacagctacctttcacacgttgacctcgtcaaggacctcaactccgggttgattggagccttgttggtatgcagggaaggatctcttgccaaagagaagacacagaccctggccaagtttatccttctctttgctgtgttcgatgagggcaaaagttggcatagcgaaacgaagaattccctcatgcaggatcgcgacgcagccagcgccagagcttggcccaagatgcacactgtgaacggatatgtcaataggacgcttcctggcttgattgggtgtcatcggaaaagtgtctactggcacgtgatcggaatggggacaacaccagaggtccactccatatttctcgaaggccataccttccttgttcgaaaccacagacaggcatccttggggatctctcccattacctttctcactgcccaaacgctgcttcgtgacttgggtcagttccttctcttttgccatatcccgtcacaccagcatgatggtatggaagcttatgtgaaagtcgacagttgtcctgaggagccacagttgcgcatgaagaataatgaagaagccgaggattacgacgacgatctcaccgattctgagatggacgtggtgaggtttgatgacgacaactctccctccatcattcaagctcggagcggggcgaagaaacaccccaagacttgggtccactatatagcggcggaagaggaggattgggattacgctcctcttgtattggcaccagatgaccgctcatacaaaagccagtacctcaacaacggaccgcagagaattggccggaagtataagaaagtgcgatttatggcctatacagacgaaacctttaagacaagggaggccatccagcatgagagtgggattttgggacctcttctttacggcgaagttggtgataccctcctcatcatcttcaagaatcaagcttctcgcccctataacatttacccacacgggatcactgacgttaggcctttgtatagcagaagacttcccaaaggcgtgaagcatctcaaagacttccccattttgccaggcgagatctttaagtacaaatggaccattacagtggaagatggaccgactaaatcggaccctcgatgccttacgcggtactattcctccttcgtgaattgggagagagatttggcaagcggactcataggaccactcctcatctgttacaaggaatctgtagaccagaggggtaaccagattatgagtgataaacgcaatgtgatcctttttagcgtcttcgacgagaaccggtcctggtacttgaccgagaatatacaaaggttccttcccaaccccgcaggcgttcagttggaagaccctgagtttcaggccagcaatattatgcactcaatcaacggctatgtgtttgatagtctccagctttctgtttgcctccatgaagtagcctattggtacatcttgtcaattggtgctcaaacagacttcctctccgtcttcttctccggctacacctttaagcacaagggcgtgtatgaggacactctcacactctttccattttctggagaaaccgtgttcatggaaatggagaatccaggcctttggatcttgggttgccacaacagtgattttcgcaatcggggaatgactgctctcctcaaagtcagcagctgtgattggaacacaggcgactattatggggattcttacgaggacataagtgcctactttgactccaagaataacgccattgagcccagatcattctcccagaatcctcccgtgcttaaaaggcatcagcgcgaaggtaccagaactactcttcagtctgatcaagaggagattgactatgacgacaccattagcgtggaaatgaagaaggaggatttcgatatctatgacgaagatgagaaccagtctccgcggagctttcagaagaagacgcgacactacttcattgcagcagtcgaaaggctttgggactacggtatgtcatcatcccctcatgtgttgcgcaatagagctcagagtggaagtgttccacagttcaagaaagtcgtctttcaagagtttacagatggcagcttcacacagcctctctatcggggcgagcttaacgaacatttgggactccttggtccctatatccgagccgaagtggaggacaacattatggttacctttaggaatcaagcctctcgcccctacagcttctactcctccctcatcagttatgaggaggatcagagacaaggcgctgaaccacggaagaactttgtgaaaccgaatgagacgaagacctacttctggaaagtacagcaccacatggcccccacaaaagacgaattcgattgcaaagcatgggcgtatttttcagacgttgacttggagaaagatgtacattcaggacttattggtcctttgttggtgtgtcacactaacactctcaatccagcccatggcaggcaggtgacagtccaggaattcgctcttttctttaccatctttgatgagaccaagtcctggtacttcacggaaaacatggagcgcaattgcagagccccctgtaacatacagatggaggaccctacctttaaggaaaattatcggttccacgcaatcaacggatacattatggatacactccctggccttgtgatggctcaggaccaacgaatcaggtggtacctcctcagcatgggttctaatagtaacatacactccattcacttttcaggacatgtgttcactgtccggaagaaagaagagtataagatggccctctacaatttgtatccaggcgtgtttgagaccgttgaaatgcttccctctaaagctggcatctggagagtagagtgcttgatcggagaacatcttcacgcaggtatgagcaccttgttcctcgtgtacagcaacaaatgtcagaatccacttggcatggccagtggacacattcgcgactttcagatcacagcatctggccagtatggacaatgggccccaaagttggctcgcctccattactccggtagcataaatgcgtggtccactaaagaacctttcagctggattaaggtcgatcttcttgcccccatgatcatccacggcattaagacacagggagcgaggcagaaattctcctccctctacatctcacagttcattattatgtatagtttggacggcaagaagtggcaaacttatagaggtaacagtactggaacagacatggtgttcttcggcaacgttgatagctctggcatcaaacacaacatctttaatcctcccataatagctcggtacatcagattgcatccgacccactacagcattaggagtacactccgaatggagcttatgggttgcgacttgaattcctgttcaatgccactcggaatggagtctaaagccatctctgatgcacagataaccgccagtagctactttacgaacatgtttgctacgtggtcaccctctaaggcaaggcttcatttgcaaggccggtctaatgcctggagacctcaggtgaacaacccgaaagaatggctccaggtggactttcagaagaccatgaaagtaacaggtgtcactactcagggagttaagtccttggatactagcatgtatgtgaaggagttccttatttcctcatcacaagatggccaccagtggaccctcttctttcagaatggtaaggtcaaagtgtttcagggcaatcaagacagcttcacacccgtggtgaacagtcttgatcctccactcttgacacgataccttcgaatccatccacagtcttgggagcaccagattgcattgcgcatggaagtacttggatgcgaggctcaggacctctac

SEQ ID NO: 2094 - protein, 1457 aa, synthetic construct
  REGION 1..1457: note = Variant of human B-domain deleted Factor VIII
MQIELSTCFFLCLLRFCFSATRRYYLGAVELSWDYMQSDLGELPVDARFPPRVPKSFPFNTSQVYKKTLFVEFTDHLFNIAKPRPPWMGLLGPTIQAEVYDTVVITLKNMASHPVSLHAVGVSYWKASEGAEYDDQTSQREKEDDKVFPGGSHTYVWQVLKENGPMGSDPPCLTYSYLSHVDLVKDLNSGLIGALLVCREGSLAKEKTQTLAKFILLFAVFDEGKSWHSETKNSLMQDRDAASARAWPKMHTVNGYVNRTLPGLIGCHRKSVYWHVIGMGTTPEVHSIFLEGHTFLVRNHRQASLGISPITFLTAQTLLRDLGQFLLFCHIPSHQHDGMEAYVKVDSCPEEPQLRMKNNEEAEDYDDDLTDSEMDVVRFDDDNSPSIIQARSGAKKHPKTWVHYIAAEEEDWDYAPLVLAPDDRSYKSQYLNNGPQRIGRKYKKVRFMAYTDETFKTREAIQHESGILGPLLYGEVGDTLLIIFKNQASRPYNIYPHGITDVRPLYSRRLPKGVKHLKDFPILPGEIFKYKWTITVEDGPTKSDPRCLTRYYSSFVNWERDLASGLIGPLLICYKESVDQRGNQIMSDKRNVILFSVFDENRSWYLTENIQRFLPNPAGVQLEDPEFQASNIMHSINGYVFDSLQLSVCLHEVAYWYILSIGAQTDFLSVFFSGYTFKHKGVYEDTLTLFPFSGETVFMEMENPGLWILGCHNSDFRNRGMTALLKVSSCDWNTGDYYGDSYEDISAYFDSKNNAIEPRSFSQNPPVLKRHQREGTRTTLQSDQEEIDYDDTISVEMKKEDFDIYDEDENQSPRSFQKKTRHYFIAAVERLWDYGMSSSPHVLRNRAQSGSVPQFKKVVFQEFTDGSFTQPLYRGELNEHLGLLGPYIRAEVEDNIMVTFRNQASRPYSFYSSLISYEEDQRQGAEPRKNFVKPNETKTYFWKVQHHMAPTKDEFDCKAWAYFSDVDLEKDVHSGLIGPLLVCHTNTLNPAHGRQVTVQEFALFFTIFDETKSWYFTENMERNCRAPCNIQMEDPTFKENYRFHAINGYIMDTLPGLVMAQDQRIRWYLLSMGSNSNIHSIHFSGHVFTVRKKEEYKMALYNLYPGVFETVEMLPSKAGIWRVECLIGEHLHAGMSTLFLVYSNKCQNPLGMASGHIRDFQITASGQYGQWAPKLARLHYSGSINAWSTKEPFSWIKVDLLAPMIIHGIKTQGARQKFSSLYISQFIIMYSLDGKKWQTYRGNSTGTDMVFFGNVDSSGIKHNIFNPPIIARYIRLHPTHYSIRSTLRMELMGCDLNSCSMPLGMESKAISDAQITASSYFTNMFATWSPSKARLHLQGRSNAWRPQVNNPKEWLQVDFQKTMKVTGVTTQGVKSLDTSMYVKEFLISSSQDGHQWTLFFQNGKVKVFQGNQDSFTPVVNSLDPPLLTRYLRIHPQSWEHQIALRMEVLGCEAQDLY

SEQ ID NO: 2095 - DNA, 4371 bp, synthetic construct
  misc_feature 1..4371: note = Variant of human B-domain deleted Factor VIII
  source 1..4371: mol_type = other DNA
atgcagattgaactgtctacctgcttcttcctctgtttgctgaggttctgctttagcgccactagacggtactaccttggcgctgtggagctgtcctgggactatatgcagagtgatttgggagagcttcccgtcgacgcacgatttcctcctcgcgttccaaagtcatttccctttaacacaagccaggtgtacaagaagacgctcttcgtcgaattcaccgatcacctgttcaatatcgccaaacccagaccaccatggatgggtcttttggggcctaccatacaagcggaggtgtatgacacagttgttatcactctcaagaacatggcttctcatccggtaagtcttcacgcagtgggcgtgtcctactggaaagcttcagaaggagccgagtatgatgatcagacatcccagagggagaaagaagacgacaaggtatttccaggtgggtctcatacctatgtgtggcaagtgctcaaagagaatggccctatgggcagcgatccgccgtgtttgacttacagctacctttcacacgttgacctcgtcaaggacctcaactccgggttgattggagccttgttggtatgcagggaaggatctcttgccaaagagaagacacagaccctggccaagtttatccttctctttgctgtgttcgatgagggcaaaagttggcatagcgaaacgaagaattccctcatgcaggatcgcgacgcagccagcgccagagcttggcccaagatgcacactgtgaacggatatgtcaataggacgcttcctggcttgattgggtgtcatcggaaaagtgtctactggcacgtgatcggaatggggacaacaccagaggtccactccatatttctcgaaggccataccttccttgttcgaaaccacagacaggcatccttggggatctctcccattacctttctcactgcccaaacgggtcttcgtgacttgggtcagttccttctcttttgccatatcccgtcacaccagcatgatggtatggaagcttatgtgaaagtcgacagttgtcctgaggagccacagttgcgcatgaagaataatgaagaagccgaggattacgacgacgatctcaccgattctgagatggacgtggtgaggtttgatgacgacaactctccctccatcattcaagctcggagcggggcgaagaaacaccccaagacttgggtccactatatagcggcggaagaggaggattgggattacgctcctcttgtattggcaccagatgaccgctcatacaaaagccagtacctcaacaacggaccgcagagaattggccggaagtataagaaagtgcgatttatggcctatacagacgaaacctttaagacaagggaggccatccagcatgagagtgggattttgggacctcttctttacggcgaagttggtgataccctcctcatcatcttcaagaatcaagcttctcgcccctataacatttacccacacgggatcactgacgttaggcctttgtatagcagaagacttcccaaaggcgtgaagcatctcaaagacttccccattttgccaggcgagatctttaagtacaaatggaccattacagtggaagatggaccgactaaatcggaccctcgatgccttacgcggtactattcctccttcgtgaattgggagagagatttggcaagcggactcataggaccactcctcatctgttacaaggaatctgtagaccagaggggtaaccagattatgagtgataaacgcaatgtgatcctttttagcgtcttcgacgagaaccggtcctggtacttgaccgagaatatacaaaggttccttcccaaccccgcaggcgttcagttggaagaccctgagtttcaggccagcaatattatgcactcaatcaacggctatgtgtttgatagtctccagctttctgtttgcctccatgaagtagcctattggtacatcttgtcaattggtgctcaaacagacttcctctccgtcttcttctccggctacacctttaagcacaagaacgtgtatgaggacactctcacactctttccattttctggagaaaccgtgttcatgagcatggagaatccaggcctttggatcttgggttgccacaacagtgattttcgcaatcggggaatgactgctctcctcaaagtcagcagctgtgattggaacacaggcgactattatgaggattcttacgaggacataagtgcctactttgactccaagaataacgccattgagcccagatcattctcccagaatcctcccgtgcttaaaaggcatcagcgcgaaggtaccagaactactcttcagtctgatcaagaggagattgactatgacgacaccattagcgtggaaatgaagaaggtagatttcgatatctacgacgagtcggggaaccagtctccgcggagctttcagaagaagacgcgacactacttcattgcagcagtcgaaaggctttgggactacggtatgtcatcatcccctcatgtgttgcgcaatagagctcagagtggaagtgttccacagttcaagaaagtcgtctttcaagagtttacagatggcagcttcacacagcctctctatcggggcgagcttaacgaacatttgggactccttggtccctatatccgagccgaagtggaggacaacattatggttacctttaggaatcaagcctctcgcccctacagcttctactcctccctcatcagttatgaggaggatcagagacaaggcgctgaaccacggaagaactttgtgaaaccgaatgagacgaagacctacttctggaaagtacagcaccacatggcccccacaaaagacgaattcgattgcaaagcatgggcgtatttttcagacgttgacttggagaaagatgtacattcaggacttattggtcctttgttggtgtgtcacactaacactctcaatccagcccatggcaggcaggtgacagtccaggaattcgctcttttctttaccatctttgatgagaccaagtcctggtacttcacggaaaacatggagcgcaattgcagagccccctgtaacatacagatggaggaccctacctttaaggaaaattatcggttccacgcaatcaacggatacattatggatacactccctggccttgtgatggctcaggaccaacgaatcaggtggtacctcctcagcatgggttctaatgaaaacatacactccattcacttttcaggacatgtgttcactgtccggaagaaagaagagtataagatggccctctacaatttgtatccaggcgtgtttgagaccgttgaaatgcttccctctaaagctggcatctggagagtagagtgcttgatcggagaacatcttcacgcaggtatgagcaccttgttcctcgtgtacagcaacaaatgtcagaatccacttggcatggccagtggacacattcgcgactttcagatcacagcatctggccagtatggacaatgggccccaaagttggctcgcctccattactccggtagcataaatgcgtggtccactaaagaacctttcagctggattaaggtcgatcttcttgcccccatgatcatccacggcattaagacacagggagcgaggcagaaattctcctccctctacatctcacagttcattattatgtatagtttggacggcaagaagtggcaaacttatagaggtaacagtactggaacagacatggtgttcttcggcaacgttgatagctctggcatcaaacacaacatctttaatcctcccataatagctcggtacatcagattgcatccgacccactacagcattaggagtacactccgaatggagcttatgggttgcgacttgaattcctgttcaatgccactcggaatggagtctaaagccatctctgatgcacagataaccgccagtagctactttacgaacatgtttgctacgtggtcaccctctaaggcaaggcttcatttgcaaggccggtctaatgcctggagacctcaggtgaacaacccgaaagaatggctccaggtggactttcagaagaccatgaaagtaacaggtgtcactactcagggagttaagtccttggatactagcatgtatgtgaaggagttccttatttcctcatcacaagatggccaccagtggaccctcttctttcagaatggtaaggtcaaagtgtttcagggcaatcaagacagcttcacacccgtggtgaacagtcttgatcctccactcttgacacgataccttcgaatccatccacagtcttgggagcaccagattgcattgcgcatggaagtacttggatgcgaggctcaggacctctac

SEQ ID NO: 2096 - protein, 1457 aa, synthetic construct
  REGION 1..1457: note = Variant of human B-domain deleted Factor VIII
MQIELSTCFFLCLLRFCFSATRRYYLGAVELSWDYMQSDLGELPVDARFPPRVPKSFPFNTSQVYKKTLFVEFTDHLFNIAKPRPPWMGLLGPTIQAEVYDTVVITLKNMASHPVSLHAVGVSYWKASEGAEYDDQTSQREKEDDKVFPGGSHTYVWQVLKENGPMGSDPPCLTYSYLSHVDLVKDLNSGLIGALLVCREGSLAKEKTQTLAKFILLFAVFDEGKSWHSETKNSLMQDRDAASARAWPKMHTVNGYVNRTLPGLIGCHRKSVYWHVIGMGTTPEVHSIFLEGHTFLVRNHRQASLGISPITFLTAQTGLRDLGQFLLFCHIPSHQHDGMEAYVKVDSCPEEPQLRMKNNEEAEDYDDDLTDSEMDVVRFDDDNSPSIIQARSGAKKHPKTWVHYIAAEEEDWDYAPLVLAPDDRSYKSQYLNNGPQRIGRKYKKVRFMAYTDETFKTREAIQHESGILGPLLYGEVGDTLLIIFKNQASRPYNIYPHGITDVRPLYSRRLPKGVKHLKDFPILPGEIFKYKWTITVEDGPTKSDPRCLTRYYSSFVNWERDLASGLIGPLLICYKESVDQRGNQIMSDKRNVILFSVFDENRSWYLTENIQRFLPNPAGVQLEDPEFQASNIMHSINGYVFDSLQLSVCLHEVAYWYILSIGAQTDFLSVFFSGYTFKHKNVYEDTLTLFPFSGETVFMSMENPGLWILGCHNSDFRNRGMTALLKVSSCDWNTGDYYEDSYEDISAYFDSKNNAIEPRSFSQNPPVLKRHQREGTRTTLQSDQEEIDYDDTISVEMKKVDFDIYDESGNQSPRSFQKKTRHYFIAAVERLWDYGMSSSPHVLRNRAQSGSVPQFKKVVFQEFTDGSFTQPLYRGELNEHLGLLGPYIRAEVEDNIMVTFRNQASRPYSFYSSLISYEEDQRQGAEPRKNFVKPNETKTYFWKVQHHMAPTKDEFDCKAWAYFSDVDLEKDVHSGLIGPLLVCHTNTLNPAHGRQVTVQEFALFFTIFDETKSWYFTENMERNCRAPCNIQMEDPTFKENYRFHAINGYIMDTLPGLVMAQDQRIRWYLLSMGSNENIHSIHFSGHVFTVRKKEEYKMALYNLYPGVFETVEMLPSKAGIWRVECLIGEHLHAGMSTLFLVYSNKCQNPLGMASGHIRDFQITASGQYGQWAPKLARLHYSGSINAWSTKEPFSWIKVDLLAPMIIHGIKTQGARQKFSSLYISQFIIMYSLDGKKWQTYRGNSTGTDMVFFGNVDSSGIKHNIFNPPIIARYIRLHPTHYSIRSTLRMELMGCDLNSCSMPLGMESKAISDAQITASSYFTNMFATWSPSKARLHLQGRSNAWRPQVNNPKEWLQVDFQKTMKVTGVTTQGVKSLDTSMYVKEFLISSSQDGHQWTLFFQNGKVKVFQGNQDSFTPVVNSLDPPLLTRYLRIHPQSWEHQIALRMEVLGCEAQDLY

SEQ ID NO: 2097 - DNA, 4371 bp, synthetic construct
  misc_feature 1..4371: note = Variant of human B-domain deleted Factor VIII
  source 1..4371: mol_type = other DNA
atgcagattgaactgtctacctgcttcttcctctgtttgctgaggttctgctttagcgccactagacggtactaccttggcgctgtggagctgtcctgggactatatgcagagtgatttgggagagcttcccgtcgacgcacgatttcctcctcgcgttccaaagtcatttccctttaacacaagccaggtgtacaagaagacgctcttcgtcgaattcaccgatcacctgttcaatatcgccaaacccagaccaccatggatgggtcttttggggcctaccatacaagcggaggtgtatgacacagttgttatcactctcaagaacatggcttctcatccggtaagtcttcacgcagtgggcgtgtcctactggaaagcttcagaaggagccgagtatgatgatcagacatcccagagggagaaagaagacgacaaggtatttccaggtgggtctcatacctatgtgtggcaagtgctcaaagagaatggccctatgggcagcgatccgccgtgtttgacttacagctaccagtcacacgttgacctcgtcaaggacctcaactccgggttgattggagccttgttggtatgcagggaaggatctcttgccaaagagaagacacagaccctggccaagtttatccttctctttgctgtgttcgatgagggcaaaagttggcatagcgaaacgaagaattccctcatgcaggatcgcgacgcagccagcgccagagcttggcccaagatgcacactgtgaacggatatgtcaataggacgcttcctggcttgattgggtgtcatcggaaaagtgtctactggcacgtgatcggaatggggacaacaccagaggtccactccatatttctcgaaggccataccttccttgttcgaaaccacagacaggcatccttggggatctctcccattacctttctcactgcccaaacgggtcttcgtgacttgggtcagttccttctcttttgccatatcccgtcacaccagcatgatggtatggaagcttatgtgaaagtcgacagttgtcctgaggagccacagttgcgcatgaagaataatgaagaagccgaggattacgacgacgatctcaccgattctgagatggacgtggtgaggtttgatgacgacaactctccctccatcattcaagctcggagcggggcgaagaaacaccccaagacttgggtccactatatagcggcggaagaggaggattgggattacgctcctcttgtattggcaccagatgaccgctcatacaaaagccagtacctcaacaacggaccgcagagaattggccggaagtataagaaagtgcgatttatggcctatacagacgaaacctttaagacaagggaggccatccagcatgagagtgggattttgggacctcttctttacggcgaagttggtgataccctcctcatcatcttcaagaatcaagcttctcgcccctataacatttacccacacgggatcactgacgttaggcctttgtatagcagaagacttcccaaaggcgtgaagcatctcaaagacttccccattttgccaggcgagatctttaagtacaaatggaccattacagtggaagatggaccgactaaatcagaccctcgatgccttacgcggtactattcctccttcgtgaattgggagagagatttggcaagcggactcataggaccactcctcatctgttacaaggaatctgtagaccagaggggtaaccagattatgagtgataaacgcaatgtgatcctttttagcgtcttcgacgagaaccggtcctggtacttgaccgagaatatacaaaggttccttcccaaccccgcaggcgttcagttggaagaccctgagtttcaggccagcaatattatgcactcaatcaacggctatgtgtttgatagtctccagctttctgtttgcctccatgaagtagcctattggtacatcttgtcaattggtgctcaaacagacttcctctccgtcttcttctccggctacacctttaagcacaagggcgtgtatgaggacactctcacactctttccattttctggagaaaccgtgttcatggaaatggagaatccaggcctttggatcttgggttgccacaacagtgattttcgcaatcggggaatgactgctctcctcaaagtcagcagctgtgattggaacacaggcgactatgaggaagattcttacgaggacataagtgcctactttgactccgagaataacgccattgagcccagatcattctcccagaatcctcccgtgcttaaaaggcatcagcgcgaaggtaccagaactactcttcagtctgatcaagaggagattgactatgacgacaccattagcgtggaaatgaagaaggaggatttcgatatctatgacgaagatgagaaccagtctccgcggagctttcagaagaagacgcgacactacttcattgcagcagtcgaaaggctttgggactacggtatgtcatcatcccctcatgtgttgcgcaatagagctcagagtggaagtgttccacagttcaagaaagtcgtctttcaagagtttacagatggcagcttcacacagcctctctatcggggcgagcttaacgaacatttgggactccttggtccctatatccgagccgaagtggaggacaacattatggttacctttaggaatcaagcctctcgcccctacagcttctactcctccctcatcagttatgaggaggatcagagacaaggcgctgaaccacggaagaactttgtgaaaccgaatgagacgaagacctacttctggaaagtacagcaccacatggcccccacaaaagacgaattcgattgcaaagcatgggcgtatttttcagacgttgacttggagaaagatgtacattcaggacttattggtcctttgttggtgtgtcacactaacactctcaatccagcccatggcaggcaggtgacagtccaggaattcgctcttttctttaccatctttgatgagaccaagtcctggtacttcacggaaaacatggagcgcaattgcagagccccctgtaacatacagatggaggaccctacctttaaggaaaattatcggttccacgcaatcaacggatacattatggatacactccctggccttgtgatggctcaggaccaacgaatcaggtggtacctcctcagcatgggttctaatgagaacatacactccattcacttttcaggacatgtgttcactgtccggaagggggaagagtataagatggccctctacaatttgtatccaggcgtgtttgagaccgttgaaatgcttccctctaaagctggcatctggagagtagagtgcttgatcggagaacatcttcacgcaggtatgagcaccttgttcctcgtgtacagcaacaaatgtcagaatccacttggcatggccagtggacacattcgcgactttcagatcacagcatctggccagtatggacaatgggccccaaagttggctcgcctccattactccggtagcataaatgcgtggtccactaaagaacctttcagctggattaaggtcgatcttcttgcccccatgatcatccacggcattaagacacagggagcgaggcagaaattctcctccctctacatctcacagttcattattatgtatagtttggacggcaagaagtggcaaacttatagaggtaacagtactggaacagacatggtgttcttcggcaacgttgatagctctggcatcaaacacaacatctttaatcctcccataatagctcggtacatcagattgcatccgacccactacagcattaggagtacactccgaatggagcttatgggttgcgacttgaattcctgttcaatgccactcggaatggagtctaaagccatctctgatgcacagataaccgccagtagctactttacgaacatgtttgctacgtggtcaccctctaaggcaaggcttcatttgcaaggccggtctaatgcctggagacctcaggtgaacaacccgaaagaatggctccaggtggactttcagaagaccatgaaagtaacaggtgtcactactcagggagttaagtccttggatactagcatgtatgtgaaggagttccttatttcctcatcacaagatggccaccagtggaccctcttctttcagaatggtaaggtcaaagtgtttcagggcaatcaagacagcttcacacccgtggtgaacagtcttgatcctccactcttgacacgataccttcgaatccatccacagtcttgggagcaccagattgcattgcgcatggaagtacttggatgcgaggctcaggacctctac

SEQ ID NO: 2098 - protein, 1457 aa, synthetic construct
  REGION 1..1457: note = Variant of human B-domain deleted Factor VIII
MQIELSTCFFLCLLRFCFSATRRYYLGAVELSWDYMQSDLGELPVDARFPPRVPKSFPFNTSQVYKKTLFVEFTDHLFNIAKPRPPWMGLLGPTIQAEVYDTVVITLKNMASHPVSLHAVGVSYWKASEGAEYDDQTSQREKEDDKVFPGGSHTYVWQVLKENGPMGSDPPCLTYSYQSHVDLVKDLNSGLIGALLVCREGSLAKEKTQTLAKFILLFAVFDEGKSWHSETKNSLMQDRDAASARAWPKMHTVNGYVNRTLPGLIGCHRKSVYWHVIGMGTTPEVHSIFLEGHTFLVRNHRQASLGISPITFLTAQTGLRDLGQFLLFCHIPSHQHDGMEAYVKVDSCPEEPQLRMKNNEEAEDYDDDLTDSEMDVVRFDDDNSPSIIQARSGAKKHPKTWVHYIAAEEEDWDYAPLVLAPDDRSYKSQYLNNGPQRIGRKYKKVRFMAYTDETFKTREAIQHESGILGPLLYGEVGDTLLIIFKNQASRPYNIYPHGITDVRPLYSRRLPKGVKHLKDFPILPGEIFKYKWTITVEDGPTKSDPRCLTRYYSSFVNWERDLASGLIGPLLICYKESVDQRGNQIMSDKRNVILFSVFDENRSWYLTENIQRFLPNPAGVQLEDPEFQASNIMHSINGYVFDSLQLSVCLHEVAYWYILSIGAQTDFLSVFFSGYTFKHKGVYEDTLTLFPFSGETVFMEMENPGLWILGCHNSDFRNRGMTALLKVSSCDWNTGDYEEDSYEDISAYFDSENNAIEPRSFSQNPPVLKRHQREGTRTTLQSDQEEIDYDDTISVEMKKEDFDIYDEDENQSPRSFQKKTRHYFIAAVERLWDYGMSSSPHVLRNRAQSGSVPQFKKVVFQEFTDGSFTQPLYRGELNEHLGLLGPYIRAEVEDNIMVTFRNQASRPYSFYSSLISYEEDQRQGAEPRKNFVKPNETKTYFWKVQHHMAPTKDEFDCKAWAYFSDVDLEKDVHSGLIGPLLVCHTNTLNPAHGRQVTVQEFALFFTIFDETKSWYFTENMERNCRAPCNIQMEDPTFKENYRFHAINGYIMDTLPGLVMAQDQRIRWYLLSMGSNENIHSIHFSGHVFTVRKGEEYKMALYNLYPGVFETVEMLPSKAGIWRVECLIGEHLHAGMSTLFLVYSNKCQNPLGMASGHIRDFQITASGQYGQWAPKLARLHYSGSINAWSTKEPFSWIKVDLLAPMIIHGIKTQGARQKFSSLYISQFIIMYSLDGKKWQTYRGNSTGTDMVFFGNVDSSGIKHNIFNPPIIARYIRLHPTHYSIRSTLRMELMGCDLNSCSMPLGMESKAISDAQITASSYFTNMFATWSPSKARLHLQGRSNAWRPQVNNPKEWLQVDFQKTMKVTGVTTQGVKSLDTSMYVKEFLISSSQDGHQWTLFFQNGKVKVFQGNQDSFTPVVNSLDPPLLTRYLRIHPQSWEHQIALRMEVLGCEAQDLY

SEQ ID NO: 2099 - DNA, 4371 bp, synthetic construct
  misc_feature 1..4371: note = Variant of human B-domain deleted Factor VIII
  source 1..4371: mol_type = other DNA
atgcagattgaactgtctacctgcttcttcctctgtttgctgaggttctgctttagcgccactagacggtactaccttggcgctgtggagctgtcctgggactatatgcagagtgatttgggagagcttcccgtcgacgcacgatttcctcctcgcgttccaaagtcatttccctttaacacaagccaggtgtacaagaagacgctcttcgtcgaattcaccgatcacctgttcaatatcgccaaacccagaccaccatggatgggtcttttggggcctaccatacaagcggaggtgtatgacacagttgttatcactctcaagaacatggcttctcatccggtaagtcttcacgcagtgggcgtgtcctactggaaagcttcagaaggagccgagtatgatgatcagacatcccagagggagaaagaagacgacaaggtatttccaggtgggtctcatacctatgtgtggcaagtgctcaaagagaatggccctatgggcagcgatccgccgtgtttgacttacagctacctttcacacgttgacctcgtcaaggacctcaactccgggttgattggagccttgttggtatgcagggaaggatctcttgccaaagagaagacacagaccctggccaagtttatccttctctttgctgtgttcgatgagggcaaaagttggcatagcgaaacgaagaattccctcatgcaggatcgcgacgcagccagcgccagagcttggcccaagatgcacactgtgaacggatatgtcaataggacgcttcctggcttgattgggtgtcatcggaaaagtgtctactggcacgtgatcggaatggggacaacaccagaggtccactccatatttctcgaaggccataccttccttgttcgaaaccacagacaggcatccttggggatctctcccattacctttctcactgcccaaacgggtcttcgtgacttgggtcagttccttctcttttgccatatcccgtcacaccagcatgatggtatggaagcttatgtgaaagtcgacagttgtcctgaggagccacagttgcgcatgaagaataatgaagaagccgaggattacgacgacgatctcaccgattctgagatggacgtggtgaggtttgatgacgacaactctccctccatcattcaagctcggagcggggcgaagaaacaccccaagacttgggtccactatatagcggcggaagaggaggattgggattacgctcctcttgtattggcaccagatgaccgctcatacaaaagccagtacctcaacaacggaccgcagagaattggccggaagtataagaaagtgcgatttatggcctatacagacgaaacctttaagacaagggaggccatccagcatgagagtgggattttgggacctcttctttacggcgaagttggtgataccctcctcatcatcttcaagaatcaagcttctcgcccctataacatttacccacacgggatcactgacgttaggcctttgtatagcagaagacttcccaaaggcgtgaagcatctcaaagacttccccattttgccaggcgagatctttaagtacaaatggaccattacagtggaagatggaccgactaaatcggaccctcgatgccttacgcggtactattcctccttcgtgaattgggagagagatttggcaagcggactcataggaccactcctcatctgttacaaggaatctgtagaccagaggggtaaccagattatgagtgataaacgcaatgtgatcctttttagcgtcttcgacgagaaccggtcctggtacttgaccgagaatatacaaaggttccttcccaaccccgcaggcgttcagttggaagaccctgagtttcaggccagcaatattatgcactcaatcaacggctatgtgtttgatagtctccagctttctgtttgcctccatgaagtagcctattggtacatcttgtcaattggtgctcaaacagacttcctctccgtcttcttctccggctacacctttaagcacaagggcgtgtatgaggacactctcacactctttccattttctggagaaaccgtgttcatggaaatggagaatccaggcctttggatcttgggttgccacaacagtgattttcgcaatcggggaatgactgctctcctcaaagtcagcagctgtgattggaacacaggcgactatgaagaggattcttacgaggacataagtgcctactttgactccaagaataacgccattgagcccagatcattctcccagaatcctcccgtgcttaaaaggcatcagcgcgaaggtaccagaactactcttcagtctgatcaagaggagattgactatgacgacaccattagcgtggaaatgaagaaggaggatttcgatatctatgacgaagatgagaaccagtctccgcggagctttcagaagaagacgcgacactacttcattgcagcagtcgaaaggctttgggactacggtatgtcatcatcccctcatgtgttgcgcaatagagctcagagtggaagtgttccacagttcaagaaagtcgtctttcaagagtttacagatggcagcttcacacagcctctctatcggggcgagcttaacgaacatttgggactccttggtccctatatccgagccgaagtggaggacaacattatggttacctttaggaatcaagcctctcgcccctacagcttctactcctccctcatcagttatgaggaggatcagagacaaggcgctgaaccacggaagaactttgtgaaaccgaatgagacgaagacctacttctggaaagtacagcaccacatggcccccacaaaagacgaattcgattgcaaagcatgggcgtatttttcagacgttgacttggagaaagatgtacattcaggacttattggtcctttgttggtgtgtcacactaacactctcaatccagcccatggcaggcaggtgacagtccaggaattcgctcttttctttaccatctttgatgagaccaagtcctggtacttcacggaaaacatggagcgcaattgcagagccccctgtaacatacagatggaggaccctacctttaaggaaaattatcggttccacgcaatcaacggatacattatggatacactccctggccttgtgatggctcaggaccaacgaatcaggtggtacctcctcagcatgggttctaatgaaaacatacactccattcacttttcaggacatgtgttcactgtccggaagaaagaagagtataagatggccctctacaatttgtatccaggcgtgtttgagaccgttgaaatgcttccctctaaagctggcatctggagagtagagtgcttgatcggagaacatcttcacgcaggtatgagcaccttgttcctcgtgtacagcaacaaatgtcagaatccacttggcatggccagtggacacattcgcgactttcagatcacagcatctggccagtatggacaatgggccccaaagttggctcgcctccattactccggtagcataaatgcgtggtccactaaagaacctttcagctggattaaggtcgatcttcttgcccccatgatcatccacggcattaagacacagggagcgaggcagaaattctcctccctctacatctcacagttcattattatgtatagtttggacggcaagaagtggcaaacttatagaggtaacagtactggaacagacatggtgttcttcggcaacgttgatagctctggcatcaaacacaacatctttaatcctcccataatagctcggtacatcagattgcatccgacccactacagcattaggagtacactccgaatggagcttatgggttgcgacttgaattcctgttcaatgccactcggaatggagtctaaagccatctctgatgcacagataaccgccagtagctactttacgaacatgtttgctacgtggtcaccctctaaggcaaggcttcatttgcaaggccggtctaatgcctggagacctcaggtgaacaacccgaaagaatggctccaggtggactttcagaagaccatgaaagtaacaggtgtcactactcagggagttaagtccttggatactagcatgtatgtgaaggagttccttatttcctcatcacaagatggccaccagtggaccctcttctttcagaatggtaaggtcaaagtgtttcagggcaatcaagacagcttcacacccgtggtgaacagtcttgatcctccactcttgacacgataccttcgaatccatccacagtcttgggagcaccagattgcattgcgcatggaagtacttggatgcgaggctcaggacctctac

SEQ ID NO: 2100 - protein, 1457 aa, synthetic construct
  REGION 1..1457: note = Variant of human B-domain deleted Factor VIII
MQIELSTCFFLCLLRFCFSATRRYYLGAVELSWDYMQSDLGELPVDARFPPRVPKSFPFNTSQVYKKTLFVEFTDHLFNIAKPRPPWMGLLGPTIQAEVYDTVVITLKNMASHPVSLHAVGVSYWKASEGAEYDDQTSQREKEDDKVFPGGSHTYVWQVLKENGPMGSDPPCLTYSYLSHVDLVKDLNSGLIGALLVCREGSLAKEKTQTLAKFILLFAVFDEGKSWHSETKNSLMQDRDAASARAWPKMHTVNGYVNRTLPGLIGCHRKSVYWHVIGMGTTPEVHSIFLEGHTFLVRNHRQASLGISPITFLTAQTGLRDLGQFLLFCHIPSHQHDGMEAYVKVDSCPEEPQLRMKNNEEAEDYDDDLTDSEMDVVRFDDDNSPSIIQARSGAKKHPKTWVHYIAAEEEDWDYAPLVLAPDDRSYKSQYLNNGPQRIGRKYKKVRFMAYTDETFKTREAIQHESGILGPLLYGEVGDTLLIIFKNQASRPYNIYPHGITDVRPLYSRRLPKGVKHLKDFPILPGEIFKYKWTITVEDGPTKSDPRCLTRYYSSFVNWERDLASGLIGPLLICYKESVDQRGNQIMSDKRNVILFSVFDENRSWYLTENIQRFLPNPAGVQLEDPEFQASNIMHSINGYVFDSLQLSVCLHEVAYWYILSIGAQTDFLSVFFSGYTFKHKGVYEDTLTLFPFSGETVFMEMENPGLWILGCHNSDFRNRGMTALLKVSSCDWNTGDYEEDSYEDISAYFDSKNNAIEPRSFSQNPPVLKRHQREGTRTTLQSDQEEIDYDDTISVEMKKEDFDIYDEDENQSPRSFQKKTRHYFIAAVERLWDYGMSSSPHVLRNRAQSGSVPQFKKVVFQEFTDGSFTQPLYRGELNEHLGLLGPYIRAEVEDNIMVTFRNQASRPYSFYSSLISYEEDQRQGAEPRKNFVKPNETKTYFWKVQHHMAPTKDEFDCKAWAYFSDVDLEKDVHSGLIGPLLVCHTNTLNPAHGRQVTVQEFALFFTIFDETKSWYFTENMERNCRAPCNIQMEDPTFKENYRFHAINGYIMDTLPGLVMAQDQRIRWYLLSMGSNENIHSIHFSGHVFTVRKKEEYKMALYNLYPGVFETVEMLPSKAGIWRVECLIGEHLHAGMSTLFLVYSNKCQNPLGMASGHIRDFQITASGQYGQWAPKLARLHYSGSINAWSTKEPFSWIKVDLLAPMIIHGIKTQGARQKFSSLYISQFIIMYSLDGKKWQTYRGNSTGTDMVFFGNVDSSGIKHNIFNPPIIARYIRLHPTHYSIRSTLRMELMGCDLNSCSMPLGMESKAISDAQITASSYFTNMFATWSPSKARLHLQGRSNAWRPQVNNPKEWLQVDFQKTMKVTGVTTQGVKSLDTSMYVKEFLISSSQDGHQWTLFFQNGKVKVFQGNQDSFTPVVNSLDPPLLTRYLRIHPQSWEHQIALRMEVLGCEAQDLY

SEQ ID NO: 2101 - DNA, 4371 bp, synthetic construct
  misc_feature 1..4371: note = Variant of human B-domain deleted Factor VIII
  source 1..4371: mol_type = other DNA
atgcagattgaactgtctacctgcttcttcctctgtttgctgaggttctgctttagcgccactagacggtactaccttggcgctgtggagctgtcctgggactatatgcagagtgatttgggagagcttcccgtcgacgcacgatttcctcctcgcgttccaaagtcatttccctttaacacaagccaggtgtacaagaagacgctcttcgtcgaattcaccgatcacctgttcaatatcgccaaacccagaccaccatggatgggtcttttggggcctaccatacaagcggaggtgtatgacacagttgttatcactctcaagaacatggcttctcatccggtaagtcttcacgcagtgggcgtgtcctactggaaagcttcagaaggagccgagtatgatgatcagacatcccagagggagaaagaagacgacaaggtatttccaggtgggtctcatacctatgtgtggcaagtgctcaaagagaatggccctatgggcagcgatccgccgtgtttgacttacagctacctttcacacgttgacctcgtcaaggacctcaactccgggttgattggagccttgttggtatgcagggaaggatctcttgccaaagagaagacacagaccctggccaagtttatccttctctttgctgtgttcgatgagggcaaaagttggcatagcgaaacgaagaattccctcatgcaggatcgcgacgcagccagcgccagagcttggcccaagatgcacactgtgaacggatatgtcaataggacgcttcctggcttgattgggtgtcatcggaaaagtgtctactggcacgtgatcggaatggggacaacaccagaggtccactccatatttctcgaaggccataccttccttgttcgaaaccacagacaggcatccttggggatctctcccattacctttctcactgcccaaacgggtcttcgtgacttgggtcagttccttctcttttgccatatcccgtcacaccagcatgatggtatggaagcttatgtgaaagtcgacagttgtcctgaggagccacagttgcgcatgaagaataatgaagaagccgaggattacgacgacgatctcaccgattctgagatggacgtggtgaggtttgatgacgacaactctccctccatcattcaagctcggagcggggcgaagaaacaccccaagacttgggtccactatatagcggcggaagaggaggattgggattacgctcctcttgtattggcaccagatgaccgctcatacaaaagccagtacctcaacaacggaccgcagagaattggccggaagtataagaaagtgcgatttatggcctatacagacgaaacctttaagacaagggaggccatccagcatgagagtgggattttgggacctcttctttacggcgaagttggtgataccctcctcatcatcttcaagaatcaagcttctcgcccctataacatttacccacacgggatcactgacgttaggcctttgtatagcagaagacttcccaaaggcgtgaagcatctcaaagacttccccattttgccaggcgagatctttaagtacaaatggaccattacagtggaagatggaccgactaaatcagaccctcgatgccttacgcggtactattcctccttcgtgaattgggagagagatttggcaagcggactcataggaccactcctcatctgttacaaggaatctgtagaccagaggggtaaccagattatgagtgataaacgcaatgtgatcctttttagcgtcttcgacgagaaccggtcctggtacttgaccgagaatatacaaaggttccttcccaaccccgcaggcgttcagttggaagaccctgagtttcaggccagcaatattatgcactcaatcaacggctatgtgtttgatagtctccagctttctgtttgcctccatgaagtagcctattggtacatcttgtcaattggtgctcaaacagacttcctctccgtcttcttctccggctacacctttaagcacaagggcgtgtatgaggacactctcacactctttccattttctggagaaaccgtgttcatggaaatggagaatccaggcctttggatcttgggttgccacaacagtgattttcgcaatcggggaatgactgctctcctcaaagtcagcagctgtgattggaacacaggcgactattatggggattcttacgaggacataagtgcctactttgactccaagaataacgccattgagcccagatcattctcccagaatcctcccgtgcttaaaaggcatcagcgcgaaggtaccagaactactcttcagtctgatcaagaggagattgactatgacgacaccattagcgtggaaatgaagaaggaggatttcgatatctatgacgaagatgagaaccagtctccgcggagctttcagaagaagacgcgacactacttcattgcagcagtcgaaaggctttgggactacggtatgtcatcatcccctcatgtgttgcgcaatagagctcagagtggaagtgttccacagttcaagaaagtcgtctttcaagagtttacagatggcagcttcacacagcctctctatcggggcgagcttaacgaacatttgggactccttggtccctatatccgagccgaagtggaggacaacattatggttacctttaggaatcaagcctctcgcccctacagcttctactcctccctcatcagttatgaggaggatcagagacaaggcgctgaaccacggaagaactttgtgaaaccgaatgagacgaagacctacttctggaaagtacagcaccacatggcccccacaaaagacgaattcgattgcaaagcatgggcgtatttttcagacgttgacttggagaaagatgtacattcaggacttattggtcctttgttggtgtgtcacactaacactctcaatccagcccatggcaggcaggtgacagtccaggaattcgctcttttctttaccatctttgatgagaccaagtcctggtacttcacggaaaacatggagcgcaattgcagagccccctgtaacatacagatggaggaccctacctttaaggaaaattatcggttccacgcaatcaacggatacattatggatacactccctggccttgtgatggctcaggaccaacgaatcaggtggtacctcctcagcatgggttctaatgagaacatacactccattcacttttcaggacatgtgttcactgtccggaagggggaagagtataagatggccctctacaatttgtatccaggcgtgtttgagaccgttgaaatgcttccctctaaagctggcatctggagagtagagtgcttgatcggagaacatcttcacgcaggtatgagcaccttgttcctcgtgtacagcaacaaatgtcagaatccacttggcatggccagtggacacattcgcgactttcagatcacagcatctggccagtatggacaatgggccccaaagttggctcgcctccattactccggtagcataaatgcgtggtccactaaagaacctttcagctggattaaggtcgatcttcttgcccccatgatcatccacggcattaagacacagggagcgaggcagaaattctcctccctctacatctcacagttcattattatgtatagtttggacggcaagaagtggcaaacttatagaggtaacagtactggaacagacatggtgttcttcggcaacgttgatagctctggcatcaaacacaacatctttaatcctcccataatagctcggtacatcagattgcatccgacccactacagcattaggagtacactccgaatggagcttatgggttgcgacttgaattcctgttcaatgccactcggaatggagtctaaagccatctctgatgcacagataaccgccagtagctactttacgaacatgtttgctacgtggtcaccctctaaggcaaggcttcatttgcaaggccggtctaatgcctggagacctcaggtgaacaacccgaaagaatggctccaggtggactttcagaagaccatgaaagtaacaggtgtcactactcagggagttaagtccttggatactagcatgtatgtgaaggagttccttatttcctcatcacaagatggccaccagtggaccctcttctttcagaatggtaaggtcaaagtgtttcagggcaatcaagacagcttcacacccgtggtgaacagtcttgatcctccactcttgacacgataccttcgaatccatccacagtcttgggagcaccagattgcattgcgcatggaagtacttggatgcgaggctcaggacctctac

SEQ ID NO: 2102 - protein, 1457 aa, synthetic construct
  REGION 1..1457: note = Variant of human B-domain deleted Factor VIII
MQIELSTCFFLCLLRFCFSATRRYYLGAVELSWDYMQSDLGELPVDARFPPRVPKSFPFNTSQVYKKTLFVEFTDHLFNIAKPRPPWMGLLGPTIQAEVYDTVVITLKNMASHPVSLHAVGVSYWKASEGAEYDDQTSQREKEDDKVFPGGSHTYVWQVLKENGPMGSDPPCLTYSYLSHVDLVKDLNSGLIGALLVCREGSLAKEKTQTLAKFILLFAVFDEGKSWHSETKNSLMQDRDAASARAWPKMHTVNGYVNRTLPGLIGCHRKSVYWHVIGMGTTPEVHSIFLEGHTFLVRNHRQASLGISPITFLTAQTGLRDLGQFLLFCHIPSHQHDGMEAYVKVDSCPEEPQLRMKNNEEAEDYDDDLTDSEMDVVRFDDDNSPSIIQARSGAKKHPKTWVHYIAAEEEDWDYAPLVLAPDDRSYKSQYLNNGPQRIGRKYKKVRFMAYTDETFKTREAIQHESGILGPLLYGEVGDTLLIIFKNQASRPYNIYPHGITDVRPLYSRRLPKGVKHLKDFPILPGEIFKYKWTITVEDGPTKSDPRCLTRYYSSFVNWERDLASGLIGPLLICYKESVDQRGNQIMSDKRNVILFSVFDENRSWYLTENIQRFLPNPAGVQLEDPEFQASNIMHSINGYVFDSLQLSVCLHEVAYWYILSIGAQTDFLSVFFSGYTFKHKGVYEDTLTLFPFSGETVFMEMENPGLWILGCHNSDFRNRGMTALLKVSSCDWNTGDYYGDSYEDISAYFDSKNNAIEPRSFSQNPPVLKRHQREGTRTTLQSDQEEIDYDDTISVEMKKEDFDIYDEDENQSPRSFQKKTRHYFIAAVERLWDYGMSSSPHVLRNRAQSGSVPQFKKVVFQEFTDGSFTQPLYRGELNEHLGLLGPYIRAEVEDNIMVTFRNQASRPYSFYSSLISYEEDQRQGAEPRKNFVKPNETKTYFWKVQHHMAPTKDEFDCKAWAYFSDVDLEKDVHSGLIGPLLVCHTNTLNPAHGRQVTVQEFALFFTIFDETKSWYFTENMERNCRAPCNIQMEDPTFKENYRFHAINGYIMDTLPGLVMAQDQRIRWYLLSMGSNENIHSIHFSGHVFTVRKGEEYKMALYNLYPGVFETVEMLPSKAGIWRVECLIGEHLHAGMSTLFLVYSNKCQNPLGMASGHIRDFQITASGQYGQWAPKLARLHYSGSINAWSTKEPFSWIKVDLLAPMIIHGIKTQGARQKFSSLYISQFIIMYSLDGKKWQTYRGNSTGTDMVFFGNVDSSGIKHNIFNPPIIARYIRLHPTHYSIRSTLRMELMGCDLNSCSMPLGMESKAISDAQITASSYFTNMFATWSPSKARLHLQGRSNAWRPQVNNPKEWLQVDFQKTMKVTGVTTQGVKSLDTSMYVKEFLISSSQDGHQWTLFFQNGKVKVFQGNQDSFTPVVNSLDPPLLTRYLRIHPQSWEHQIALRMEVLGCEAQDLY

SEQ ID NO: 2103 - DNA, 4371 bp, synthetic construct
  misc_feature 1..4371: note = Variant of human B-domain deleted Factor VIII
  source 1..4371: mol_type = other DNA
atgcagattgaactgtctacctgcttcttcctctgtttgctgaggttctgctttagcgccactagacggtactaccttggcgctgtggagctgtcctgggactatatgcagagtgatttgggagagcttcccgtcgacgcacgatttcctcctcgcgttccaaagtcatttccctttaacacaagccaggtgtacaagaagacgctcttcgtcgaattcaccgatcacctgttcaatatcgccaaacccagaccaccatggatgggtcttttggggcctaccatacaagcggaggtgtatgacacagttgttatcactctcaagaacatggcttctcatccggtaagtcttcacgcagtgggcgtgtcctactggaaagcttcagaaggagccgagtatgatgatcagacatcccagagggagaaagaagacgacaaggtatttccaggtgggtctcatacctatgtgtggcaagtgctcaaagagaatggccctatgggcagcgatccgccgtgtttgacttacagctacctttcacacgttgacctcgtcaaggacctcaactccgggttgattggagccttgttggtatgcagggaaggatctcttgccaaagagaagacacagaccctggccaagtttatccttctctttgctgtgttcgatgagggcaaaagttggcatagcgaaacgaagaattccctcatgcaggatcgcgacgcagccagcgccagagcttggcccaagatgcacactgtgaacggatatgtcaataggacgcttcctggcttgattgggtgtcatcggaaaagtgtctactggcacgtgatcggaatggggacaacaccagaggtccactccatatttctcgaaggccataccttccttgttcgaaaccacagacaggcatccttggggatctctcccattacctttctcactgcccaaacgggtcttcgtgacttgggtcagttccttctcttttgccatatcccgtcacaccagcatgatggtatggaagcttatgtgaaagtcgacagttgtcctgaggagccacagttgcgcatgaagaataatgaagaagccgaggattacgacgacgatctcaccgattctgagatggacgtggtgaggtttgatgacgacaactctccctccatcattcaagctcggagcggggcgaagaaacaccccaagacttgggtccactatatagcggcggaagaggaggattgggattacgctcctcttgtattggcaccagatgaccgctcatacaaaagccagtacctcaacaacggaccgcagagaattggccggaagtataagaaagtgcgatttatggcctatacagacgaaacctttaagacaagggaggccatccagcatgagagtgggattttgggacctcttctttacggcgaagttggtgataccctcctcatcatcttcaagaatcaagcttctcgcccctataacatttacccacacgggatcactgacgttaggcctttgtatagcagaagacttcccaaaggcgtgaagcatctcaaagacttccccattttgccaggcgagatctttaagtacaaatggaccattacagtggaagatggaccgactaaatcggaccctcgatgccttacgcggtactattcctccttcgtgaattgggagagagatttggcaagcggactcataggaccactcctcatctgttacaaggaatctgtagaccagaggggtaaccagattatgagtgataaacgcaatgtgatcctttttagcgtcttcgacgagaaccggtcctggtacttgaccgagaatatacaaaggttccttcccaaccccgcaggcgttcagttggaagaccctgagtttcaggccagcaatattatgcactcaatcaacggctatgtgtttgatagtctccagctttctgtttgcctccatgaagtagcctattggtacatcttgtcaattggtgctcaaacagacttcctctccgtcttcttctccggctacacctttaagcacaagggcgtgtatgaggacactctcacactctttccattttctggagaaaccgtgttcatggaaatggagaatccaggcctttggatcttgggttgccacaacagtgattttcgcaatcggggaatgactgctctcctcaaagtcagcagctgtgattggaacacaggcgactattatgaggattcttacgaggacataagtgcctactttgactccgagaataacgccattgagcccagatcattctcccagaatcctcccgtgcttaaaaggcatcagcgcgaaggtaccagaactactcttcagtctgatcaagaggagattgactatgacgacaccattagcgtggaaatgaagaaggaggatttcgatatctatgacgaagatgagaaccagtctccgcggagctttcagaagaagacgcgacactacttcattgcagcagtcgaaaggctttgggactacggtatgtcatcatcccctcatgtgttgcgcaatagagctcagagtggaagtgttccacagttcaagaaagtcgtctttcaagagtttacagatggcagcttcacacagcctctctatcggggcgagcttaacgaacatttgggactccttggtccctatatccgagccgaagtggaggacaacattatggttacctttaggaatcaagcctctcgcccctacagcttctactcctccctcatcagttatgaggaggatcagagacaaggcgctgaaccacggaagaactttgtgaaaccgaatgagacgaagacctacttctggaaagtacagcaccacatggcccccacaaaagacgaattcgattgcaaagcatgggcgtatttttcagacgttgacttggagaaagatgtacattcaggacttattggtcctttgttggtgtgtcacactaacactctcaatccagcccatggcaggcaggtgacagtccaggaattcgctcttttctttaccatctttgatgagaccaagtcctggtacttcacggaaaacatggagcgcaattgcagagccccctgtaacatacagatggaggaccctacctttaaggaaaattatcggttccacgcaatcaacggatacattatggatacactccctggccttgtgatggctcaggaccaacgaatcaggtggtacctcctcagcatgggttctaatgaaaacatacactccattcacttttcaggacatgtgttcactgtccggaagggggaagagtataagatggccctctacaatttgtatccaggcgtgtttgagaccgttgaaatgcttccctctaaagctggcatctggagagtagagtgcttgatcggagaacatcttcacgcaggtatgagcaccttgttcctcgtgtacagcaacaaatgtcagaatccacttggcatggccagtggacacattcgcgactttcagatcacagcatctggccagtatggacaatgggccccaaagttggctcgcctccattactccggtagcataaatgcgtggtccactaaagaacctttcagctggattaaggtcgatcttcttgcccccatgatcatccacggcattaagacacagggagcgaggcagaaattctcctccctctacatctcacagttcattattatgtatagtttggacggcaagaagtggcaaacttatagaggtaacagtactggaacagacatggtgttcttcggcaacgttgatagctctggcatcaaacacaacatctttaatcctcccataatagctcggtacatcagattgcatccgacccactacagcattaggagtacactccgaatggagcttatgggttgcgacttgaattcctgttcaatgccactcggaatggagtctaaagccatctctgatgcacagataaccgccagtagctactttacgaacatgtttgctacgtggtcaccctctaaggcaaggcttcatttgcaaggccggtctaatgcctggagacctcaggtgaacaacccgaaagaatggctccaggtggactttcagaagaccatgaaagtaacaggtgtcactactcagggagttaagtccttggatactagcatgtatgtgaaggagttccttatttcctcatcacaagatggccaccagtggaccctcttctttcagaatggtaaggtcaaagtgtttcagggcaatcaagacagcttcacacccgtggtgaacagtcttgatcctccactcttgacacgataccttcgaatccatccacagtcttgggagcaccagattgcattgcgcatggaagtacttggatgcgaggctcaggacctctac

SEQ ID NO: 2104 - protein, 1457 aa, synthetic construct
  REGION 1..1457: note = Variant of human B-domain deleted Factor VIII
MQIELSTCFFLCLLRFCFSATRRYYLGAVELSWDYMQSDLGELPVDARFPPRVPKSFPFNTSQVYKKTLFVEFTDHLFNIAKPRPPWMGLLGPTIQAEVYDTVVITLKNMASHPVSLHAVGVSYWKASEGAEYDDQTSQREKEDDKVFPGGSHTYVWQVLKENGPMGSDPPCLTYSYLSHVDLVKDLNSGLIGALLVCREGSLAKEKTQTLAKFILLFAVFDEGKSWHSETKNSLMQDRDAASARAWPKMHTVNGYVNRTLPGLIGCHRKSVYWHVIGMGTTPEVHSIFLEGHTFLVRNHRQASLGISPITFLTAQTGLRDLGQFLLFCHIPSHQHDGMEAYVKVDSCPEEPQLRMKNNEEAEDYDDDLTDSEMDVVRFDDDNSPSIIQARSGAKKHPKTWVHYIAAEEEDWDYAPLVLAPDDRSYKSQYLNNGPQRIGRKYKKVRFMAYTDETFKTREAIQHESGILGPLLYGEVGDTLLIIFKNQASRPYNIYPHGITDVRPLYSRRLPKGVKHLKDFPILPGEIFKYKWTITVEDGPTKSDPRCLTRYYSSFVNWERDLASGLIGPLLICYKESVDQRGNQIMSDKRNVILFSVFDENRSWYLTENIQRFLPNPAGVQLEDPEFQASNIMHSINGYVFDSLQLSVCLHEVAYWYILSIGAQTDFLSVFFSGYTFKHKGVYEDTLTLFPFSGETVFMEMENPGLWILGCHNSDFRNRGMTALLKVSSCDWNTGDYYEDSYEDISAYFDSENNAIEPRSFSQNPPVLKRHQREGTRTTLQSDQEEIDYDDTISVEMKKEDFDIYDEDENQSPRSFQKKTRHYFIAAVERLWDYGMSSSPHVLRNRAQSGSVPQFKKVVFQEFTDGSFTQPLYRGELNEHLGLLGPYIRAEVEDNIMVTFRNQASRPYSFYSSLISYEEDQRQGAEPRKNFVKPNETKTYFWKVQHHMAPTKDEFDCKAWAYFSDVDLEKDVHSGLIGPLLVCHTNTLNPAHGRQVTVQEFALFFTIFDETKSWYFTENMERNCRAPCNIQMEDPTFKENYRFHAINGYIMDTLPGLVMAQDQRIRWYLLSMGSNENIHSIHFSGHVFTVRKGEEYKMALYNLYPGVFETVEMLPSKAGIWRVECLIGEHLHAGMSTLFLVYSNKCQNPLGMASGHIRDFQITASGQYGQWAPKLARLHYSGSINAWSTKEPFSWIKVDLLAPMIIHGIKTQGARQKFSSLYISQFIIMYSLDGKKWQTYRGNSTGTDMVFFGNVDSSGIKHNIFNPPIIARYIRLHPTHYSIRSTLRMELMGCDLNSCSMPLGMESKAISDAQITASSYFTNMFATWSPSKARLHLQGRSNAWRPQVNNPKEWLQVDFQKTMKVTGVTTQGVKSLDTSMYVKEFLISSSQDGHQWTLFFQNGKVKVFQGNQDSFTPVVNSLDPPLLTRYLRIHPQSWEHQIALRMEVLGCEAQDLY

SEQ ID NO: 2105 - DNA, 4371 bp, synthetic construct
  misc_feature 1..4371: note = Variant of human B-domain deleted Factor VIII
  source 1..4371: mol_type = other DNA
atgcagattgaactgtctacctgcttcttcctctgtttgctgaggttctgctttagcgccactagacggtactaccttggcgctgtggagctgtcctgggactatatgcagagtgatttgggagagcttcccgtcgacgcacgatttcctcctcgcgttccaaagtcatttccctttaacacaagccaggtgtacaagaagacgctcttcgtcgaattcaccgatcacctgttcaatatcgccaaacccagaccaccatggatgggtcttttggggcctaccatacaagcggaggtgtatgacacagttgttatcactctcaagaacatggcttctcatccggtaagtcttcacgcagtgggcgtgtcctactggaaagcttcagaaggagccgagtatgatgatcagacatcccagagggagaaagaagacgacaaggtatttccaggtgggtctcatacctatgtgtggcaagtgctcaaagagaatggccctatgggcagcgatccgccgtgtttgacttacagctacctttcacacgttgacctcgtcaaggacctcaactccgggttgattggagccttgttggtatgcagggaaggatctcttgccaaagagaagacacagaccctggccaagtttatccttctctttgctgtgttcgatgagggcaaaagttggcatagcgaaacgaagaattccctcatgcaggatcgcgacgcagccagcgccagagcttggcccaagatgcacactgtgaacggatatgtcaataggacgcttcctggcttgattgggtgtcatcggaaaagtgtctactggcacgtgatcggaatggggacaacaccagaggtccactccatatttctcgaaggccataccttccttgttcgaaaccacagacaggcatccttggggatctctcccattacctttctcactgcccaaacgggtcttcgtgacttgggtcagttccttctcttttgccatatcccgtcacaccagcatgatggtatggaagcttatgtgaaagtcgacagttgtcctgaggagccacagttgcgcatgaagaataatgaagaagccgaggattacgacgacgatctcaccgattctgagatggacgtggtgaggtttgatgacgacaactctccctccatcattcaagctcggagcggggcgaagaaacaccccaagacttgggtccactatatagcggcggaagaggaggattgggattacgctcctcttgtattggcaccagatgaccgctcatacaaaagccagtacctcaacaacggaccgcagagaattggccggaagtataagaaagtgcgatttatggcctatacagacgaaacctttaagacaagggaggccatccagcatgagagtgggattttgggacctcttctttacggcgaagttggtgataccctcctcatcatcttcaagaatcaagcttctcgcccctataacatttacccacacgggatcactgacgttaggcctttgtatagcagaagacttcccaaaggcgtgaagcatctcaaagacttccccattttgccaggcgagatctttaagtacaaatggaccattacagtggaagatggaccgactaaatcggaccctcgatgccttacgcggtactattcctccttcgtgaattgggagagagatttggcaagcggactcataggaccactcctcatctgttacaaggaatctgtagaccagaggggtaaccagattatgagtgataaacgcaatgtgatcctttttagcgtcttcgacgagaaccggtcctggtacttgaccgagaatatacaaaggttccttcccaaccccgcaggcgttcagttggaagaccctgagtttcaggccagcaatattatgcactcaatcaacggctatgtgtttgatagtctccagctttctgtttgcctccatgaagtagcctattggtacatcttgtcaattggtgctcaaacagacttcctctccgtcttcttctccggctacacctttaagcacaagggcgtgtatgaggacactctcacactctttccattttctggagaaaccgtgttcatggaaatggagaatccaggcctttggatcttgggttgccacaacagtgattttcgcaatcggggaatgactgctctcctcaaagtcagcagctgtgattggaacacaggcgactattatgaggattcttacgaggacataagtgcctactttgactccgagaataacgccattgagcccagatcattctcccagaatcctcccgtgcttaaaaggcatcagcgcgaaggtaccagaactactcttcagtctgatcaagaggagattgactatgacgacaccattagcgtggaaatgaagaaggaagatttcgatatccaggacgagtcggggaaccagtctccgcggagctttcagaagaagacgcgacactacttcattgcagcagtcgaaaggctttgggactacggtatgtcatcatcccctcatgtgttgcgcaatagagctcagagtggaagtgttccacagttcaagaaagtcgtctttcaagagtttacagatggcagcttcacacagcctctctatcggggcgagcttaacgaacatttgggactccttggtccctatatccgagccgaagtggaggacaacattatggttacctttaggaatcaagcctctcgcccctacagcttctactcctccctcatcagttatgaggaggatcagagacaaggcgctgaaccacggaagaactttgtgaaaccgaatgagacgaagacctacttctggaaagtacagcaccacatggcccccacaaaagacgaattcgattgcaaagcatgggcgtatttttcagacgttgacttggagaaagatgtacattcaggacttattggtcctttgttggtgtgtcacactaacactctcaatccagcccatggcaggcaggtgacagtccaggaattcgctcttttctttaccatctttgatgagaccaagtcctggtacttcacggaaaacatggagcgcaattgcagagccccctgtaacatacagatggaggaccctacctttaaggaaaattatcggttccacgcaatcaacggatacattatggatacactccctggccttgtgatggctcaggaccaacgaatcaggtggtacctcctcagcatgggttctaatgagaacatacactccattcacttttcaggacatgtgttcactgtccggaaggcggaagagtataagatggccctctacaatttgtatccaggcgtgtttgagaccgttgaaatgcttcccattaaagctggcatctggagagtagagtgcttgatcggagaacatcttcacgcaggtatgagcaccttgttcctcgtgtacagcaacaaatgtcagaatccacttggcatggccagtggacacattcgcgactttcagatcacagcatctggccagtatggacaatgggccccaaagttggctcgcctccattactccggtagcataaatgcgtggtccactaaagaacctttcagctggattaaggtcgatcttcttgcccccatgatcatccacggcattaagacacagggagcgaggcagaaattctcctccctctacatctcacagttcattattatgtatagtttggacggcaagaagtggcaaacttatagaggtaacagtactggaacagacatggtgttcttcggcaacgttgatagctctggcatcaaacacaacatctttaatcctcccataatagctcggtacatcagattgcatccgacccactacagcattaggagtacactccgaatggagcttatgggttgcgacttgaattcctgttcaatgccactcggaatggagtctaaagccatctctgatgcacagataaccgccagtagctactttacgaacatgtttgctacgtggtcaccctctaaggcaaggcttcatttgcaaggccggtctaatgcctggagacctcaggtgaacaacccgaaagaatggctccaggtggactttcagaagaccatgaaagtaacaggtgtcactactcagggagttaagtccttggatactagcatgtatgtgaaggagttccttatttcctcatcacaagatggccaccagtggaccctcttctttcagaatggtaaggtcaaagtgtttcagggcaatcaagacagcttcacacccgtggtgaacagtcttgatcctccactcttgacacgataccttcgaatccatccacagtcttgggagcaccagattgcattgcgcatggaagtacttggatgcgaggctcaggacctctac

SEQ ID NO: 2106 - protein, 1457 aa, synthetic construct
  REGION 1..1457: note = Variant of human B-domain deleted Factor VIII
MQIELSTCFFLCLLRFCFSATRRYYLGAVELSWDYMQSDLGELPVDARFPPRVPKSFPFNTSQVYKKTLFVEFTDHLFNIAKPRPPWMGLLGPTIQAEVYDTVVITLKNMASHPVSLHAVGVSYWKASEGAEYDDQTSQREKEDDKVFPGGSHTYVWQVLKENGPMGSDPPCLTYSYLSHVDLVKDLNSGLIGALLVCREGSLAKEKTQTLAKFILLFAVFDEGKSWHSETKNSLMQDRDAASARAWPKMHTVNGYVNRTLPGLIGCHRKSVYWHVIGMGTTPEVHSIFLEGHTFLVRNHRQASLGISPITFLTAQTGLRDLGQFLLFCHIPSHQHDGMEAYVKVDSCPEEPQLRMKNNEEAEDYDDDLTDSEMDVVRFDDDNSPSIIQARSGAKKHPKTWVHYIAAEEEDWDYAPLVLAPDDRSYKSQYLNNGPQRIGRKYKKVRFMAYTDETFKTREAIQHESGILGPLLYGEVGDTLLIIFKNQASRPYNIYPHGITDVRPLYSRRLPKGVKHLKDFPILPGEIFKYKWTITVEDGPTKSDPRCLTRYYSSFVNWERDLASGLIGPLLICYKESVDQRGNQIMSDKRNVILFSVFDENRSWYLTENIQRFLPNPAGVQLEDPEFQASNIMHSINGYVFDSLQLSVCLHEVAYWYILSIGAQTDFLSVFFSGYTFKHKGVYEDTLTLFPFSGETVFMEMENPGLWILGCHNSDFRNRGMTALLKVSSCDWNTGDYYEDSYEDISAYFDSENNAIEPRSFSQNPPVLKRHQREGTRTTLQSDQEEIDYDDTISVEMKKEDFDIQDESGNQSPRSFQKKTRHYFIAAVERLWDYGMSSSPHVLRNRAQSGSVPQFKKVVFQEFTDGSFTQPLYRGELNEHLGLLGPYIRAEVEDNIMVTFRNQASRPYSFYSSLISYEEDQRQGAEPRKNFVKPNETKTYFWKVQHHMAPTKDEFDCKAWAYFSDVDLEKDVHSGLIGPLLVCHTNTLNPAHGRQVTVQEFALFFTIFDETKSWYFTENMERNCRAPCNIQMEDPTFKENYRFHAINGYIMDTLPGLVMAQDQRIRWYLLSMGSNENIHSIHFSGHVFTVRKAEEYKMALYNLYPGVFETVEMLPIKAGIWRVECLIGEHLHAGMSTLFLVYSNKCQNPLGMASGHIRDFQITASGQYGQWAPKLARLHYSGSINAWSTKEPFSWIKVDLLAPMIIHGIKTQGARQKFSSLYISQFIIMYSLDGKKWQTYRGNSTGTDMVFFGNVDSSGIKHNIFNPPIIARYIRLHPTHYSIRSTLRMELMGCDLNSCSMPLGMESKAISDAQITASSYFTNMFATWSPSKARLHLQGRSNAWRPQVNNPKEWLQVDFQKTMKVTGVTTQGVKSLDTSMYVKEFLISSSQDGHQWTLFFQNGKVKVFQGNQDSFTPVVNSLDPPLLTRYLRIHPQSWEHQIALRMEVLGCEAQDLY

SEQ ID NO: 2107 - DNA, 4371 bp, synthetic construct
  misc_feature 1..4371: note = Variant of human B-domain deleted Factor VIII
  source 1..4371: mol_type = other DNA
atgcagattgaactgtctacctgcttcttcctctgtttgctgaggttctgctttagcgccactagacggtactaccttggcgctgtggagctgtcctgggactatatgcagagtgatttgggagagcttcccgtcgacgcacgatttcctcctcgcgttccaaagtcatttccctttaacacaagccaggtgtacaagaagacgctcttcgtcgaattcaccgatcacctgttcaatatcgccaaacccagaccaccatggatgggtcttttggggcctaccatacaagcggaggtgtatgacacagttgttatcactctcaagaacatggcttctcatccggtaagtcttcacgcagtgggcgtgtcctactggaaagcttcagaaggagccgagtatgatgatcagacatcccagagggagaaagaagacgacaaggtatttccaggtgggtctcatacctatgtgtggcaagtgctcaaagagaatggccctatggcaagcgatccgccgtgtttgacttacagctacctttcacacgttgacctcgtcaaggacctcaactccgggttgattggagccttgttggtatgcagggaaggatctcttgccaaagagaagacacagaccctggccaagtttatccttctctttgctgtgttcgatgagggcaaaagttggcatagcgaaacgaagaattccctcatgcaggatcgcgacgcagccagcgccagagcttggcccaagatgcacactgtgaacggatatgtcaataggacgcttcctggcttgattgggtgtcatcggaaaagtgtctactggcacgtgatcggaatggggacaacaccagaggtccactccatatttctcgaaggccataccttccttgttcgaaaccacagacaggcatccttggggatctctcccattacctttctcactgcccaaacgggtcttcgtgacttgggtcagttccttctcttttgccatatcccgtcacaccagcatgatggtatggaagcttatgtgaaagtcgacagttgtcctgaggagccacagttgcgcatgaagaataatgaagaagccgaggattacgacgacgatctcaccgattctgagatggacgtggtgaggtttgatgacgacaactctccctccatcattcaagctcggagcggggcgaagaaacaccccaagacttgggtccactatatagcggcggaagaggaggattgggattacgctcctcttgtattggcaccagatgaccgctcatacaaaagccagtacctcaacaacggaccgcagagaattggccggaagtataagaaagtgcgatttatggcctatacagacgaaacctttaagacaagggaggccatccagcatgagagtgggattttgggacctcttctttacggcgaagttggtgataccctcctcatcatcttcaagaatcaagcttctcgcccctataacatttacccacacgggatcactgacgttaggcctttgtatagcagaagacttcccaaaggcgtgaagcatctcaaagacttccccattttgccaggcgagatctttaagtacaaatggaccattacagtggaagatggaccgactaaatcagaccctcgatgccttacgcggtactattcctccttcgtgaattgggagagagatttggcaagcggactcataggaccactcctcatctgttacaaggaatctgtagaccagaggggtaaccagattatgagtgataaacgcaatgtgatcctttttagcgtcttcgacgagaaccggtcctggtacttgaccgagaatatacaaaggttccttcccaaccccgcaggcgttcagttggaagaccctgagtttcaggccagcaatattatgcactcaatcaacggctatgtgtttgatagtctccagctttctgtttgcctccatgaagtagcctattggtacatcttgtcaattggtgctcaaacagacttcctctccgtcttcttctccggctacacctttaagcacaagggcgtgtatgaggacactctcacactctttccattttctggagaaaccgtgttcatgagcatggagaatccaggcctttggatcttgggttgccacaacagtgattttcgcaatcggggaatgactgctctcctcaaagtcagcagctgtgattggaacacaggcgactatgaggaagattcttacgaggacataagtgcctactttgactccaagaataacgccattgagcccagatcattctcccagaatcctcccgtgcttaaaaggcatcagcgcgaaggtaccagaactactcttcagtctgatcaagaggagattgactatgacgacaccattagcgtggaaatgaagaaggaagatttcgatatctacgacgagtcggggaaccagtctccgcggagctttcagaagaagacgcgacactacttcattgcagcagtcgaaaggctttgggactacggtatgtcatcatcccctcatgtgttgcgcaatagagctcagagtggaagtgttccacagttcaagaaagtcgtctttcaagagtttacagatggcagcttcacacagcctctctatcggggcgagcttaacgaacatttgggactccttggtccctatatccgagccgaagtggaggacaacattatggttacctttaggaatcaagcctctcgcccctacagcttctactcctccctcatcagttatgaggaggatcagagacaaggcgctgaaccacggaagaactttgtgaaaccgaatgagacgaagacctacttctggaaagtacagcaccacatggcccccacaaaagacgaattcgattgcaaagcatgggcgtatttttcagacgttgacttggagaaagatgtacattcaggacttattggtcctttgttggtgtgtcacactaacactctcaatccagcccatggcaggcaggtgacagtccaggaattcgctcttttctttaccatctttgatgagaccaagtcctggtacttcacggaaaacatggagcgcaattgcagagccccctgtaacatacagatggaggaccctacctttaaggaaaattatcggttccacgcaatcaacggatacattatggatacactccctggccttgtgatggctcaggaccaacgaatcaggtggtacctcctcagcatgggttctaatgagaacatacactccattcacttttcaggacatgtgttcactgtccggaagaaagaagagtataagatggccctctacaatttgtatccaggcgtgtttgagaccgttgaaatgcttccctctaaagctggcatctggagagtagagtgcttgatcggagaacatcttcacgcaggtatgagcaccttgttcctcgtgtacagcaacaaatgtcagaatccacttggcatggccagtggacacattcgcgactttcagatcacagcatctggccagtatggacaatgggccccaaagttggctcgcctccattactccggtagcataaatgcgtggtccactaaagaacctttcagctggattaaggtcgatcttcttgcccccatgatcatccacggcattaagacacagggagcgaggcagaaattctcctccctctacatctcacagttcattattatgtatagtttggacggcaagaagtggcaaacttatagaggtaacagtactggaacagacatggtgttcttcggcaacgttgatagctctggcatcaaacacaacatctttaatcctcccataatagctcggtacatcagattgcatccgacccactacagcattaggagtacactccgaatggagcttatgggttgcgacttgaattcctgttcaatgccactcggaatggagtctaaagccatctctgatgcacagataaccgccagtagctactttacgaacatgtttgctacgtggtcaccctctaaggcaaggcttcatttgcaaggccggtctaatgcctggagacctcaggtgaacaacccgaaagaatggctccaggtggactttcagaagaccatgaaagtaacaggtgtcactactcagggagttaagtccttggatactagcatgtatgtgaaggagttccttatttcctcatcacaagatggccaccagtggaccctcttctttcagaatggtaaggtcaaagtgtttcagggcaatcaagacagcttcacacccgtggtgaacagtcttgatcctccactcttgacacgataccttcgaatccatccacagtcttgggagcaccagattgcattgcgcatggaagtacttggatgcgaggctcaggacctctac

SEQ ID NO: 2108 - protein, 1457 aa, synthetic construct
  REGION 1..1457: note = Variant of human B-domain deleted Factor VIII
MQIELSTCFFLCLLRFCFSATRRYYLGAVELSWDYMQSDLGELPVDARFPPRVPKSFPFNTSQVYKKTLFVEFTDHLFNIAKPRPPWMGLLGPTIQAEVYDTVVITLKNMASHPVSLHAVGVSYWKASEGAEYDDQTSQREKEDDKVFPGGSHTYVWQVLKENGPMASDPPCLTYSYLSHVDLVKDLNSGLIGALLVCREGSLAKEKTQTLAKFILLFAVFDEGKSWHSETKNSLMQDRDAASARAWPKMHTVNGYVNRTLPGLIGCHRKSVYWHVIGMGTTPEVHSIFLEGHTFLVRNHRQASLGISPITFLTAQTGLRDLGQFLLFCHIPSHQHDGMEAYVKVDSCPEEPQLRMKNNEEAEDYDDDLTDSEMDVVRFDDDNSPSIIQARSGAKKHPKTWVHYIAAEEEDWDYAPLVLAPDDRSYKSQYLNNGPQRIGRKYKKVRFMAYTDETFKTREAIQHESGILGPLLYGEVGDTLLIIFKNQASRPYNIYPHGITDVRPLYSRRLPKGVKHLKDFPILPGEIFKYKWTITVEDGPTKSDPRCLTRYYSSFVNWERDLASGLIGPLLICYKESVDQRGNQIMSDKRNVILFSVFDENRSWYLTENIQRFLPNPAGVQLEDPEFQASNIMHSINGYVFDSLQLSVCLHEVAYWYILSIGAQTDFLSVFFSGYTFKHKGVYEDTLTLFPFSGETVFMSMENPGLWILGCHNSDFRNRGMTALLKVSSCDWNTGDYEEDSYEDISAYFDSKNNAIEPRSFSQNPPVLKRHQREGTRTTLQSDQEEIDYDDTISVEMKKEDFDIYDESGNQSPRSFQKKTRHYFIAAVERLWDYGMSSSPHVLRNRAQSGSVPQFKKVVFQEFTDGSFTQPLYRGELNEHLGLLGPYIRAEVEDNIMVTFRNQASRPYSFYSSLISYEEDQRQGAEPRKNFVKPNETKTYFWKVQHHMAPTKDEFDCKAWAYFSDVDLEKDVHSGLIGPLLVCHTNTLNPAHGRQVTVQEFALFFTIFDETKSWYFTENMERNCRAPCNIQMEDPTFKENYRFHAINGYIMDTLPGLVMAQDQRIRWYLLSMGSNENIHSIHFSGHVFTVRKKEEYKMALYNLYPGVFETVEMLPSKAGIWRVECLIGEHLHAGMSTLFLVYSNKCQNPLGMASGHIRDFQITASGQYGQWAPKLARLHYSGSINAWSTKEPFSWIKVDLLAPMIIHGIKTQGARQKFSSLYISQFIIMYSLDGKKWQTYRGNSTGTDMVFFGNVDSSGIKHNIFNPPIIARYIRLHPTHYSIRSTLRMELMGCDLNSCSMPLGMESKAISDAQITASSYFTNMFATWSPSKARLHLQGRSNAWRPQVNNPKEWLQVDFQKTMKVTGVTTQGVKSLDTSMYVKEFLISSSQDGHQWTLFFQNGKVKVFQGNQDSFTPVVNSLDPPLLTRYLRIHPQSWEHQIALRMEVLGCEAQDLY

SEQ ID NO: 2109 - DNA, 4371 bp, synthetic construct
  misc_feature 1..4371: note = Variant of human B-domain deleted Factor VIII
  source 1..4371: mol_type = other DNA
atgcagattgaactgtctacctgcttcttcctctgtttgctgaggttctgctttagcgccactagacggtactaccttggcgctgtggagctgtcctgggactatatgcagagtgatttgggagagcttcccgtcgacgcacgatttcctcctcgcgttccaaagtcatttccctttaacacaagccaggtgtacaagaagacgctcttcgtcgaattcaccgatcacctgttcaatatcgccaaacccagaccaccatggatgggtcttttggggcctaccatacaagcggaggtgtatgacacagttgttatcactctcaagaacatggcttctcatccggtaagtcttcacgcagtgggcgtgtcctactggaaagcttcagaaggagccgagtatgatgatcagacatcccagagggagaaagaagacgacaaggtatttccaggtgggtctcatacctatgtgtggcaagtgctcaaagagaatggccctatggcaagcgatccgccgtgtttgacttacagctacctttcacacgttgacctcgtcaaggacctcaactccgggttgattggagccttgttggtatgcagggaaggatctcttgccaaagagaagacacagaccctggccaagtttatccttctctttgctgtgttcgatgagggcaaaagttggcatagcgaaacgaagaattccctcatgcaggatcgcgacgcagccagcgccagagcttggcccaagatgcacactgtgaacggatatgtcaataggacgcttcctggcttgattgggtgtcatcggaaaagtgtctactggcacgtgatcggaatggggacaacaccagaggtccactccatatttctcgaaggccataccttccttgttcgaaaccacagacaggcatccttggggatctctcccattacctttctcactgcccaaacgggtcttcgtgacttgggtcagttccttctcttttgccatatcccgtcacaccagcatgatggtatggaagcttatgtgaaagtcgacagttgtcctgaggagccacagttgcgcatgaagaataatgaagaagccgaggattacgacgacgatctcaccgattctgagatggacgtggtgaggtttgatgacgacaactctccctccatcattcaagctcggagcggggcgaagaaacaccccaagacttgggtccactatatagcggcggaagaggaggattgggattacgctcctcttgtattggcaccagatgaccgctcatacaaaagccagtacctcaacaacggaccgcagagaattggccggaagtataagaaagtgcgatttatggcctatacagacgaaacctttaagacaagggaggccatccagcatgagagtgggattttgggacctcttctttacggcgaagttggtgataccctcctcatcatcttcaagaatcaagcttctcgcccctataacatttacccacacgggatcactgacgttaggcctttgtatagcagaagacttcccaaaggcgtgaagcatctcaaagacttccccattttgccaggcgagatctttaagtacaaatggaccattacagtggaagatggaccgactaaatcagaccctcgatgccttacgcggtactattcctccttcgtgaattgggagagagatttggcaagcggactcataggaccactcctcatctgttacaaggaatctgtagaccagaggggtaaccagattatgagtgataaacgcaatgtgatcctttttagcgtcttcgacgagaaccggtcctggtacttgaccgagaatatacaaaggttccttcccaaccccgcaggcgttcagttggaagaccctgagtttcaggccagcaatattatgcactcaatcaacggctatgtgtttgatagtctccagctttctgtttgcctccatgaagtagcctattggtacatcttgtcaattggtgctcaaacagacttcctctccgtcttcttctccggctacacctttaagcacaagggcgtgtatgaggacactctcacactctttccattttctggagaaaccgtgttcatgagcatggagaatccaggcctttggatcttgggttgccacaacagtgattttcgcaatcggggaatgactgctctcctcaaagtcagcagctgtgattggaacacaggcgactatgaggaagattcttacgaggacataagtgcctactttgactccaagaataacgccattgagcccagatcattctcccagaatcctcccgtgcttaaaaggcatcagcgcgaaggtaccagaactactcttcagtctgatcaagaggagattgactatgacgacaccattagcgtggaaatgaagaaggaggatttcgatatctatgacgaagatgagaaccagtctccgcggagctttcagaagaagacgcgacactacttcattgcagcagtcgaaaggctttgggactacggtatgtcatcatcccctcatgtgttgcgcaatagagctcagagtggaagtgttccacagttcaagaaagtcgtctttcaagagtttacagatggcagcttcacacagcctctctatcggggcgagcttaacgaacatttgggactccttggtccctatatccgagccgaagtggaggacaacattatggttacctttaggaatcaagcctctcgcccctacagcttctactcctccctcatcagttatgaggaggatcagagacaaggcgctgaaccacggaagaactttgtgaaaccgaatgagacgaagacctacttctggaaagtacagcaccacatggcccccacaaaagacgaattcgattgcaaagcatgggcgtatttttcagacgttgacttggagaaagatgtacattcaggacttattggtcctttgttggtgtgtcacactaacactctcaatccagcccatggcaggcaggtgacagtccaggaattcgctcttttctttaccatctttgatgagaccaagtcctggtacttcacggaaaacatggagcgcaattgcagagccccctgtaacatacagatggaggaccctacctttaaggaaaattatcggttccacgcaatcaacggatacattatggatacactccctggccttgtgatggctcaggaccaacgaatcaggtggtacctcctcagcatgggttctaatagtaacatacactccattcacttttcaggacatgtgttcactgtccggaagaaagaagagtataagatggccctctacaatttgtatccaggcgtgtttgagaccgttgaaatgcttccctctaaagctggcatctggagagtagagtgcttgatcggagaacatcttcacgcaggtatgagcaccttgttcctcgtgtacagcaacaaatgtcagaatccacttggcatggccagtggacacattcgcgactttcagatcacagcatctggccagtatggacaatgggccccaaagttggctcgcctccattactccggtagcataaatgcgtggtccactaaagaacctttcagctggattaaggtcgatcttcttgcccccatgatcatccacggcattaagacacagggagcgaggcagaaattctcctccctctacatctcacagttcattattatgtatagtttggacggcaagaagtggcaaacttatagaggtaacagtactggaacagacatggtgttcttcggcaacgttgatagctctggcatcaaacacaacatctttaatcctcccataatagctcggtacatcagattgcatccgacccactacagcattaggagtacactccgaatggagcttatgggttgcgacttgaattcctgttcaatgccactcggaatggagtctaaagccatctctgatgcacagataaccgccagtagctactttacgaacatgtttgctacgtggtcaccctctaaggcaaggcttcatttgcaaggccggtctaatgcctggagacctcaggtgaacaacccgaaagaatggctccaggtggactttcagaagaccatgaaagtaacaggtgtcactactcagggagttaagtccttggatactagcatgtatgtgaaggagttccttatttcctcatcacaagatggccaccagtggaccctcttctttcagaatggtaaggtcaaagtgtttcagggcaatcaagacagcttcacacccgtggtgaacagtcttgatcctccactcttgacacgataccttcgaatccatccacagtcttgggagcaccagattgcattgcgcatggaagtacttggatgcgaggctcaggacctctac

SEQ ID NO: 2110 - protein, 1457 aa, synthetic construct
  REGION 1..1457: note = Variant of human B-domain deleted Factor VIII
MQIELSTCFFLCLLRFCFSATRRYYLGAVELSWDYMQSDLGELPVDARFPPRVPKSFPFNTSQVYKKTLFVEFTDHLFNIAKPRPPWMGLLGPTIQAEVYDTVVITLKNMASHPVSLHAVGVSYWKASEGAEYDDQTSQREKEDDKVFPGGSHTYVWQVLKENGPMASDPPCLTYSYLSHVDLVKDLNSGLIGALLVCREGSLAKEKTQTLAKFILLFAVFDEGKSWHSETKNSLMQDRDAASARAWPKMHTVNGYVNRTLPGLIGCHRKSVYWHVIGMGTTPEVHSIFLEGHTFLVRNHRQASLGISPITFLTAQTGLRDLGQFLLFCHIPSHQHDGMEAYVKVDSCPEEPQLRMKNNEEAEDYDDDLTDSEMDVVRFDDDNSPSIIQARSGAKKHPKTWVHYIAAEEEDWDYAPLVLAPDDRSYKSQYLNNGPQRIGRKYKKVRFMAYTDETFKTREAIQHESGILGPLLYGEVGDTLLIIFKNQASRPYNIYPHGITDVRPLYSRRLPKGVKHLKDFPILPGEIFKYKWTITVEDGPTKSDPRCLTRYYSSFVNWERDLASGLIGPLLICYKESVDQRGNQIMSDKRNVILFSVFDENRSWYLTENIQRFLPNPAGVQLEDPEFQASNIMHSINGYVFDSLQLSVCLHEVAYWYILSIGAQTDFLSVFFSGYTFKHKGVYEDTLTLFPFSGETVFMSMENPGLWILGCHNSDFRNRGMTALLKVSSCDWNTGDYEEDSYEDISAYFDSKNNAIEPRSFSQNPPVLKRHQREGTRTTLQSDQEEIDYDDTISVEMKKEDFDIYDEDENQSPRSFQKKTRHYFIAAVERLWDYGMSSSPHVLRNRAQSGSVPQFKKVVFQEFTDGSFTQPLYRGELNEHLGLLGPYIRAEVEDNIMVTFRNQASRPYSFYSSLISYEEDQRQGAEPRKNFVKPNETKTYFWKVQHHMAPTKDEFDCKAWAYFSDVDLEKDVHSGLIGPLLVCHTNTLNPAHGRQVTVQEFALFFTIFDETKSWYFTENMERNCRAPCNIQMEDPTFKENYRFHAINGYIMDTLPGLVMAQDQRIRWYLLSMGSNSNIHSIHFSGHVFTVRKKEEYKMALYNLYPGVFETVEMLPSKAGIWRVECLIGEHLHAGMSTLFLVYSNKCQNPLGMASGHIRDFQITASGQYGQWAPKLARLHYSGSINAWSTKEPFSWIKVDLLAPMIIHGIKTQGARQKFSSLYISQFIIMYSLDGKKWQTYRGNSTGTDMVFFGNVDSSGIKHNIFNPPIIARYIRLHPTHYSIRSTLRMELMGCDLNSCSMPLGMESKAISDAQITASSYFTNMFATWSPSKARLHLQGRSNAWRPQVNNPKEWLQVDFQKTMKVTGVTTQGVKSLDTSMYVKEFLISSSQDGHQWTLFFQNGKVKVFQGNQDSFTPVVNSLDPPLLTRYLRIHPQSWEHQIALRMEVLGCEAQDLY

SEQ ID NO: 2111 - DNA, 4371 bp, synthetic construct
  misc_feature 1..4371: note = Variant of human B-domain deleted Factor VIII
  source 1..4371: mol_type = other DNA
atgcagattgaactgtctacctgcttcttcctctgtttgctgaggttctgctttagcgccactagacggtactaccttggcgctgtggagctgtcctgggactatatgcagagtgatttgggagagcttcccgtcgacgcacgatttcctcctcgcgttccaaagtcatttccctttaacacaagccaggtgtacaagaagacgctcttcgtcgaattcaccgatcacctgttcaatatcgccaaacccagaccaccatggatgggtcttttggggcctaccatacaagcggaggtgtatgacacagttgttatcactctcaagaacatggcttctcatccggtaagtcttcacgcagtgggcgtgtcctactggaaagcttcagaaggagccgagtatgatgatcagacatcccagagggagaaagaagacgacaaggtatttccaggtgggtctcatacctatgtgtggcaagtgctcaaagagaatggccctatggcaagcgatccgccgtgtttgacttacagctacctttcacacgttgacctcgtcaaggacctcaactccgggttgattggagccttgttggtatgcagggaaggatctcttgccaaagagaagacacagaccctggccaagtttatccttctctttgctgtgttcgatgagggcaaaagttggcatagcgaaacgaagaattccctcatgcaggatcgcgacgcagccagcgccagagcttggcccaagatgcacactgtgaacggatatgtcaataggacgcttcctggcttgattgggtgtcatcggaaaagtgtctactggcacgtgatcggaatggggacaacaccagaggtccactccatatttctcgaaggccataccttccttgttcgaaaccacagacaggcatccttggggatctctcccattacctttctcactgcccaaacgggtcttcgtgacttgggtcagttccttctcttttgccatatcccgtcacaccagcatgatggtatggaagcttatgtgaaagtcgacagttgtcctgaggagccacagttgcgcatgaagaataatgaagaagccgaggattacgacgacgatctcaccgattctgagatggacgtggtgaggtttgatgacgacaactctccctccatcattcaagctcggagcggggcgaagaaacaccccaagacttgggtccactatatagcggcggaagaggaggattgggattacgctcctcttgtattggcaccagatgaccgctcatacaaaagccagtacctcaacaacggaccgcagagaattggccggaagtataagaaagtgcgatttatggcctatacagacgaaacctttaagacaagggaggccatccagcatgagagtgggattttgggacctcttctttacggcgaagttggtgataccctcctcatcatcttcaagaatcaagcttctcgcccctataacatttacccacacgggatcactgacgttaggcctttgtatagcagaagacttcccaaaggcgtgaagcatctcaaagacttccccattttgccaggcgagatctttaagtacaaatggaccattacagtggaagatggaccgactaaatcagaccctcgatgccttacgcggtactattcctccttcgtgaattgggagagagatttggcaagcggactcataggaccactcctcatctgttacaaggaatctgtagaccagaggggtaaccagattatgagtgataaacgcaatgtgatcctttttagcgtcttcgacgagaaccggtcctggtacttgaccgagaatatacaaaggttccttcccaaccccgcaggcgttcagttggaagaccctgagtttcaggccagcaatattatgcactcaatcaacggctatgtgtttgatagtctccagctttctgtttgcctccatgaagtagcctattggtacatcttgtcaattggtgctcaaacagacttcctctccgtcttcttctccggctacacctttaagcacaagggcgtgtatgaggacactctcacactctttccattttctggagaaaccgtgttcatgagtatggagaatccaggcctttggatcttgggttgccacaacagtgattttcgcaatcggggaatgactgctctcctcaaagtcagcagctgtgattggaacacaggcgactattatgaggattcttacgaggacataagtgcctactttgactccaagaataacgccattgagcccagatcattctcccagaatcctcccgtgcttaaaaggcatcagcgcgaaggtaccagaactactcttcagtctgatcaagaggagattgactatgacgacaccattagcgtggaaatgaagaaggaggatttcgatatctatgacgaagatgagaaccagtctccgcggagctttcagaagaagacgcgacactacttcattgcagcagtcgaaaggctttgggactacggtatgtcatcatcccctcatgtgttgcgcaatagagctcagagtggaagtgttccacagttcaagaaagtcgtctttcaagagtttacagatggcagcttcacacagcctctctatcggggcgagcttaacgaacatttgggactccttggtccctatatccgagccgaagtggaggacaacattatggttacctttaggaatcaagcctctcgcccctacagcttctactcctccctcatcagttatgaggaggatcagagacaaggcgctgaaccacggaagaactttgtgaaaccgaatgagacgaagacctacttctggaaagtacagcaccacatggcccccacaaaagacgaattcgattgcaaagcatgggcgtatttttcagacgttgacttggagaaagatgtacattcaggacttattggtcctttgttggtgtgtcacactaacactctcaatccagcccatggcaggcaggtgacagtccaggaattcgctcttttctttaccatctttgatgagaccaagtcctggtacttcacggaaaacatggagcgcaattgcagagccccctgtaacatacagatggaggaccctacctttaaggaaaattatcggttccacgcaatcaacggatacattatggatacactccctggccttgtgatggctcaggaccaacgaatcaggtggtacctcctcagcatgggttctaatgagaacatacactccattcacttttcaggacatgtgttcactgtccggaagaaagaagagtataagatggccctctacaatttgtatccaggcgtgtttgagaccgttgaaatgcttccctctaaagctggcatctggagagtagagtgcttgatcggagaacatcttcacgcaggtatgagcaccttgttcctcgtgtacagcaacaaatgtcagaatccacttggcatggccagtggacacattcgcgactttcagatcacagcatctggccagtatggacaatgggccccaaagttggctcgcctccattactccggtagcataaatgcgtggtccactaaagaacctttcagctggattaaggtcgatcttcttgcccccatgatcatccacggcattaagacacagggagcgaggcagaaattctcctccctctacatctcacagttcattattatgtatagtttggacggcaagaagtggcaaacttatagaggtaacagtactggaacagacatggtgttcttcggcaacgttgatagctctggcatcaaacacaacatctttaatcctcccataatagctcggtacatcagattgcatccgacccactacagcattaggagtacactccgaatggagcttatgggttgcgacttgaattcctgttcaatgccactcggaatggagtctaaagccatctctgatgcacagataaccgccagtagctactttacgaacatgtttgctacgtggtcaccctctaaggcaaggcttcatttgcaaggccggtctaatgcctggagacctcaggtgaacaacccgaaagaatggctccaggtggactttcagaagaccatgaaagtaacaggtgtcactactcagggagttaagtccttggatactagcatgtatgtgaaggagttccttatttcctcatcacaagatggccaccagtggaccctcttctttcagaatggtaaggtcaaagtgtttcagggcaatcaagacagcttcacacccgtggtgaacagtcttgatcctccactcttgacacgataccttcgaatccatccacagtcttgggagcaccagattgcattgcgcatggaagtacttggatgcgaggctcaggacctctac

SEQ ID NO: 2112 - protein, 1457 aa, synthetic construct; identical to SEQ ID NO: 2070
  REGION 1..1457: note = Variant of human B-domain deleted Factor VIII

SEQ ID NO: 2113 - DNA, 4371 bp, synthetic construct
  misc_feature 1..4371: note = Variant of human B-domain deleted Factor VIII
  source 1..4371: mol_type = other DNA
atgcagattgaactgtctacctgcttcttcctctgtttgctgaggttctgctttagcgccactagacggtactaccttggcgctgtggagctgtcctgggactatatgcagagtgatttgggagagcttcccgtcgacgcacgatttcctcctcgcgttccaaagtcatttccctttaacacaagccaggtgtacaagaagacgctcttcgtcgaattcaccgatcacctgttcaatatcgccaaacccagaccaccatggatgggtcttttggggcctaccatacaagcggaggtgtatgacacagttgttatcactctcaagaacatggcttctcatccggtaagtcttcacgcagtgggcgtgtcctactggaaagcttcagaaggagccgagtatgatgatcagacatcccagagggagaaagaagacgacaaggtatttccaggtgggtctcatacctatgtgtggcaagtgctcaaagagaatggccctatggcaagcgatccgccgtgtttgacttacagctacctttcacacgttgacctcgtcaaggacctcaactccgggttgattggagccttgttggtatgcagggaaggatctcttgccaaagagaagacacagaccctggccaagtttatccttctctttgctgtgttcgatgagggcaaaagttggcatagcgaaacgaagaattccctcatgcaggatcgcgacgcagccagcgccagagcttggcccaagatgcacactgtgaacggatatgtcaataggacgcttcctggcttgattgggtgtcatcggaaaagtgtctactggcacgtgatcggaatggggacaacaccagaggtccactccatatttctcgaaggccataccttccttgttcgaaaccacagacaggcatccttggggatctctcccattacctttctcactgcccaaacgggtcttcgtgacttgggtcagttccttctcttttgccatatcccgtcacaccagcatgatggtatggaagcttatgtgaaagtcgacagttgtcctgaggagccacagttgcgcatgaagaataatgaagaagccgaggattacgacgacgatctcaccgattctgagatggacgtggtgaggtttgatgacgacaactctccctccatcattcaagctcggagcggggcgaagaaacaccccaagacttgggtccactatatagcggcggaagaggaggattgggattacgctcctcttgtattggcaccagatgaccgctcatacaaaagccagtacctcaacaacggaccgcagagaattggccggaagtataagaaagtgcgatttatggcctatacagacgaaacctttaagacaagggaggccatccagcatgagagtgggattttgggacctcttctttacggcgaagttggtgataccctcctcatcatcttcaagaatcaagcttctcgcccctataacatttacccacacgggatcactgacgttaggcctttgtatagcagaagacttcccaaaggcgtgaagcatctcaaagacttccccattttgccaggcgagatctttaagtacaaatggaccattacagtggaagatggaccgactaaatcggaccctcgatgccttacgcggtactattcctccttcgtgaattgggagagagatttggcaagcggactcataggaccactcctcatctgttacaaggaatctgtagaccagaggggtaaccagattatgagtgataaacgcaatgtgatcctttttagcgtcttcgacgagaaccggtcctggtacttgaccgagaatatacaaaggttccttcccaaccccgcaggcgttcagttggaagaccctgagtttcaggccagcaatattatgcactcaatcaacggctatgtgtttgatagtctccagctttctgtttgcctccatgaagtagcctattggtacatcttgtcaattggtgctcaaacagacttcctctccgtcttcttctccggctacacctttaagcacaagggcgtgtatgaggacactctcacactctttccattttctggagaaaccgtgttcatgagcatggagaatccaggcctttggatcttgggttgccacaacagtgattttcgcaatcggggaatgactgctctcctcaaagtcagcagctgtgattggaacacaggcgactattacgaggattcttacgaggacataagtgcctactttgactccaaaaataacgccattgagcccagatcattctcccagaatcctcccgtgcttaaaaggcatcagcgcgaaggtaccagaactactcttcagtctgatcaagaggagattgactatgacgacaccattagcgtggaaatgaagaaggaggatttcgatatctatgacgagagtgggaaccagtctccgcggagctttcagaagaagacgcgacactacttcattgcagcagtcgaaaggctttgggactacggtatgtcatcatcccctcatgtgttgcgcaatagagctcagagtggaagtgttccacagttcaagaaagtcgtctttcaagagtttacagatggcagcttcacacagcctctctatcggggcgagcttaacgaacatttgggactccttggtccctatatccgagccgaagtggaggacaacattatggttacctttaggaatcaagcctctcgcccctacagcttctactcctccctcatcagttatgaggaggatcagagacaaggcgctgaaccacggaagaactttgtgaaaccgaatgagacgaagacctacttctggaaagtacagcaccacatggcccccacaaaagacgaattcgattgcaaagcatgggcgtatttttcagacgttgacttggagaaagatgtacattcaggacttattggtcctttgttggtgtgtcacactaacactctcaatccagcccatggcaggcaggtgacagtccaggaattcgctcttttctttaccatctttgatgagaccaagtcctggtacttcacggaaaacatggagcgcaattgcagagccccctgtaacatacagatggaggaccctacctttaaggaaaattatcggttccacgcaatcaacggatacattatggatacactccctggccttgtgatggctcaggaccaacgaatcaggtggtacctcctcagcatgggttctaatgagaacatacactccattcacttttcaggacatgtgttcactgtccggaagaaagaagagtataagatggccctctacaatttgtatccaggcgtgtttgagaccgttgaaatgcttccctctaaagctggcatctggagagtagagtgcttgatcggagaacatcttcacgcaggtatgagcaccttgttcctcgtgtacagcaacaaatgtcagaatccacttggcatggccagtggacacattcgcgactttcagatcacagcatctggccagtatggacaatgggccccaaagttggctcgcctccattactccggtagcataaatgcgtggtccactaaagaacctttcagctggattaaggtcgatcttcttgcccccatgatcatccacggcattaagacacagggagcgaggcagaaattctcctccctctacatctcacagttcattattatgtatagtttggacggcaagaagtggcaaacttatagaggtaacagtactggaacagacatggtgttcttcggcaacgttgatagctctggcatcaaacacaacatctttaatcctcccataatagctcggtacatcagattgcatccgacccactacagcattaggagtacactccgaatggagcttatgggttgcgacttgaattcctgttcaatgccactcggaatggagtctaaagccatctctgatgcacagataaccgccagtagctactttacgaacatgtttgctacgtggtcaccctctaaggcaaggcttcatttgcaaggccggtctaatgcctggagacctcaggtgaacaacccgaaagaatggctccaggtggactttcagaagaccatgaaagtaacaggtgtcactactcagggagttaagtccttggatactagcatgtatgtgaaggagttccttatttcctcatcacaagatggccaccagtggaccctcttctttcagaatggtaaggtcaaagtgtttcagggcaatcaagacagcttcacacccgtggtgaacagtcttgatcctccactcttgacacgataccttcgaatccatccacagtcttgggagcaccagattgcattgcgcatggaagtacttggatgcgaggctcaggacctctac

SEQ ID NO: 2114 - protein, 1457 aa, synthetic construct
  REGION 1..1457: note = Variant of human B-domain deleted Factor VIII
MQIELSTCFFLCLLRFCFSATRRYYLGAVELSWDYMQSDLGELPVDARFPPRVPKSFPFNTSQVYKKTLFVEFTDHLFNIAKPRPPWMGLLGPTIQAEVYDTVVITLKNMASHPVSLHAVGVSYWKASEGAEYDDQTSQREKEDDKVFPGGSHTYVWQVLKENGPMASDPPCLTYSYLSHVDLVKDLNSGLIGALLVCREGSLAKEKTQTLAKFILLFAVFDEGKSWHSETKNSLMQDRDAASARAWPKMHTVNGYVNRTLPGLIGCHRKSVYWHVIGMGTTPEVHSIFLEGHTFLVRNHRQASLGISPITFLTAQTGLRDLGQFLLFCHIPSHQHDGMEAYVKVDSCPEEPQLRMKNNEEAEDYDDDLTDSEMDVVRFDDDNSPSIIQARSGAKKHPKTWVHYIAAEEEDWDYAPLVLAPDDRSYKSQYLNNGPQRIGRKYKKVRFMAYTDETFKTREAIQHESGILGPLLYGEVGDTLLIIFKNQASRPYNIYPHGITDVRPLYSRRLPKGVKHLKDFPILPGEIFKYKWTITVEDGPTKSDPRCLTRYYSSFVNWERDLASGLIGPLLICYKESVDQRGNQIMSDKRNVILFSVFDENRSWYLTENIQRFLPNPAGVQLEDPEFQASNIMHSINGYVFDSLQLSVCLHEVAYWYILSIGAQTDFLSVFFSGYTFKHKGVYEDTLTLFPFSGETVFMSMENPGLWILGCHNSDFRNRGMTALLKVSSCDWNTGDYYEDSYEDISAYFDSKNNAIEPRSFSQNPPVLKRHQREGTRTTLQSDQEEIDYDDTISVEMKKEDFDIYDESGNQSPRSFQKKTRHYFIAAVERLWDYGMSSSPHVLRNRAQSGSVPQFKKVVFQEFTDGSFTQPLYRGELNEHLGLLGPYIRAEVEDNIMVTFRNQASRPYSFYSSLISYEEDQRQGAEPRKNFVKPNETKTYFWKVQHHMAPTKDEFDCKAWAYFSDVDLEKDVHSGLIGPLLVCHTNTLNPAHGRQVTVQEFALFFTIFDETKSWYFTENMERNCRAPCNIQMEDPTFKENYRFHAINGYIMDTLPGLVMAQDQRIRWYLLSMGSNENIHSIHFSGHVFTVRKKEEYKMALYNLYPGVFETVEMLPSKAGIWRVECLIGEHLHAGMSTLFLVYSNKCQNPLGMASGHIRDFQITASGQYGQWAPKLARLHYSGSINAWSTKEPFSWIKVDLLAPMIIHGIKTQGARQKFSSLYISQFIIMYSLDGKKWQTYRGNSTGTDMVFFGNVDSSGIKHNIFNPPIIARYIRLHPTHYSIRSTLRMELMGCDLNSCSMPLGMESKAISDAQITASSYFTNMFATWSPSKARLHLQGRSNAWRPQVNNPKEWLQVDFQKTMKVTGVTTQGVKSLDTSMYVKEFLISSSQDGHQWTLFFQNGKVKVFQGNQDSFTPVVNSLDPPLLTRYLRIHPQSWEHQIALRMEVLGCEAQDLY

SEQ ID NO: 2115 - DNA, 4371 bp, synthetic construct
  misc_feature 1..4371: note = Variant of human B-domain deleted Factor VIII
  source 1..4371: mol_type = other DNA
atgcagattgaactgtctacctgcttcttcctctgtttgctgaggttctgctttagcgccactagacggtactaccttggcgctgtggagctgtcctgggactatatgcagagtgatttgggagagcttcccgtcgacgcacgatttcctcctcgcgttccaaagtcatttccctttaacacaagccaggtgtacaagaagacgctcttcgtcgaattcaccgatcacctgttcaatatcgccaaacccagaccaccatggatgggtcttttggggcctaccatacaagcggaggtgtatgacacagttgttatcactctcaagaacatggcttctcatccggtaagtcttcacgcagtgggcgtgtcctactggaaagcttcagaaggagccgagtatgatgatcagacatcccagagggagaaagaagacgacaaggtatttccaggtgggtctcatacctatgtgtggcaagtgctcaaagagaatggccctatggcaagcgatccgccgtgtttgacttacagctacctttcacacgttgacctcgtcaaggacctcaactccgggttgattggagccttgttggtatgcagggaaggatctcttgccaaagagaagacacagaccctggccaagtttatccttctctttgctgtgttcgatgagggcaaaagttggcatagcgaaacgaagaattccctcatgcaggatcgcgacgcagccagcgccagagcttggcccaagatgcacactgtgaacggatatgtcaataggacgcttcctggcttgattgggtgtcatcggaaaagtgtctactggcacgtgatcggaatggggacaacaccagaggtccactccatatttctcgaaggccataccttccttgttcgaaaccacagacaggcatccttggggatctctcccattacctttctcactgcccaaacgggtcttcgtgacttgggtcagttccttctcttttgccatatcccgtcacaccagcatgatggtatggaagcttatgtgaaagtcgacagttgtcctgaggagccacagttgcgcatgaagaataatgaagaagccgaggattacgacgacgatctcaccgattctgagatggacgtggtgaggtttgatgacgacaactctccctccatcattcaagctcggagcggggcgaagaaacaccccaagacttgggtccactatatagcggcggaagaggaggattgggattacgctcctcttgtattggcaccagatgaccgctcatacaaaagccagtacctcaacaacggaccgcagagaattggccggaagtataagaaagtgcgatttatggcctatacagacgaaacctttaagacaagggaggccatccagcatgagagtgggattttgggacctcttctttacggcgaagttggtgataccctcctcatcatcttcaagaatcaagcttctcgcccctataacatttacccacacgggatcactgacgttaggcctttgtatagcagaagacttcccaaaggcgtgaagcatctcaaagacttccccattttgccaggcgagatctttaagtacaaatggaccattacagtggaagatggaccgactaaatcggaccctcgatgccttacgcggtactattcctccttcgtgaattgggagagagatttggcaagcggactcataggaccactcctcatctgttacaaggaatctgtagaccagaggggtaaccagattatgagtgataaacgcaatgtgatcctttttagcgtcttcgacgagaaccggtcctggtacttgaccgagaatatacaaaggttccttcccaaccccgcaggcgttcagttggaagaccctgagtttcaggccagcaatattatgcactcaatcaacggctatgtgtttgatagtctccagctttctgtttgcctccatgaagtagcctattggtacatcttgtcaattggtgctcaaacagacttcctctccgtcttcttctccggctacacctttaagcacaagggcgtgtatgaggacactctcacactctttccattttctggagaaaccgtgttcatgagtatggagaatccaggcctttggatcttgggttgccacaacagtgattttcgcaatcggggaatgactgctctcctcaaagtcagcagctgtgattggaacacaggcgactattatgaggattcttacgaggacataagtgcctactttgactccaagaataacgccattgagcccagatcattctcccagaatcctcccgtgcttaaaaggcatcagcgcgaaggtaccagaactactcttcagtctgatcaagaggagattgactatgacgacaccattagcgtggaaatgaagaaggaggatttcgatatctatgacgaagatgagaaccagtctccgcggagctttcagaagaagacgcgacactacttcattgcagcagtcgaaaggctttgggactacggtatgtcatcatcccctcatgtgttgcgcaatagagctcagagtggaagtgttccacagttcaagaaagtcgtctttcaagagtttacagatggcagcttcacacagcctctctatcggggcgagcttaacgaacatttgggactccttggtccctatatccgagccgaagtggaggacaacattatggttacctttaggaatcaagcctctcgcccctacagcttctactcctccctcatcagttatgaggaggatcagagacaaggcgctgaaccacggaagaactttgtgaaaccgaatgagacgaagacctacttctggaaagtacagcaccacatggcccccacaaaagacgaattcgattgcaaagcatgggcgtatttttcagacgttgacttggagaaagatgtacattcaggacttattggtcctttgttggtgtgtcacactaacactctcaatccagcccatggcaggcaggtgacagtccaggaattcgctcttttctttaccatctttgatgagaccaagtcctggtacttcacggaaaacatggagcgcaattgcagagccccctgtaacatacagatggaggaccctacctttaaggaaaattatcggttccacgcaatcaacggatacattatggatacactccctggccttgtgatggctcaggaccaacgaatcaggtggtacctcctcagcatgggttctaatagtaacatacactccattcacttttcaggacatgtgttcactgtccggaagaaagaagagtataagatggccctctacaatttgtatccaggcgtgtttgagaccgttgaaatgcttccctctaaagctggcatctggagagtagagtgcttgatcggagaacatcttcacgcaggtatgagcaccttgttcctcgtgtacagcaacaaatgtcagaatccacttggcatggccagtggacacattcgcgactttcagatcacagcatctggccagtatggacaatgggccccaaagttggctcgcctccattactccggtagcataaatgcgtggtccactaaagaacctttcagctggattaaggtcgatcttcttgcccccatgatcatccacggcattaagacacagggagcgaggcagaaattctcctccctctacatctcacagttcattattatgtatagtttggacggcaagaagtggcaaacttatagaggtaacagtactggaacagacatggtgttcttcggcaacgttgatagctctggcatcaaacacaacatctttaatcctcccataatagctcggtacatcagattgcatccgacccactacagcattaggagtacactccgaatggagcttatgggttgcgacttgaattcctgttcaatgccactcggaatggagtctaaagccatctctgatgcacagataaccgccagtagctactttacgaacatgtttgctacgtggtcaccctctaaggcaaggcttcatttgcaaggccggtctaatgcctggagacctcaggtgaacaacccgaaagaatggctccaggtggactttcagaagaccatgaaagtaacaggtgtcactactcagggagttaagtccttggatactagcatgtatgtgaaggagttccttatttcctcatcacaagatggccaccagtggaccctcttctttcagaatggtaaggtcaaagtgtttcagggcaatcaagacagcttcacacccgtggtgaacagtcttgatcctccactcttgacacgataccttcgaatccatccacagtcttgggagcaccagattgcattgcgcatggaagtacttggatgcgaggctcaggacctctac

SEQ ID NO: 2116 - protein, 1457 aa, synthetic construct
  REGION 1..1457: note = Variant of human B-domain deleted Factor VIII
MQIELSTCFFLCLLRFCFSATRRYYLGAVELSWDYMQSDLGELPVDARFPPRVPKSFPFNTSQVYKKTLFVEFTDHLFNIAKPRPPWMGLLGPTIQAEVYDTVVITLKNMASHPVSLHAVGVSYWKASEGAEYDDQTSQREKEDDKVFPGGSHTYVWQVLKENGPMASDPPCLTYSYLSHVDLVKDLNSGLIGALLVCREGSLAKEKTQTLAKFILLFAVFDEGKSWHSETKNSLMQDRDAASARAWPKMHTVNGYVNRTLPGLIGCHRKSVYWHVIGMGTTPEVHSIFLEGHTFLVRNHRQASLGISPITFLTAQTGLRDLGQFLLFCHIPSHQHDGMEAYVKVDSCPEEPQLRMKNNEEAEDYDDDLTDSEMDVVRFDDDNSPSIIQARSGAKKHPKTWVHYIAAEEEDWDYAPLVLAPDDRSYKSQYLNNGPQRIGRKYKKVRFMAYTDETFKTREAIQHESGILGPLLYGEVGDTLLIIFKNQASRPYNIYPHGITDVRPLYSRRLPKGVKHLKDFPILPGEIFKYKWTITVEDGPTKSDPRCLTRYYSSFVNWERDLASGLIGPLLICYKESVDQRGNQIMSDKRNVILFSVFDENRSWYLTENIQRFLPNPAGVQLEDPEFQASNIMHSINGYVFDSLQLSVCLHEVAYWYILSIGAQTDFLSVFFSGYTFKHKGVYEDTLTLFPFSGETVFMSMENPGLWILGCHNSDFRNRGMTALLKVSSCDWNTGDYYEDSYEDISAYFDSKNNAIEPRSFSQNPPVLKRHQREGTRTTLQSDQEEIDYDDTISVEMKKEDFDIYDEDENQSPRSFQKKTRHYFIAAVERLWDYGMSSSPHVLRNRAQSGSVPQFKKVVFQEFTDGSFTQPLYRGELNEHLGLLGPYIRAEVEDNIMVTFRNQASRPYSFYSSLISYEEDQRQGAEPRKNFVKPNETKTYFWKVQHHMAPTKDEFDCKAWAYFSDVDLEKDVHSGLIGPLLVCHTNTLNPAHGRQVTVQEFALFFTIFDETKSWYFTENMERNCRAPCNIQMEDPTFKENYRFHAINGYIMDTLPGLVMAQDQRIRWYLLSMGSNSNIHSIHFSGHVFTVRKKEEYKMALYNLYPGVFETVEMLPSKAGIWRVECLIGEHLHAGMSTLFLVYSNKCQNPLGMASGHIRDFQITASGQYGQWAPKLARLHYSGSINAWSTKEPFSWIKVDLLAPMIIHGIKTQGARQKFSSLYISQFIIMYSLDGKKWQTYRGNSTGTDMVFFGNVDSSGIKHNIFNPPIIARYIRLHPTHYSIRSTLRMELMGCDLNSCSMPLGMESKAISDAQITASSYFTNMFATWSPSKARLHLQGRSNAWRPQVNNPKEWLQVDFQKTMKVTGVTTQGVKSLDTSMYVKEFLISSSQDGHQWTLFFQNGKVKVFQGNQDSFTPVVNSLDPPLLTRYLRIHPQSWEHQIALRMEVLGCEAQDLY

SEQ ID NO: 2117 - DNA, 4371 bp, synthetic construct
  misc_feature 1..4371: note = Variant of human B-domain deleted Factor VIII
  source 1..4371: mol_type = other DNA
atgcagattgaactgtctacctgcttcttcctctgtttgctgaggttctgctttagcgccactagacggtactaccttggcgctgtggagctgtcctgggactatatgcagagtgatttgggagagcttcccgtcgacgcacgatttcctcctcgcgttccaaagtcatttccctttaacacaagccaggtgtacaagaagacgctcttcgtcgaattcaccgatcacctgttcaatatcgccaaacccagaccaccatggatgggtcttttggggcctaccatacaagcggaggtgtatgacacagttgttatcactctcaagaacatggcttctcatccggtaagtcttcacgcagtgggcgtgtcctactggaaagcttcagaaggagccgagtatgatgatcagacatcccagagggagaaagaagacgacaaggtatttccaggtgggtctcatacctatgtgtggcaagtgctcaaagagaatggccctatggcaagcgatccgccgtgtttgacttacagctacctttcacacgttgacctcgtcaaggacctcaactccgggttgattggagccttgttggtatgcagggaaggatctcttgccaaagagaagacacagaccctggccaagtttatccttctctttgctgtgttcgatgagggcaaaagttggcatagcgaaacgaagaattccctcatgcaggatcgcgacgcagccagcgccagagcttggcccaagatgcacactgtgaacggatatgtcaataggacgcttcctggcttgattgggtgtcatcggaaaagtgtctactggcacgtgatcggaatggggacaacaccagaggtccactccatatttctcgaaggccataccttccttgttcgaaaccacagacaggcatccttggggatctctcccattacctttctcactgcccaaacgggtcttcgtgacttgggtcagttccttctcttttgccatatcccgtcacaccagcatgatggtatggaagcttatgtgaaagtcgacagttgtcctgaggagccacagttgcgcatgaagaataatgaagaagccgaggattacgacgacgatctcaccgattctgagatggacgtggtgaggtttgatgacgacaactctccctccatcattcaagctcggagcggggcgaagaaacaccccaagacttgggtccactatatagcggcggaagaggaggattgggattacgctcctcttgtattggcaccagatgaccgctcatacaaaagccagtacctcaacaacggaccgcagagaattggccggaagtataagaaagtgcgatttatggcctatacagacgaaacctttaagacaagggaggccatccagcatgagagtgggattttgggacctcttctttacggcgaagttggtgataccctcctcatcatcttcaagaatcaagcttctcgcccctataacatttacccacacgggatcactgacgttaggcctttgtatagcagaagacttcccaaaggcgtgaagcatctcaaagacttccccattttgccaggcgagatctttaagtacaaatggaccattacagtggaagatggaccgactaaatcggaccctcgatgccttacgcggtactattcctccttcgtgaattgggagagagatttggcaagcggactcataggaccactcctcatctgttacaaggaatctgtagaccagaggggtaaccagattatgagtgataaacgcaatgtgatcctttttagcgtcttcgacgagaaccggtcctggtacttgaccgagaatatacaaaggttccttcccaaccccgcaggcgttcagttggaagaccctgagtttcaggccagcaatattatgcactcaatcaacggctatgtgtttgatagtctccagctttctgtttgcctccatgaagtagcctattggtacatcttgtcaattggtgctcaaacagacttcctctccgtcttcttctccggctacacctttaagcacaagggcgtgtatgaggacactctcacactctttccattttctggagaaaccgtgttcatgagcatggagaatccaggcctttggatcttgggttgccacaacagtgattttcgcaatcggggaatgactgctctcctcaaagtcagcagctgtgattggaacacaggcgactattacggggattcttacgaggacataagtgcctactttgactccaagaataacgccattgagcccagatcattctcccagaatcctcccgtgcttaaaaggcatcagcgcgaaggtaccagaactactcttcagtctgatcaagaggagattgactatgacgacaccattagcgtggaaatgaagaaggaggatttcgatatctatgacgaagatgagaaccagtctccgcggagctttcagaagaagacgcgacactacttcattgcagcagtcgaaaggctttgggactacggtatgtcatcatcccctcatgtgttgcgcaatagagctcagagtggaagtgttccacagttcaagaaagtcgtctttcaagagtttacagatggcagcttcacacagcctctctatcggggcgagcttaacgaacatttgggactccttggtccctatatccgagccgaagtggaggacaacattatggttacctttaggaatcaagcctctcgcccctacagcttctactcctccctcatcagttatgaggaggatcagagacaaggcgctgaaccacggaagaactttgtgaaaccgaatgagacgaagacctacttctggaaagtacagcaccacatggcccccacaaaagacgaattcgattgcaaagcatgggcgtatttttcagacgttgacttggagaaagatgtacattcaggacttattggtcctttgttggtgtgtcacactaacactctcaatccagcccatggcaggcaggtgacagtccaggaattcgctcttttctttaccatctttgatgagaccaagtcctggtacttcacggaaaacatggagcgcaattgcagagccccctgtaacatacagatggaggaccctacctttaaggaaaattatcggttccacgcaatcaacggatacattatggatacactccctggccttgtgatggctcaggaccaacgaatcaggtggtacctcctcagcatgggttctaatgagaacatacactccattcacttttcaggacatgtgttcactgtccggaagaaagaagagtataagatggccctctacaatttgtatccaggcgtgtttgagaccgttgaaatgcttccctctaaagctggcatctggagagtagagtgcttgatcggagaacatcttcacgcaggtatgagcaccttgttcctcgtgtacagcaacaaatgtcagaatccacttggcatggccagtggacacattcgcgactttcagatcacagcatctggccagtatggacaatgggccccaaagttggctcgcctccattactccggtagcataaatgcgtggtccactaaagaacctttcagctggattaaggtcgatcttcttgcccccatgatcatccacggcattaagacacagggagcgaggcagaaattctcctccctctacatctcacagttcattattatgtatagtttggacggcaagaagtggcaaacttatagaggtaacagtactggaacagacatggtgttcttcggcaacgttgatagctctggcatcaaacacaacatctttaatcctcccataatagctcggtacatcagattgcatccgacccactacagcattaggagtacactccgaatggagcttatgggttgcgacttgaattcctgttcaatgccactcggaatggagtctaaagccatctctgatgcacagataaccgccagtagctactttacgaacatgtttgctacgtggtcaccctctaaggcaaggcttcatttgcaaggccggtctaatgcctggagacctcaggtgaacaacccgaaagaatggctccaggtggactttcagaagaccatgaaagtaacaggtgtcactactcagggagttaagtccttggatactagcatgtatgtgaaggagttccttatttcctcatcacaagatggccaccagtggaccctcttctttcagaatggtaaggtcaaagtgtttcagggcaatcaagacagcttcacacccgtggtgaacagtcttgatcctccactcttgacacgataccttcgaatccatccacagtcttgggagcaccagattgcattgcgcatggaagtacttggatgcgaggctcaggacctctac

SEQ ID NO: 2118 - protein, 1457 aa, synthetic construct
  REGION 1..1457: note = Variant of human B-domain deleted Factor VIII
MQIELSTCFFLCLLRFCFSATRRYYLGAVELSWDYMQSDLGELPVDARFPPRVPKSFPFNTSQVYKKTLFVEFTDHLFNIAKPRPPWMGLLGPTIQAEVYDTVVITLKNMASHPVSLHAVGVSYWKASEGAEYDDQTSQREKEDDKVFPGGSHTYVWQVLKENGPMASDPPCLTYSYLSHVDLVKDLNSGLIGALLVCREGSLAKEKTQTLAKFILLFAVFDEGKSWHSETKNSLMQDRDAASARAWPKMHTVNGYVNRTLPGLIGCHRKSVYWHVIGMGTTPEVHSIFLEGHTFLVRNHRQASLGISPITFLTAQTGLRDLGQFLLFCHIPSHQHDGMEAYVKVDSCPEEPQLRMKNNEEAEDYDDDLTDSEMDVVRFDDDNSPSIIQARSGAKKHPKTWVHYIAAEEEDWDYAPLVLAPDDRSYKSQYLNNGPQRIGRKYKKVRFMAYTDETFKTREAIQHESGILGPLLYGEVGDTLLIIFKNQASRPYNIYPHGITDVRPLYSRRLPKGVKHLKDFPILPGEIFKYKWTITVEDGPTKSDPRCLTRYYSSFVNWERDLASGLIGPLLICYKESVDQRGNQIMSDKRNVILFSVFDENRSWYLTENIQRFLPNPAGVQLEDPEFQASNIMHSINGYVFDSLQLSVCLHEVAYWYILSIGAQTDFLSVFFSGYTFKHKGVYEDTLTLFPFSGETVFMSMENPGLWILGCHNSDFRNRGMTALLKVSSCDWNTGDYYGDSYEDISAYFDSKNNAIEPRSFSQNPPVLKRHQREGTRTTLQSDQEEIDYDDTISVEMKKEDFDIYDEDENQSPRSFQKKTRHYFIAAVERLWDYGMSSSPHVLRNRAQSGSVPQFKKVVFQEFTDGSFTQPLYRGELNEHLGLLGPYIRAEVEDNIMVTFRNQASRPYSFYSSLISYEEDQRQGAEPRKNFVKPNETKTYFWKVQHHMAPTKDEFDCKAWAYFSDVDLEKDVHSGLIGPLLVCHTNTLNPAHGRQVTVQEFALFFTIFDETKSWYFTENMERNCRAPCNIQMEDPTFKENYRFHAINGYIMDTLPGLVMAQDQRIRWYLLSMGSNENIHSIHFSGHVFTVRKKEEYKMALYNLYPGVFETVEMLPSKAGIWRVECLIGEHLHAGMSTLFLVYSNKCQNPLGMASGHIRDFQITASGQYGQWAPKLARLHYSGSINAWSTKEPFSWIKVDLLAPMIIHGIKTQGARQKFSSLYISQFIIMYSLDGKKWQTYRGNSTGTDMVFFGNVDSSGIKHNIFNPPIIARYIRLHPTHYSIRSTLRMELMGCDLNSCSMPLGMESKAISDAQITASSYFTNMFATWSPSKARLHLQGRSNAWRPQVNNPKEWLQVDFQKTMKVTGVTTQGVKSLDTSMYVKEFLISSSQDGHQWTLFFQNGKVKVFQGNQDSFTPVVNSLDPPLLTRYLRIHPQSWEHQIALRMEVLGCEAQDLY

SEQ ID NO: 2119 - DNA, 4371 bp, synthetic construct
  misc_feature 1..4371: note = Variant of human B-domain deleted Factor VIII
  source 1..4371: mol_type = other DNA
atgcagattgaactgtctacctgcttcttcctctgtttgctgaggttctgctttagcgccactagacggtactaccttggcgctgtggagctgtcctgggactatatgcagagtgatttgggagagcttcccgtcgacgcacgatttcctcctcgcgttccaaagtcatttccctttaacacaagccaggtgtacaagaagacgctcttcgtcgaattcaccgatcacctgttcaatatcgccaaacccagaccaccatggatgggtcttttggggcctaccatacaagcggaggtgtatgacacagttgttatcactctcaagaacatggcttctcatccggtaagtcttcacgcagtgggcgtgtcctactggaaagcttcagaaggagccgagtatgatgatcagacatcccagagggagaaagaagacgacaaggtatttccaggtgggtctcatacctatgtgtggcaagtgctcaaagagaatggccctatggcaagcgatccgccgtgtttgacttacagctacctttcacacgttgacctcgtcaaggacctcaactccgggttgattggagccttgttggtatgcagggaaggatctcttgccaaagagaagacacagaccctggccaagtttatccttctctttgctgtgttcgatgagggcaaaagttggcatagcgaaacgaagaattccctcatgcaggatcgcgacgcagccagcgccagagcttggcccaagatgcacactgtgaacggatatgtcaataggacgcttcctggcttgattgggtgtcatcggaaaagtgtctactggcacgtgatcggaatggggacaacaccagaggtccactccatatttctcgaaggccataccttccttgttcgaaaccacagacaggcatccttggggatctctcccattacctttctcactgcccaaacgggtcttcgtgacttgggtcagttccttctcttttgccatatcccgtcacaccagcatgatggtatggaagcttatgtgaaagtcgacagttgtcctgaggagccacagttgcgcatgaagaataatgaagaagccgaggattacgacgacgatctcaccgattctgagatggacgtggtgaggtttgatgacgacaactctccctccatcattcaagctcggagcggggcgaagaaacaccccaagacttgggtccactatatagcggcggaagaggaggattgggattacgctcctcttgtattggcaccagatgaccgctcatacaaaagccagtacctcaacaacggaccgcagagaattggccggaagtataagaaagtgcgatttatggcctatacagacgaaacctttaagacaagggaggccatccagcatgagagtgggattttgggacctcttctttacggcgaagttggtgataccctcctcatcatcttcaagaatcaagcttctcgcccctataacatttacccacacgggatcactgacgttaggcctttgtatagcagaagacttcccaaaggcgtgaagcatctcaaagacttccccattttgccaggcgagatctttaagtacaaatggaccattacagtggaagatggaccgactaaatcagaccctcgatgccttacgcggtactattcctccttcgtgaattgggagagagatttggcaagcggactcataggaccactcctcatctgttacaaggaatctgtagaccagaggggtaaccagattatgagtgataaacgcaatgtgatcctttttagcgtcttcgacgagaaccggtcctggtacttgaccgagaatatacaaaggttccttcccaaccccgcaggcgttcagttggaagaccctgagtttcaggccagcaatattatgcactcaatcaacggctatgtgtttgatagtctccagctttctgtttgcctccatgaagtagcctattggtacatcttgtcaattggtgctcaaacagacttcctctccgtcttcttctccggctacacctttaagcacaagggggtgtatgaggacactctcacactctttccattttctggagaaaccgtgttcatgagcatggagaatccaggcctttggatcttgggttgccacaacagtgattttcgcaatcggggaatgactgctctcctcaaagtcagcagctgtgattggaacacaggcgactattacggggattcttacgaggacataagtgcctactttgactccaaaaataacgccattgagcccagatcattctcccagaatcctcccgtgcttaaaaggcatcagcgcgaaggtaccagaactactcttcagtctgatcaagaggagattgactatgacgacaccattagcgtggaaatgaagaaggaggatttcgatatctatgacgaggatgggaaccagtctccgcggagctttcagaagaagacgcgacactacttcattgcagcagtcgaaaggctttgggactacggtatgtcatcatcccctcatgtgttgcgcaatagagctcagagtggaagtgttccacagttcaagaaagtcgtctttcaagagtttacagatggcagcttcacacagcctctctatcggggcgagcttaacgaacatttgggactccttggtccctatatccgagccgaagtggaggacaacattatggttacctttaggaatcaagcctctcgcccctacagcttctactcctccctcatcagttatgaggaggatcagagacaaggcgctgaaccacggaagaactttgtgaaaccgaatgagacgaagacctacttctggaaagtacagcaccacatggcccccacaaaagacgaattcgattgcaaagcatgggcgtatttttcagacgttgacttggagaaagatgtacattcaggacttattggtcctttgttggtgtgtcacactaacactctcaatccagcccatggcaggcaggtgacagtccaggaattcgctcttttctttaccatctttgatgagaccaagtcctggtacttcacggaaaacatggagcgcaattgcagagccccctgtaacatacagatggaggaccctacctttaaggaaaattatcggttccacgcaatcaacggatacattatggatacactccctggccttgtgatggctcaggaccaacgaatcaggtggtacctcctcagcatgggttctaatgagaacatacactccattcacttttcaggacatgtgttcactgtccggaagaaagaagagtataagatggccctctacaatttgtatccaggcgtgtttgagaccgttgaaatgcttccctctaaagctggcatctggagagtagagtgcttgatcggagaacatcttcacgcaggtatgagcaccttgttcctcgtgtacagcaacaaatgtcagaatccacttggcatggccagtggacacattcgcgactttcagatcacagcatctggccagtatggacaatgggccccaaagttggctcgcctccattactccggtagcataaatgcgtggtccactaaagaacctttcagctggattaaggtcgatcttcttgcccccatgatcatccacggcattaagacacagggagcgaggcagaaattctcctccctctacatctcacagttcattattatgtatagtttggacggcaagaagtggcaaacttatagaggtaacagtactggaacagacatggtgttcttcggcaacgttgatagctctggcatcaaacacaacatctttaatcctcccataatagctcggtacatcagattgcatccgacccactacagcattaggagtacactccgaatggagcttatgggttgcgacttgaattcctgttcaatgccactcggaatggagtctaaagccatctctgatgcacagataaccgccagtagctactttacgaacatgtttgctacgtggtcaccctctaaggcaaggcttcatttgcaaggccggtctaatgcctggagacctcaggtgaacaacccgaaagaatggctccaggtggactttcagaagaccatgaaagtaacaggtgtcactactcagggagttaagtccttggatactagcatgtatgtgaaggagttccttatttcctcatcacaagatggccaccagtggaccctcttctttcagaatggtaaggtcaaagtgtttcagggcaatcaagacagcttcacacccgtggtgaacagtcttgatcctccactcttgacacgataccttcgaatccatccacagtcttgggagcaccagattgcattgcgcatggaagtacttggatgcgaggctcaggacctctac

SEQ ID NO: 2120 - protein, 1457 aa, synthetic construct
  REGION 1..1457: note = Variant of human B-domain deleted Factor VIII
MQIELSTCFFLCLLRFCFSATRRYYLGAVELSWDYMQSDLGELPVDARFPPRVPKSFPFNTSQVYKKTLFVEFTDHLFNIAKPRPPWMGLLGPTIQAEVYDTVVITLKNMASHPVSLHAVGVSYWKASEGAEYDDQTSQREKEDDKVFPGGSHTYVWQVLKENGPMASDPPCLTYSYLSHVDLVKDLNSGLIGALLVCREGSLAKEKTQTLAKFILLFAVFDEGKSWHSETKNSLMQDRDAASARAWPKMHTVNGYVNRTLPGLIGCHRKSVYWHVIGMGTTPEVHSIFLEGHTFLVRNHRQASLGISPITFLTAQTGLRDLGQFLLFCHIPSHQHDGMEAYVKVDSCPEEPQLRMKNNEEAEDYDDDLTDSEMDVVRFDDDNSPSIIQARSGAKKHPKTWVHYIAAEEEDWDYAPLVLAPDDRSYKSQYLNNGPQRIGRKYKKVRFMAYTDETFKTREAIQHESGILGPLLYGEVGDTLLIIFKNQASRPYNIYPHGITDVRPLYSRRLPKGVKHLKDFPILPGEIFKYKWTITVEDGPTKSDPRCLTRYYSSFVNWERDLASGLIGPLLICYKESVDQRGNQIMSDKRNVILFSVFDENRSWYLTENIQRFLPNPAGVQLEDPEFQASNIMHSINGYVFDSLQLSVCLHEVAYWYILSIGAQTDFLSVFFSGYTFKHKGVYEDTLTLFPFSGETVFMSMENPGLWILGCHNSDFRNRGMTALLKVSSCDWNTGDYYGDSYEDISAYFDSKNNAIEPRSFSQNPPVLKRHQREGTRTTLQSDQEEIDYDDTISVEMKKEDFDIYDEDGNQSPRSFQKKTRHYFIAAVERLWDYGMSSSPHVLRNRAQSGSVPQFKKVVFQEFTDGSFTQPLYRGELNEHLGLLGPYIRAEVEDNIMVTFRNQASRPYSFYSSLISYEEDQRQGAEPRKNFVKPNETKTYFWKVQHHMAPTKDEFDCKAWAYFSDVDLEKDVHSGLIGPLLVCHTNTLNPAHGRQVTVQEFALFFTIFDETKSWYFTENMERNCRAPCNIQMEDPTFKENYRFHAINGYIMDTLPGLVMAQDQRIRWYLLSMGSNENIHSIHFSGHVFTVRKKEEYKMALYNLYPGVFETVEMLPSKAGIWRVECLIGEHLHAGMSTLFLVYSNKCQNPLGMASGHIRDFQITASGQYGQWAPKLARLHYSGSINAWSTKEPFSWIKVDLLAPMIIHGIKTQGARQKFSSLYISQFIIMYSLDGKKWQTYRGNSTGTDMVFFGNVDSSGIKHNIFNPPIIARYIRLHPTHYSIRSTLRMELMGCDLNSCSMPLGMESKAISDAQITASSYFTNMFATWSPSKARLHLQGRSNAWRPQVNNPKEWLQVDFQKTMKVTGVTTQGVKSLDTSMYVKEFLISSSQDGHQWTLFFQNGKVKVFQGNQDSFTPVVNSLDPPLLTRYLRIHPQSWEHQIALRMEVLGCEAQDLY

SEQ ID NO: 2121 - DNA, 4371 bp, synthetic construct
  misc_feature 1..4371: note = Variant of human B-domain deleted Factor VIII
  source 1..4371: mol_type = other DNA
atgcagattgaactgtctacctgcttcttcctctgtttgctgaggttctgctttagcgccactagacggtactaccttggcgctgtggagctgtcctgggactatatgcagagtgatttgggagagcttcccgtcgacgcacgatttcctcctcgcgttccaaagtcatttccctttaacacaagccaggtgtacaagaagacgctcttcgtcgaattcaccgatcacctgttcaatatcgccaaacccagaccaccatggatgggtcttttggggcctaccatacaagcggaggtgtatgacacagttgttatcactctcaagaacatggcttctcatccggtaagtcttcacgcagtgggcgtgtcctactggaaagcttcagaaggagccgagtatgatgatcagacatcccagagggagaaagaagacgacaaggtatttccaggtgggtctcatacctatgtgtggcaagtgctcaaagagaatggccctatggcaagcgatccgccgtgtttgacttacagctacctttcacacgttgacctcgtcaaggacctcaactccgggttgattggagccttgttggtatgcagggaaggatctcttgccaaagagaagacacagaccctggccaagtttatccttctctttgctgtgttcgatgagggcaaaagttggcatagcgaaacgaagaattccctcatgcaggatcgcgacgcagccagcgccagagcttggcccaagatgcacactgtgaacggatatgtcaataggacgcttcctggcttgattgggtgtcatcggaaaagtgtctactggcacgtgatcggaatggggacaacaccagaggtccactccatatttctcgaaggccataccttccttgttcgaaaccacagacaggcatccttggggatctctcccattacctttctcactgcccaaacgggtcttcgtgacttgggtcagttccttctcttttgccatatcccgtcacaccagcatgatggtatggaagcttatgtgaaagtcgacagttgtcctgaggagccacagttgcgcatgaagaataatgaagaagccgaggattacgacgacgatctcaccgattctgagatggacgtggtgaggtttgatgacgacaactctccctccatcattcaagctcggagcggggcgaagaaacaccccaagacttgggtccactatatagcggcggaagaggaggattgggattacgctcctcttgtattggcaccagatgaccgctcatacaaaagccagtacctcaacaacggaccgcagagaattggccggaagtataagaaagtgcgatttatggcctatacagacgaaacctttaagacaagggaggccatccagcatgagagtgggattttgggacctcttctttacggcgaagttggtgataccctcctcatcatcttcaagaatcaagcttctcgcccctataacatttacccacacgggatcactgacgttaggcctttgtatagcagaagacttcccaaaggcgtgaagcatctcaaagacttccccattttgccaggcgagatctttaagtacaaatggaccattacagtggaagatggaccgactaaatcggaccctcgatgccttacgcggtactattcctccttcgtgaattgggagagagatttggcaagcggactcataggaccactcctcatctgttacaaggaatctgtagaccagaggggtaaccagattatgagtgataaacgcaatgtgatcctttttagcgtcttcgacgagaaccggtcctggtacttgaccgagaatatacaaaggttccttcccaaccccgcaggcgttcagttggaagaccctgagtttcaggccagcaatattatgcactcaatcaacggctatgtgtttgatagtctccagctttctgtttgcctccatgaagtagcctattggtacatcttgtcaattggtgctcaaacagacttcctctccgtcttcttctccggctacacctttaagcacaagggcgtgtatgaggacactctcacactctttccattttctggagaaaccgtgttcatgagcatggagaatccaggcctttggatcttgggttgccacaacagtgattttcgcaatcggggaatgactgctctcctcaaagtcagcagctgtgattggaacacaggcgactattacggggattcttacgaggacataagtgcctactttgactccaagaataacgccattgagcccagatcattctcccagaatcctcccgtgcttaaaaggcatcagcgcgaaggtaccagaactactcttcagtctgatcaagaggagattgactatgacgacaccattagcgtggaaatgaagaaggaggatttcgatatctatgacgaggatgggaaccagtctccgcggagctttcagaagaagacgcgacactacttcattgcagcagtcgaaaggctttgggactacggtatgtcatcatcccctcatgtgttgcgcaatagagctcagagtggaagtgttccacagttcaagaaagtcgtctttcaagagtttacagatggcagcttcacacagcctctctatcggggcgagcttaacgaacatttgggactccttggtccctatatccgagccgaagtggaggacaacattatggttacctttaggaatcaagcctctcgcccctacagcttctactcctccctcatcagttatgaggaggatcagagacaaggcgctgaaccacggaagaactttgtgaaaccgaatgagacgaagacctacttctggaaagtacagcaccacatggcccccacaaaagacgaattcgattgcaaagcatgggcgtatttttcagacgttgacttggagaaagatgtacattcaggacttattggtcctttgttggtgtgtcacactaacactctcaatccagcccatggcaggcaggtgacagtccaggaattcgctcttttctttaccatctttgatgagaccaagtcctggtacttcacggaaaacatggagcgcaattgcagagccccctgtaacatacagatggaggaccctacctttaaggaaaattatcggttccacgcaatcaacggatacattatggatacactccctggccttgtgatggctcaggaccaacgaatcaggtggtacctcctcagcatgggttctaatgagaacatacactccattcacttttcaggacatgtgttcactgtccggaagggtgaagagtataagatggccctctacaatttgtatccaggcgtgtttgagaccgttgaaatgcttcccatcaaagctggcatctggagagtagagtgcttgatcggagaacatcttcacgcaggtatgagcaccttgttcctcgtgtacagcaacaaatgtcagaatccacttggcatggccagtggacacattcgcgactttcagatcacagcatctggccagtatggacaatgggccccaaagttggctcgcctccattactccggtagcataaatgcgtggtccactaaagaacctttcagctggattaaggtcgatcttcttgcccccatgatcatccacggcattaagacacagggagcgaggcagaaattctcctccctctacatctcacagttcattattatgtatagtttggacggcaagaagtggcaaacttatagaggtaacagtactggaacagacatggtgttcttcggcaacgttgatagctctggcatcaaacacaacatctttaatcctcccataatagctcggtacatcagattgcatccgacccactacagcattaggagtacactccgaatggagcttatgggttgcgacttgaattcctgttcaatgccactcggaatggagtctaaagccatctctgatgcacagataaccgccagtagctactttacgaacatgtttgctacgtggtcaccctctaaggcaaggcttcatttgcaaggccggtctaatgcctggagacctcaggtgaacaacccgaaagaatggctccaggtggactttcagaagaccatgaaagtaacaggtgtcactactcagggagttaagtccttggatactagcatgtatgtgaaggagttccttatttcctcatcacaagatggccaccagtggaccctcttctttcagaatggtaaggtcaaagtgtttcagggcaatcaagacagcttcacacccgtggtgaacagtcttgatcctccactcttgacacgataccttcgaatccatccacagtcttgggagcaccagattgcattgcgcatggaagtacttggatgcgaggctcaggacctctac

SEQ ID NO: 2122 - protein, 1457 aa, synthetic construct
  REGION 1..1457: note = Variant of human B-domain deleted Factor VIII
MQIELSTCFFLCLLRFCFSATRRYYLGAVELSWDYMQSDLGELPVDARFPPRVPKSFPFNTSQVYKKTLFVEFTDHLFNIAKPRPPWMGLLGPTIQAEVYDTVVITLKNMASHPVSLHAVGVSYWKASEGAEYDDQTSQREKEDDKVFPGGSHTYVWQVLKENGPMASDPPCLTYSYLSHVDLVKDLNSGLIGALLVCREGSLAKEKTQTLAKFILLFAVFDEGKSWHSETKNSLMQDRDAASARAWPKMHTVNGYVNRTLPGLIGCHRKSVYWHVIGMGTTPEVHSIFLEGHTFLVRNHRQASLGISPITFLTAQTGLRDLGQFLLFCHIPSHQHDGMEAYVKVDSCPEEPQLRMKNNEEAEDYDDDLTDSEMDVVRFDDDNSPSIIQARSGAKKHPKTWVHYIAAEEEDWDYAPLVLAPDDRSYKSQYLNNGPQRIGRKYKKVRFMAYTDETFKTREAIQHESGILGPLLYGEVGDTLLIIFKNQASRPYNIYPHGITDVRPLYSRRLPKGVKHLKDFPILPGEIFKYKWTITVEDGPTKSDPRCLTRYYSSFVNWERDLASGLIGPLLICYKESVDQRGNQIMSDKRNVILFSVFDENRSWYLTENIQRFLPNPAGVQLEDPEFQASNIMHSINGYVFDSLQLSVCLHEVAYWYILSIGAQTDFLSVFFSGYTFKHKGVYEDTLTLFPFSGETVFMSMENPGLWILGCHNSDFRNRGMTALLKVSSCDWNTGDYYGDSYEDISAYFDSKNNAIEPRSFSQNPPVLKRHQREGTRTTLQSDQEEIDYDDTISVEMKKEDFDIYDEDGNQSPRSFQKKTRHYFIAAVERLWDYGMSSSPHVLRNRAQSGSVPQFKKVVFQEFTDGSFTQPLYRGELNEHLGLLGPYIRAEVEDNIMVTFRNQASRPYSFYSSLISYEEDQRQGAEPRKNFVKPNETKTYFWKVQHHMAPTKDEFDCKAWAYFSDVDLEKDVHSGLIGPLLVCHTNTLNPAHGRQVTVQEFALFFTIFDETKSWYFTENMERNCRAPCNIQMEDPTFKENYRFHAINGYIMDTLPGLVMAQDQRIRWYLLSMGSNENIHSIHFSGHVFTVRKGEEYKMALYNLYPGVFETVEMLPIKAGIWRVECLIGEHLHAGMSTLFLVYSNKCQNPLGMASGHIRDFQITASGQYGQWAPKLARLHYSGSINAWSTKEPFSWIKVDLLAPMIIHGIKTQGARQKFSSLYISQFIIMYSLDGKKWQTYRGNSTGTDMVFFGNVDSSGIKHNIFNPPIIARYIRLHPTHYSIRSTLRMELMGCDLNSCSMPLGMESKAISDAQITASSYFTNMFATWSPSKARLHLQGRSNAWRPQVNNPKEWLQVDFQKTMKVTGVTTQGVKSLDTSMYVKEFLISSSQDGHQWTLFFQNGKVKVFQGNQDSFTPVVNSLDPPLLTRYLRIHPQSWEHQIALRMEVLGCEAQDLY

SEQ ID NO: 2123 - DNA, 4371 bp, synthetic construct
  misc_feature 1..4371: note = Variant of human B-domain deleted Factor VIII
  source 1..4371: mol_type = other DNA
atgcagattgaactgtctacctgcttcttcctctgtttgctgaggttctgctttagcgccactagacggtactaccttggcgctgtggagctgtcctgggactatatgcagagtgatttgggagagcttcccgtcgacgcacgatttcctcctcgcgttccaaagtcatttccctttaacacaagccaggtgtacaagaagacgctcttcgtcgaattcaccgatcacctgttcaatatcgccaaacccagaccaccatggatgggtcttttggggcctaccatacaagcggaggtgtatgacacagttgttatcactctcaagaacatggcttctcatccggtaagtcttcacgcagtgggcgtgtcctactggaaagcttcagaaggagccgagtatgatgatcagacatcccagagggagaaagaagacgacaaggtatttccaggtgggtctcatacctatgtgtggcaagtgctcaaagagaatggccctatggccagcgatccgccgtgtttgacttacagctacctttcacacgttgacctcgtcaaggacctcaactccgggttgattggagccttgttggtatgcagggaaggatctcttgccaaagagaagacacagaccctggccaagtttatccttctctttgctgtgttcgatgagggcaaaagttggcatagcgaaacgaagaattccctcatgcaggatcgcgacgcagccagcgccagagcttggcccaagatgcacactgtgaacggatatgtcaataggacgcttcctggcttgattgggtgtcatcggaaaagtgtctactggcacgtgatcggaatggggacaacaccagaggtccactccatatttctcgaaggccataccttccttgttcgaaaccacagacaggcatccttggggatctctcccattacctttctcactgcccaaacgggtcttcgtgacttgggtcagttccttctcttttgccatatcccgtcacaccagcatgatggtatggaagcttatgtgaaagtcgacagttgtcctgaggagccacagttgcgcatgaagaataatgaagaagccgaggattacgacgacgatctcaccgattctgagatggacgtggtgaggtttgatgacgacaactctccctccatcattcaagctcggagcggggcgaagaaacaccccaagacttgggtccactatatagcggcggaagaggaggattgggattacgctcctcttgtattggcaccagatgaccgctcatacaaaagccagtacctcaacaacggaccgcagagaattggccggaagtataagaaagtgcgatttatggcctatacagacgaaacctttaagacaagggaggccatccagcatgagagtgggattttgggacctcttctttacggcgaagttggtgataccctcctcatcatcttcaagaatcaagcttctcgcccctataacatttacccacacgggatcactgacgttaggcctttgtatagcagaagacttcccaaaggcgtgaagcatctcaaagacttccccattttgccaggcgagatctttaagtacaaatggaccattacagtggaagatggaccgactaaatcagaccctcgatgccttacgcggtactattcctccttcgtgaattgggagagagatttggcaagcggactcataggaccactcctcatctgttacaaggaatctgtagaccagaggggtaaccagattatgagtgataaacgcaatgtgatcctttttagcgtcttcgacgagaaccggtcctggtacttgaccgagaatatacaaaggttccttcccaaccccgcaggcgttcagttggaagaccctgagtttcaggccagcaatattatgcactcaatcaacggctatgtgtttgatagtctccagctttctgtttgcctccatgaagtagcctattggtacatcttgtcaattggtgctcaaacagacttcctctccgtcttcttctccggctacacctttaagcacaagggcgtgtatgaggacactctcacactctttccattttctggagaaaccgtgttcatgagtatggagaatccaggcctttggatcttgggttgccacaacagtgattttcgcaatcggggaatgactgctctcctcaaagtcagcagctgtgattggaacacaggcgactattatggggattcttacgaggacataagtgcctactttgactccaagaataacgccattgagcccagatcattctcccagaatcctcccgtgcttaaaaggcatcagcgcgaaggtaccagaactactcttcagtctgatcaagaggagattgactatgacgacaccattagcgtggaaatgaagaaggaggatttcgatatctatgacgaagatgagaaccagtctccgcggagctttcagaagaagacgcgacactacttcattgcagcagtcgaaaggctttgggactacggtatgtcatcatcccctcatgtgttgcgcaatagagctcagagtggaagtgttccacagttcaagaaagtcgtctttcaagagtttacagatggcagcttcacacagcctctctatcggggcgagcttaacgaacatttgggactccttggtccctatatccgagccgaagtggaggacaacattatggttacctttaggaatcaagcctctcgcccctacagcttctactcctccctcatcagttatgaggaggatcagagacaaggcgctgaaccacggaagaactttgtgaaaccgaatgagacgaagacctacttctggaaagtacagcaccacatggcccccacaaaagacgaattcgattgcaaagcatgggcgtatttttcagacgttgacttggagaaagatgtacattcaggacttattggtcctttgttggtgtgtcacactaacactctcaatccagcccatggcaggcaggtgacagtccaggaattcgctcttttctttaccatctttgatgagaccaagtcctggtacttcacggaaaacatggagcgcaattgcagagccccctgtaacatacagatggaggaccctacctttaaggaaaattatcggttccacgcaatcaacggatacattatggatacactccctggccttgtgatggctcaggaccaacgaatcaggtggtacctcctcagcatgggttctaatgagaacatacactccattcacttttcaggacatgtgttcactgtccggaagggggaagagtataagatggccctctacaatttgtatccaggcgtgtttgagaccgttgaaatgcttccctctaaagctggcatctggagagtagagtgcttgatcggagaacatcttcacgcaggtatgagcaccttgttcctcgtgtacagcaacaaatgtcagaatccacttggcatggccagtggacacattcgcgactttcagatcacagcatctggccagtatggacaatgggccccaaagttggctcgcctccattactccggtagcataaatgcgtggtccactaaagaacctttcagctggattaaggtcgatcttcttgcccccatgatcatccacggcattaagacacagggagcgaggcagaaattctcctccctctacatctcacagttcattattatgtatagtttggacggcaagaagtggcaaacttatagaggtaacagtactggaacagacatggtgttcttcggcaacgttgatagctctggcatcaaacacaacatctttaatcctcccataatagctcggtacatcagattgcatccgacccactacagcattaggagtacactccgaatggagcttatgggttgcgacttgaattcctgttcaatgccactcggaatggagtctaaagccatctctgatgcacagataaccgccagtagctactttacgaacatgtttgctacgtggtcaccctctaaggcaaggcttcatttgcaaggccggtctaatgcctggagacctcaggtgaacaacccgaaagaatggctccaggtggactttcagaagaccatgaaagtaacaggtgtcactactcagggagttaagtccttggatactagcatgtatgtgaaggagttccttatttcctcatcacaagatggccaccagtggaccctcttctttcagaatggtaaggtcaaagtgtttcagggcaatcaagacagcttcacacccgtggtgaacagtcttgatcctccactcttgacacgataccttcgaatccatccacagtcttgggagcaccagattgcattgcgcatggaagtacttggatgcgaggctcaggacctctac

SEQ ID NO: 2124 - protein, 1457 aa, synthetic construct
  REGION 1..1457: note = Variant of human B-domain deleted Factor VIII
MQIELSTCFFLCLLRFCFSATRRYYLGAVELSWDYMQSDLGELPVDARFPPRVPKSFPFNTSQVYKKTLFVEFTDHLFNIAKPRPPWMGLLGPTIQAEVYDTVVITLKNMASHPVSLHAVGVSYWKASEGAEYDDQTSQREKEDDKVFPGGSHTYVWQVLKENGPMASDPPCLTYSYLSHVDLVKDLNSGLIGALLVCREGSLAKEKTQTLAKFILLFAVFDEGKSWHSETKNSLMQDRDAASARAWPKMHTVNGYVNRTLPGLIGCHRKSVYWHVIGMGTTPEVHSIFLEGHTFLVRNHRQASLGISPITFLTAQTGLRDLGQFLLFCHIPSHQHDGMEAYVKVDSCPEEPQLRMKNNEEAEDYDDDLTDSEMDVVRFDDDNSPSIIQARSGAKKHPKTWVHYIAAEEEDWDYAPLVLAPDDRSYKSQYLNNGPQRIGRKYKKVRFMAYTDETFKTREAIQHESGILGPLLYGEVGDTLLIIFKNQASRPYNIYPHGITDVRPLYSRRLPKGVKHLKDFPILPGEIFKYKWTITVEDGPTKSDPRCLTRYYSSFVNWERDLASGLIGPLLICYKESVDQRGNQIMSDKRNVILFSVFDENRSWYLTENIQRFLPNPAGVQLEDPEFQASNIMHSINGYVFDSLQLSVCLHEVAYWYILSIGAQTDFLSVFFSGYTFKHKGVYEDTLTLFPFSGETVFMSMENPGLWILGCHNSDFRNRGMTALLKVSSCDWNTGDYYGDSYEDISAYFDSKNNAIEPRSFSQNPPVLKRHQREGTRTTLQSDQEEIDYDDTISVEMKKEDFDIYDEDENQSPRSFQKKTRHYFIAAVERLWDYGMSSSPHVLRNRAQSGSVPQFKKVVFQEFTDGSFTQPLYRGELNEHLGLLGPYIRAEVEDNIMVTFRNQASRPYSFYSSLISYEEDQRQGAEPRKNFVKPNETKTYFWKVQHHMAPTKDEFDCKAWAYFSDVDLEKDVHSGLIGPLLVCHTNTLNPAHGRQVTVQEFALFFTIFDETKSWYFTENMERNCRAPCNIQMEDPTFKENYRFHAINGYIMDTLPGLVMAQDQRIRWYLLSMGSNENIHSIHFSGHVFTVRKGEEYKMALYNLYPGVFETVEMLPSKAGIWRVECLIGEHLHAGMSTLFLVYSNKCQNPLGMASGHIRDFQITASGQYGQWAPKLARLHYSGSINAWSTKEPFSWIKVDLLAPMIIHGIKTQGARQKFSSLYISQFIIMYSLDGKKWQTYRGNSTGTDMVFFGNVDSSGIKHNIFNPPIIARYIRLHPTHYSIRSTLRMELMGCDLNSCSMPLGMESKAISDAQITASSYFTNMFATWSPSKARLHLQGRSNAWRPQVNNPKEWLQVDFQKTMKVTGVTTQGVKSLDTSMYVKEFLISSSQDGHQWTLFFQNGKVKVFQGNQDSFTPVVNSLDPPLLTRYLRIHPQSWEHQIALRMEVLGCEAQDLY

SEQ ID NO: 2125 - DNA, 4371 bp, synthetic construct
  misc_feature 1..4371: note = Variant of human B-domain deleted Factor VIII
  source 1..4371: mol_type = other DNA
atgcagattgaactgtctacctgcttcttcctctgtttgctgaggttctgctttagcgccactagacggtactaccttggcgctgtggagctgtcctgggactatatgcagagtgatttgggagagcttcccgtcgacgcacgatttcctcctcgcgttccaaagtcatttccctttaacacaagccaggtgtacaagaagacgctcttcgtcgaattcaccgatcacctgttcaatatcgccaaacccagaccaccatggatgggtcttttggggcctaccatacaagcggaggtgtatgacacagttgttatcactctcaagaacatggcttctcatccggtaagtcttcacgcagtgggcgtgtcctactggaaagcttcagaaggagccgagtatgatgatcagacatcccagagggagaaagaagacgacaaggtatttccaggtgggtctcatacctatgtgtggcaagtgctcaaagagaatggccctatggccagcgatccgccgtgtttgacttacagctacctttcacacgttgacctcgtcaaggacctcaactccgggttgattggagccttgttggtatgcagggaaggatctcttgccaaagagaagacacagaccctggccaagtttatccttctctttgctgtgttcgatgagggcaaaagttggcatagcgaaacgaagaattccctcatgcaggatcgcgacgcagccagcgccagagcttggcccaagatgcacactgtgaacggatatgtcaataggacgcttcctggcttgattgggtgtcatcggaaaagtgtctactggcacgtgatcggaatggggacaacaccagaggtccactccatatttctcgaaggccataccttccttgttcgaaaccacagacaggcatccttggggatctctcccattacctttctcactgcccaaacgggtcttcgtgacttgggtcagttccttctcttttgccatatcccgtcacaccagcatgatggtatggaagcttatgtgaaagtcgacagttgtcctgaggagccacagttgcgcatgaagaataatgaagaagccgaggattacgacgacgatctcaccgattctgagatggacgtggtgaggtttgatgacgacaactctccctccatcattcaagctcggagcggggcgaagaaacaccccaagacttgggtccactatatagcggcggaagaggaggattgggattacgctcctcttgtattggcaccagatgaccgctcatacaaaagccagtacctcaacaacggaccgcagagaattggccggaagtataagaaagtgcgatttatggcctatacagacgaaacctttaagacaagggaggccatccagcatgagagtgggattttgggacctcttctttacggcgaagttggtgataccctcctcatcatcttcaagaatcaagcttctcgcccctataacatttacccacacgggatcactgacgttaggcctttgtatagcagaagacttcccaaaggcgtgaagcatctcaaagacttccccattttgccaggcgagatctttaagtacaaatggaccattacagtggaagatggaccgactaaatcggaccctcgatgccttacgcggtactattcctccttcgtgaattgggagagagatttggcaagcggactcataggaccactcctcatctgttacaaggaatctgtagaccagaggggtaaccagattatgagtgataaacgcaatgtgatcctttttagcgtcttcgacgagaaccggtcctggtacttgaccgagaatatacaaaggttccttcccaaccccgcaggcgttcagttggaagaccctgagtttcaggccagcaatattatgcactcaatcaacggctatgtgtttgatagtctccagctttctgtttgcctccatgaagtagcctattggtacatcttgtcaattggtgctcaaacagacttcctctccgtcttcttctccggctacacctttaagcacaagggggtgtatgaggacactctcacactctttccattttctggagaaaccgtgttcatgagcatggagaatccaggcctttggatcttgggttgccacaacagtgattttcgcaatcggggaatgactgctctcctcaaagtcagcagctgtgattggaacacaggcgactattacggggattcttacgaggacataagtgcctactttgactccgaaaataacgccattgagcccagatcattctcccagaatcctcccgtgcttaaaaggcatcagcgcgaaggtaccagaactactcttcagtctgatcaagaggagattgactatgacgacaccattagcgtggaaatgaagaaggaggatttcgatatctatgacgaagatgagaaccagtctccgcggagctttcagaagaagacgcgacactacttcattgcagcagtcgaaaggctttgggactacggtatgtcatcatcccctcatgtgttgcgcaatagagctcagagtggaagtgttccacagttcaagaaagtcgtctttcaagagtttacagatggcagcttcacacagcctctctatcggggcgagcttaacgaacatttgggactccttggtccctatatccgagccgaagtggaggacaacattatggttacctttaggaatcaagcctctcgcccctacagcttctactcctccctcatcagttatgaggaggatcagagacaaggcgctgaaccacggaagaactttgtgaaaccgaatgagacgaagacctacttctggaaagtacagcaccacatggcccccacaaaagacgaattcgattgcaaagcatgggcgtatttttcagacgttgacttggagaaagatgtacattcaggacttattggtcctttgttggtgtgtcacactaacactctcaatccagcccatggcaggcaggtgacagtccaggaattcgctcttttctttaccatctttgatgagaccaagtcctggtacttcacggaaaacatggagcgcaattgcagagccccctgtaacatacagatggaggaccctacctttaaggaaaattatcggttccacgcaatcaacggatacattatggatacactccctggccttgtgatggctcaggaccaacgaatcaggtggtacctcctcagcatgggttctaatgagaacatacactccattcacttttcaggacatgtgttcactgtccggaagggtgaagagtataagatggccctctacaatttgtatccaggcgtgtttgagaccgttgaaatgcttcccagcaaagctggcatctggagagtagagtgcttgatcggagaacatcttcacgcaggtatgagcaccttgttcctcgtgtacagcaacaaatgtcagaatccacttggcatggccagtggacacattcgcgactttcagatcacagcatctggccagtatggacaatgggccccaaagttggctcgcctccattactccggtagcataaatgcgtggtccactaaagaacctttcagctggattaaggtcgatcttcttgcccccatgatcatccacggcattaagacacagggagcgaggcagaaattctcctccctctacatctcacagttcattattatgtatagtttggacggcaagaagtggcaaacttatagaggtaacagtactggaacagacatggtgttcttcggcaacgttgatagctctggcatcaaacacaacatctttaatcctcccataatagctcggtacatcagattgcatccgacccactacagcattaggagtacactccgaatggagcttatgggttgcgacttgaattcctgttcaatgccactcggaatggagtctaaagccatctctgatgcacagataaccgccagtagctactttacgaacatgtttgctacgtggtcaccctctaaggcaaggcttcatttgcaaggccggtctaatgcctggagacctcaggtgaacaacccgaaagaatggctccaggtggactttcagaagaccatgaaagtaacaggtgtcactactcagggagttaagtccttggatactagcatgtatgtgaaggagttccttatttcctcatcacaagatggccaccagtggaccctcttctttcagaatggtaaggtcaaagtgtttcagggcaatcaagacagcttcacacccgtggtgaacagtcttgatcctccactcttgacacgataccttcgaatccatccacagtcttgggagcaccagattgcattgcgcatggaagtacttggatgcgaggctcaggacctctac

SEQ ID NO: 2126 - protein, 1457 aa, synthetic construct
  REGION 1..1457: note = Variant of human B-domain deleted Factor VIII
MQIELSTCFFLCLLRFCFSATRRYYLGAVELSWDYMQSDLGELPVDARFPPRVPKSFPFNTSQVYKKTLFVEFTDHLFNIAKPRPPWMGLLGPTIQAEVYDTVVITLKNMASHPVSLHAVGVSYWKASEGAEYDDQTSQREKEDDKVFPGGSHTYVWQVLKENGPMASDPPCLTYSYLSHVDLVKDLNSGLIGALLVCREGSLAKEKTQTLAKFILLFAVFDEGKSWHSETKNSLMQDRDAASARAWPKMHTVNGYVNRTLPGLIGCHRKSVYWHVIGMGTTPEVHSIFLEGHTFLVRNHRQASLGISPITFLTAQTGLRDLGQFLLFCHIPSHQHDGMEAYVKVDSCPEEPQLRMKNNEEAEDYDDDLTDSEMDVVRFDDDNSPSIIQARSGAKKHPKTWVHYIAAEEEDWDYAPLVLAPDDRSYKSQYLNNGPQRIGRKYKKVRFMAYTDETFKTREAIQHESGILGPLLYGEVGDTLLIIFKNQASRPYNIYPHGITDVRPLYSRRLPKGVKHLKDFPILPGEIFKYKWTITVEDGPTKSDPRCLTRYYSSFVNWERDLASGLIGPLLICYKESVDQRGNQIMSDKRNVILFSVFDENRSWYLTENIQRFLPNPAGVQLEDPEFQASNIMHSINGYVFDSLQLSVCLHEVAYWYILSIGAQTDFLSVFFSGYTFKHKGVYEDTLTLFPFSGETVFMSMENPGLWILGCHNSDFRNRGMTALLKVSSCDWNTGDYYGDSYEDISAYFDSENNAIEPRSFSQNPPVLKRHQREGTRTTLQSDQEEIDYDDTISVEMKKEDFDIYDEDENQSPRSFQKKTRHYFIAAVERLWDYGMSSSPHVLRNRAQSGSVPQFKKVVFQEFTDGSFTQPLYRGELNEHLGLLGPYIRAEVEDNIMVTFRNQASRPYSFYSSLISYEEDQRQGAEPRKNFVKPNETKTYFWKVQHHMAPTKDEFDCKAWAYFSDVDLEKDVHSGLIGPLLVCHTNTLNPAHGRQVTVQEFALFFTIFDETKSWYFTENMERNCRAPCNIQMEDPTFKENYRFHAINGYIMDTLPGLVMAQDQRIRWYLLSMGSNENIHSIHFSGHVFTVRKGEEYKMALYNLYPGVFETVEMLPSKAGIWRVECLIGEHLHAGMSTLFLVYSNKCQNPLGMASGHIRDFQITASGQYGQWAPKLARLHYSGSINAWSTKEPFSWIKVDLLAPMIIHGIKTQGARQKFSSLYISQFIIMYSLDGKKWQTYRGNSTGTDMVFFGNVDSSGIKHNIFNPPIIARYIRLHPTHYSIRSTLRMELMGCDLNSCSMPLGMESKAISDAQITASSYFTNMFATWSPSKARLHLQGRSNAWRPQVNNPKEWLQVDFQKTMKVTGVTTQGVKSLDTSMYVKEFLISSSQDGHQWTLFFQNGKVKVFQGNQDSFTPVVNSLDPPLLTRYLRIHPQSWEHQIALRMEVLGCEAQDLY

SEQ ID NO: 2127 - DNA, 4371 bp, synthetic construct
  misc_feature 1..4371: note = Variant of human B-domain deleted Factor VIII
  source 1..4371: mol_type = other DNA
atgcagattgaactgtctacctgcttcttcctctgtttgctgaggttctgctttagcgccactagacggtactaccttggcgctgtggagctgtcctgggactatatgcagagtgatttgggagagcttcccgtcgacgcacgatttcctcctcgcgttccaaagtcatttccctttaacacaagccaggtgtacaagaagacgctcttcgtcgaattcaccgatcacctgttcaatatcgccaaacccagaccaccatggatgggtcttttggggcctaccatacaagcggaggtgtatgacacagttgttatcactctcaagaacatggcttctcatccggtaagtcttcacgcagtgggcgtgtcctactggaaagcttcagaaggagccgagtatgatgatcagacatcccagagggagaaagaagacgacaaggtatttccaggtgggtctcatacctatgtgtggcaagtgctcaaagagaatggccctatggcaagcgatccgccgtgtttgacttacagctacctttcacacgttgacctcgtcaaggacctcaactccgggttgattggagccttgttggtatgcagggaaggatctcttgccaaagagaagacacagaccctggccaagtttatccttctctttgctgtgttcgatgagggcaaaagttggcatagcgaaacgaagaattccctcatgcaggatcgcgacgcagccagcgccagagcttggcccaagatgcacactgtgaacggatatgtcaataggacgcttcctggcttgattgggtgtcatcggaaaagtgtctactggcacgtgatcggaatggggacaacaccagaggtccactccatatttctcgaaggccataccttccttgttcgaaaccacagacaggcatccttggggatctctcccattacctttctcactgcccaaacgggtcttcgtgacttgggtcagttccttctcttttgccatatcccgtcacaccagcatgatggtatggaagcttatgtgaaagtcgacagttgtcctgaggagccacagttgcgcatgaagaataatgaagaagccgaggattacgacgacgatctcaccgattctgagatggacgtggtgaggtttgatgacgacaactctccctccatcattcaagctcggagcggggcgaagaaacaccccaagacttgggtccactatatagcggcggaagaggaggattgggattacgctcctcttgtattggcaccagatgaccgctcatacaaaagccagtacctcaacaacggaccgcagagaattggccggaagtataagaaagtgcgatttatggcctatacagacgaaacctttaagacaagggaggccatccagcatgagagtgggattttgggacctcttctttacggcgaagttggtgataccctcctcatcatcttcaagaatcaagcttctcgcccctataacatttacccacacgggatcactgacgttaggcctttgtatagcagaagacttcccaaaggcgtgaagcatctcaaagacttccccattttgccaggcgagatctttaagtacaaatggaccattacagtggaagatggaccgactaaatcggaccctcgatgccttacgcggtactattcctccttcgtgaattgggagagagatttggcaagcggactcataggaccactcctcatctgttacaaggaatctgtagaccagaggggtaaccagattatgagtgataaacgcaatgtgatcctttttagcgtcttcgacgagaaccggtcctggtacttgaccgagaatatacaaaggttccttcccaaccccgcaggcgttcagttggaagaccctgagtttcaggccagcaatattatgcactcaatcaacggctatgtgtttgatagtctccagctttctgtttgcctccatgaagtagcctattggtacatcttgtcaattggtgctcaaacagacttcctctccgtcttcttctccggctacacctttaagcacaagggggtgtatgaggacactctcacactctttccattttctggagaaaccgtgttcatgagcatggagaatccaggcctttggatcttgggttgccacaacagtgattttcgcaatcggggaatgactgctctcctcaaagtcagcagctgtgattggaacacaggcgactattacggggattcttacgaggacataagtgcctactttgactccaagaataacgccattgagcccagatcattctcccagaatcctcccgtgcttaaaaggcatcagcgcgaaggtaccagaactactcttcagtctgatcaagaggagattgactatgacgacaccattagcgtggaaatgaagagtgtggatttcgatatctatgacgaagatgagaaccagtctccgcggagctttcagaagaagacgcgacactacttcattgcagcagtcgaaaggctttgggactacggtatgtcatcatcccctcatgtgttgcgcaatagagctcagagtggaagtgttccacagttcaagaaagtcgtctttcaagagtttacagatggcagcttcacacagcctctctatcggggcgagcttaacgaacatttgggactccttggtccctatatccgagccgaagtggaggacaacattatggttacctttaggaatcaagcctctcgcccctacagcttctactcctccctcatcagttatgaggaggatcagagacaaggcgctgaaccacggaagaactttgtgaaaccgaatgagacgaagacctacttctggaaagtacagcaccacatggcccccacaaaagacgaattcgattgcaaagcatgggcgtatttttcagacgttgacttggagaaagatgtacattcaggacttattggtcctttgttggtgtgtcacactaacactctcaatccagcccatggcaggcaggtgacagtccaggaattcgctcttttctttaccatctttgatgagaccaagtcctggtacttcacggaaaacatggagcgcaattgcagagccccctgtaacatacagatggaggaccctacctttaaggaaaattatcggttccacgcaatcaacggatacattatggatacactccctggccttgtgatggctcaggaccaacgaatcaggtggtacctcctcagcatgggttctaatgagaacatacactccattcacttttcaggacatgtgttcactgtccggaagggtgaagagtataagatggccctctacaatttgtatccaggcgtgtttgagaccgttgaaatgcttccctctaaagctggcatctggagagtagagtgcttgatcggagaacatcttcacgcaggtatgagcaccttgttcctcgtgtacagcaacaaatgtcagaatccacttggcatggccagtggacacattcgcgactttcagatcacagcatctggccagtatggacaatgggccccaaagttggctcgcctccattactccggtagcataaatgcgtggtccactaaagaacctttcagctggattaaggtcgatcttcttgcccccatgatcatccacggcattaagacacagggagcgaggcagaaattctcctccctctacatctcacagttcattattatgtatagtttggacggcaagaagtggcaaacttatagaggtaacagtactggaacagacatggtgttcttcggcaacgttgatagctctggcatcaaacacaacatctttaatcctcccataatagctcggtacatcagattgcatccgacccactacagcattaggagtacactccgaatggagcttatgggttgcgacttgaattcctgttcaatgccactcggaatggagtctaaagccatctctgatgcacagataaccgccagtagctactttacgaacatgtttgctacgtggtcaccctctaaggcaaggcttcatttgcaaggccggtctaatgcctggagacctcaggtgaacaacccgaaagaatggctccaggtggactttcagaagaccatgaaagtaacaggtgtcactactcagggagttaagtccttggatactagcatgtatgtgaaggagttccttatttcctcatcacaagatggccaccagtggaccctcttctttcagaatggtaaggtcaaagtgtttcagggcaatcaagacagcttcacacccgtggtgaacagtcttgatcctccactcttgacacgataccttcgaatccatccacagtcttgggagcaccagattgcattgcgcatggaagtacttggatgcgaggctcaggacctctac

SEQ ID NO: 2128 - protein, 1457 aa, synthetic construct
  REGION 1..1457: note = Variant of human B-domain deleted Factor VIII
MQIELSTCFFLCLLRFCFSATRRYYLGAVELSWDYMQSDLGELPVDARFPPRVPKSFPFNTSQVYKKTLFVEFTDHLFNIAKPRPPWMGLLGPTIQAEVYDTVVITLKNMASHPVSLHAVGVSYWKASEGAEYDDQTSQREKEDDKVFPGGSHTYVWQVLKENGPMASDPPCLTYSYLSHVDLVKDLNSGLIGALLVCREGSLAKEKTQTLAKFILLFAVFDEGKSWHSETKNSLMQDRDAASARAWPKMHTVNGYVNRTLPGLIGCHRKSVYWHVIGMGTTPEVHSIFLEGHTFLVRNHRQASLGISPITFLTAQTGLRDLGQFLLFCHIPSHQHDGMEAYVKVDSCPEEPQLRMKNNEEAEDYDDDLTDSEMDVVRFDDDNSPSIIQARSGAKKHPKTWVHYIAAEEEDWDYAPLVLAPDDRSYKSQYLNNGPQRIGRKYKKVRFMAYTDETFKTREAIQHESGILGPLLYGEVGDTLLIIFKNQASRPYNIYPHGITDVRPLYSRRLPKGVKHLKDFPILPGEIFKYKWTITVEDGPTKSDPRCLTRYYSSFVNWERDLASGLIGPLLICYKESVDQRGNQIMSDKRNVILFSVFDENRSWYLTENIQRFLPNPAGVQLEDPEFQASNIMHSINGYVFDSLQLSVCLHEVAYWYILSIGAQTDFLSVFFSGYTFKHKGVYEDTLTLFPFSGETVFMSMENPGLWILGCHNSDFRNRGMTALLKVSSCDWNTGDYYGDSYEDISAYFDSKNNAIEPRSFSQNPPVLKRHQREGTRTTLQSDQEEIDYDDTISVEMKSVDFDIYDEDENQSPRSFQKKTRHYFIAAVERLWDYGMSSSPHVLRNRAQSGSVPQFKKVVFQEFTDGSFTQPLYRGELNEHLGLLGPYIRAEVEDNIMVTFRNQASRPYSFYSSLISYEEDQRQGAEPRKNFVKPNETKTYFWKVQHHMAPTKDEFDCKAWAYFSDVDLEKDVHSGLIGPLLVCHTNTLNPAHGRQVTVQEFALFFTIFDETKSWYFTENMERNCRAPCNIQMEDPTFKENYRFHAINGYIMDTLPGLVMAQDQRIRWYLLSMGSNENIHSIHFSGHVFTVRKGEEYKMALYNLYPGVFETVEMLPSKAGIWRVECLIGEHLHAGMSTLFLVYSNKCQNPLGMASGHIRDFQITASGQYGQWAPKLARLHYSGSINAWSTKEPFSWIKVDLLAPMIIHGIKTQGARQKFSSLYISQFIIMYSLDGKKWQTYRGNSTGTDMVFFGNVDSSGIKHNIFNPPIIARYIRLHPTHYSIRSTLRMELMGCDLNSCSMPLGMESKAISDAQITASSYFTNMFATWSPSKARLHLQGRSNAWRPQVNNPKEWLQVDFQKTMKVTGVTTQGVKSLDTSMYVKEFLISSSQDGHQWTLFFQNGKVKVFQGNQDSFTPVVNSLDPPLLTRYLRIHPQSWEHQIALRMEVLGCEAQDLY

SEQ ID NO: 2129 - DNA, 4371 bp, synthetic construct
  misc_feature 1..4371: note = Variant of human B-domain deleted Factor VIII
  source 1..4371: mol_type = other DNA
atgcagattgaactgtctacctgcttcttcctctgtttgctgaggttctgctttagcgccactagacggtactaccttggcgctgtggagctgtcctgggactatatgcagagtgatttgggagagcttcccgtcgacgcacgatttcctcctcgcgttccaaagtcatttccctttaacacaagccaggtgtacaagaagacgctcttcgtcgaattcaccgatcacctgttcaatatcgccaaacccagaccaccatggatgggtcttttggggcctaccatacaagcggaggtgtatgacacagttgttatcactctcaagaacatggcttctcatccggtaagtcttcacgcagtgggcgtgtcctactggaaagcttcagaaggagccgagtatgatgatcagacatcccagagggagaaagaagacgacaaggtatttccaggtgggtctcatacctatgtgtggcaagtgctcaaagagaatggccctatggcaagcgatccgccgtgtttgacttacagctacctttcacacgttgacctcgtcaaggacctcaactccgggttgattggagccttgttggtatgcagggaaggatctcttgccaaagagaagacacagaccctggccaagtttatccttctctttgctgtgttcgatgagggcaaaagttggcatagcgaaacgaagaattccctcatgcaggatcgcgacgcagccagcgccagagcttggcccaagatgcacactgtgaacggatatgtcaataggacgcttcctggcttgattgggtgtcatcggaaaagtgtctactggcacgtgatcggaatggggacaacaccagaggtccactccatatttctcgaaggccataccttccttgttcgaaaccacagacaggcatccttggggatctctcccattacctttctcactgcccaaacgggtcttcgtgacttgggtcagttccttctcttttgccatatcccgtcacaccagcatgatggtatggaagcttatgtgaaagtcgacagttgtcctgaggagccacagttgcgcatgaagaataatgaagaagccgaggattacgacgacgatctcaccgattctgagatggacgtggtgaggtttgatgacgacaactctccctccatcattcaagctcggagcggggcgaagaaacaccccaagacttgggtccactatatagcggcggaagaggaggattgggattacgctcctcttgtattggcaccagatgaccgctcatacaaaagccagtacctcaacaacggaccgcagagaattggccggaagtataagaaagtgcgatttatggcctatacagacgaaacctttaagacaagggaggccatccagcatgagagtgggattttgggacctcttctttacggcgaagttggtgataccctcctcatcatcttcaagaatcaagcttctcgcccctataacatttacccacacgggatcactgacgttaggcctttgtatagcagaagacttcccaaaggcgtgaagcatctcaaagacttccccattttgccaggcgagatctttaagtacaaatggaccattacagtggaagatggaccgactaaatcggaccctcgatgccttacgcggtactattcctccttcgtgaattgggagagagatttggcaagcggactcataggaccactcctcatctgttacaaggaatctgtagaccagaggggtaaccagattatgagtgataaacgcaatgtgatcctttttagcgtcttcgacgagaaccggtcctggtacttgaccgagaatatacaaaggttccttcccaaccccgcaggcgttcagttggaagaccctgagtttcaggccagcaatattatgcactcaatcaacggctatgtgtttgatagtctccagctttctgtttgcctccatgaagtagcctattggtacatcttgtcaattggtgctcaaacagacttcctctccgtcttcttctccggctacacctttaagcacaagggggtgtatgaggacactctcacactctttccattttctggagaaaccgtgttcatgagcatggagaatccaggcctttggatcttgggttgccacaacagtgattttcgcaatcggggaatgactgctctcctcaaagtcagcagctgtgattggaacacaggcgactattacggggattcttacgaggacataagtgcctactttgactccaagaataacgccattgagcccagatcattctcccagaatcctcccgtgcttaaaaggcatcagcgcgaaggtaccagaactactcttcagtctgatcaagaggagattgactatgacgacaccattagcgtggaaatgaagaaggaggatttcgatatctatgacgaagatgagaaccagtctccgcggagctttcagaagaagacgcgacactacttcattgcagcagtcgaaaggctttgggactacggtatgtcatcatcccctcatgtgttgcgcaatagagctcagagtggaagtgttccacagttcaagaaagtcgtctttcaagagtttacagatggcagcttcacacagcctctctatcggggcgagcttaacgaacatttgggactccttggtccctatatccgagccgaagtggaggacaacattatggttacctttaggaatcaagcctctcgcccctacagcttctactcctccctcatcagttatgaggaggatcagagacaaggcgctgaaccacggaagaactttgtgaaaccgaatgagacgaagacctacttctggaaagtacagcaccacatggcccccacaaaagacgaattcgattgcaaagcatgggcgtatttttcagacgttgacttggagaaagatgtacattcaggacttattggtcctttgttggtgtgtcacactaacactctcaatccagcccatggcaggcaggtgacagtccaggaattcgctcttttctttaccatctttgatgagaccaagtcctggtacttcacggaaaacatggagcgcaattgcagagccccctgtaacatacagatggaggaccctacctttaaggaaaattatcggttccacgcaatcaacggatacattatggatacactccctggccttgtgatggctcaggaccaacgaatcaggtggtacctcctcagcatgggttctaatgagaacatacactccattcacttttcaggacatgtgttcactgtccggaagaaagaagagtataagatggccctctacaatttgtatccaggcgtgtttgagaccgttgaaatgcttcccatcaaagctggcatctggagagtagagtgcttgatcggagaacatcttcacgcaggtatgagcaccttgttcctcgtgtacagcaacaaatgtcagaatccacttggcatggccagtggacacattcgcgactttcagatcacagcatctggccagtatggacaatgggccccaaagttggctcgcctccattactccggtagcataaatgcgtggtccactaaagaacctttcagctggattaaggtcgatcttcttgcccccatgatcatccacggcattaagacacagggagcgaggcagaaattctcctccctctacatctcacagttcattattatgtatagtttggacggcaagaagtggcaaacttatagaggtaacagtactggaacagacatggtgttcttcggcaacgttgatagctctggcatcaaacacaacatctttaatcctcccataatagctcggtacatcagattgcatccgacccactacagcattaggagtacactccgaatggagcttatgggttgcgacttgaattcctgttcaatgccactcggaatggagtctaaagccatctctgatgcacagataaccgccagtagctactttacgaacatgtttgctacgtggtcaccctctaaggcaaggcttcatttgcaaggccggtctaatgcctggagacctcaggtgaacaacccgaaagaatggctccaggtggactttcagaagaccatgaaagtaacaggtgtcactactcagggagttaagtccttggatactagcatgtatgtgaaggagttccttatttcctcatcacaagatggccaccagtggaccctcttctttcagaatggtaaggtcaaagtgtttcagggcaatcaagacagcttcacacccgtggtgaacagtcttgatcctccactcttgacacgataccttcgaatccatccacagtcttgggagcaccagattgcattgcgcatggaagtacttggatgcgaggctcaggacctctac

SEQ ID NO: 2130 - protein, 1457 aa, synthetic construct
  REGION 1..1457: note = Variant of human B-domain deleted Factor VIII
MQIELSTCFFLCLLRFCFSATRRYYLGAVELSWDYMQSDLGELPVDARFPPRVPKSFPFNTSQVYKKTLFVEFTDHLFNIAKPRPPWMGLLGPTIQAEVYDTVVITLKNMASHPVSLHAVGVSYWKASEGAEYDDQTSQREKEDDKVFPGGSHTYVWQVLKENGPMASDPPCLTYSYLSHVDLVKDLNSGLIGALLVCREGSLAKEKTQTLAKFILLFAVFDEGKSWHSETKNSLMQDRDAASARAWPKMHTVNGYVNRTLPGLIGCHRKSVYWHVIGMGTTPEVHSIFLEGHTFLVRNHRQASLGISPITFLTAQTGLRDLGQFLLFCHIPSHQHDGMEAYVKVDSCPEEPQLRMKNNEEAEDYDDDLTDSEMDVVRFDDDNSPSIIQARSGAKKHPKTWVHYIAAEEEDWDYAPLVLAPDDRSYKSQYLNNGPQRIGRKYKKVRFMAYTDETFKTREAIQHESGILGPLLYGEVGDTLLIIFKNQASRPYNIYPHGITDVRPLYSRRLPKGVKHLKDFPILPGEIFKYKWTITVEDGPTKSDPRCLTRYYSSFVNWERDLASGLIGPLLICYKESVDQRGNQIMSDKRNVILFSVFDENRSWYLTENIQRFLPNPAGVQLEDPEFQASNIMHSINGYVFDSLQLSVCLHEVAYWYILSIGAQTDFLSVFFSGYTFKHKGVYEDTLTLFPFSGETVFMSMENPGLWILGCHNSDFRNRGMTALLKVSSCDWNTGDYYGDSYEDISAYFDSKNNAIEPRSFSQNPPVLKRHQREGTRTTLQSDQEEIDYDDTISVEMKKEDFDIYDEDENQSPRSFQKKTRHYFIAAVERLWDYGMSSSPHVLRNRAQSGSVPQFKKVVFQEFTDGSFTQPLYRGELNEHLGLLGPYIRAEVEDNIMVTFRNQASRPYSFYSSLISYEEDQRQGAEPRKNFVKPNETKTYFWKVQHHMAPTKDEFDCKAWAYFSDVDLEKDVHSGLIGPLLVCHTNTLNPAHGRQVTVQEFALFFTIFDETKSWYFTENMERNCRAPCNIQMEDPTFKENYRFHAINGYIMDTLPGLVMAQDQRIRWYLLSMGSNENIHSIHFSGHVFTVRKKEEYKMALYNLYPGVFETVEMLPIKAGIWRVECLIGEHLHAGMSTLFLVYSNKCQNPLGMASGHIRDFQITASGQYGQWAPKLARLHYSGSINAWSTKEPFSWIKVDLLAPMIIHGIKTQGARQKFSSLYISQFIIMYSLDGKKWQTYRGNSTGTDMVFFGNVDSSGIKHNIFNPPIIARYIRLHPTHYSIRSTLRMELMGCDLNSCSMPLGMESKAISDAQITASSYFTNMFATWSPSKARLHLQGRSNAWRPQVNNPKEWLQVDFQKTMKVTGVTTQGVKSLDTSMYVKEFLISSSQDGHQWTLFFQNGKVKVFQGNQDSFTPVVNSLDPPLLTRYLRIHPQSWEHQIALRMEVLGCEAQDLY

SEQ ID NO: 2131 - DNA, 4371 bp, synthetic construct
  misc_feature 1..4371: note = Variant of human B-domain deleted Factor VIII
  source 1..4371: mol_type = other DNA
atgcagattgaactgtctacctgcttcttcctctgtttgctgaggttctgctttagcgccactagacggtactaccttggcgctgtggagctgtcctgggactatatgcagagtgatttgggagagcttcccgtcgacgcacgatttcctcctcgcgttccaaagtcatttccctttaacacaagccaggtgtacaagaagacgctcttcgtcgaattcaccgatcacctgttcaatatcgccaaacccagaccaccatggatgggtcttttggggcctaccatacaagcggaggtgtatgacacagttgttatcactctcaagaacatggcttctcatccggtaagtcttcacgcagtgggcgtgtcctactggaaagcttcagaaggagccgagtatgatgatcagacatcccagagggagaaagaagacgacaaggtatttccaggtgggtctcatacctatgtgtggcaagtgctcaaagagaatggccctatggcaagcgatccgccgtgtttgacttacagctacctttcacacgttgacctcgtcaaggacctcaactccgggttgattggagccttgttggtatgcagggaaggatctcttgccaaagagaagacacagaccctggccaagtttatccttctctttgctgtgttcgatgagggcaaaagttggcatagcgaaacgaagaattccctcatgcaggatcgcgacgcagccagcgccagagcttggcccaagatgcacactgtgaacggatatgtcaataggacgcttcctggcttgattgggtgtcatcggaaaagtgtctactggcacgtgatcggaatggggacaacaccagaggtccactccatatttctcgaaggccataccttccttgttcgaaaccacagacaggcatccttggggatctctcccattacctttctcactgcccaaacgggtcttcgtgacttgggtcagttccttctcttttgccatatcccgtcacaccagcatgatggtatggaagcttatgtgaaagtcgacagttgtcctgaggagccacagttgcgcatgaagaataatgaagaagccgaggattacgacgacgatctcaccgattctgagatggacgtggtgaggtttgatgacgacaactctccctccatcattcaagctcggagcggggcgaagaaacaccccaagacttgggtccactatatagcggcggaagaggaggattgggattacgctcctcttgtattggcaccagatgaccgctcatacaaaagccagtacctcaacaacggaccgcagagaattggccggaagtataagaaagtgcgatttatggcctatacagacgaaacctttaagacaagggaggccatccagcatgagagtgggattttgggacctcttctttacggcgaagttggtgataccctcctcatcatcttcaagaatcaagcttctcgcccctataacatttacccacacgggatcactgacgttaggcctttgtatagcagaagacttcccaaaggcgtgaagcatctcaaagacttccccattttgccaggcgagatctttaagtacaaatggaccattacagtggaagatggaccgactaaatcagaccctcgatgccttacgcggtactattcctccttcgtgaattgggagagagatttggcaagcggactcataggaccactcctcatctgttacaaggaatctgtagaccagaggggtaaccagattatgagtgataaacgcaatgtgatcctttttagcgtcttcgacgagaaccggtcctggtacttgaccgagaatatacaaaggttccttcccaaccccgcaggcgttcagttggaagaccctgagtttcaggccagcaatattatgcactcaatcaacggctatgtgtttgatagtctccagctttctgtttgcctccatgaagtagcctattggtacatcttgtcaattggtgctcaaacagacttcctctccgtcttcttctccggctacacctttaagcacaagggcgtgtatgaggacactctcacactctttccattttctggagaaaccgtgttcatgagcatggagaatccaggcctttggatcttgggttgccacaacagtgattttcgcaatcggggaatgactgctctcctcaaagtcagcagctgtgattggaacacaggcgactattacgaggattcttacgaggacataagtgcctactttgactccaagaataacgccattgagcccagatcattctcccagaatcctcccgtgcttaaaaggcatcagcgcgaaggtaccagaactactcttcagtctgatcaagaggagattgactatgacgacaccattagcgtggaaatgaagaaggtggatttcgatatctatgacgaagatgagaaccagtctccgcggagctttcagaagaagacgcgacactacttcattgcagcagtcgaaaggctttgggactacggtatgtcatcatcccctcatgtgttgcgcaatagagctcagagtggaagtgttccacagttcaagaaagtcgtctttcaagagtttacagatggcagcttcacacagcctctctatcggggcgagcttaacgaacatttgggactccttggtccctatatccgagccgaagtggaggacaacattatggttacctttaggaatcaagcctctcgcccctacagcttctactcctccctcatcagttatgaggaggatcagagacaaggcgctgaaccacggaagaactttgtgaaaccgaatgagacgaagacctacttctggaaagtacagcaccacatggcccccacaaaagacgaattcgattgcaaagcatgggcgtatttttcagacgttgacttggagaaagatgtacattcaggacttattggtcctttgttggtgtgtcacactaacactctcaatccagcccatggcaggcaggtgacagtccaggaattcgctcttttctttaccatctttgatgagaccaagtcctggtacttcacggaaaacatggagcgcaattgcagagccccctgtaacatacagatggaggaccctacctttaaggaaaattatcggttccacgcaatcaacggatacattatggatacactccctggccttgtgatggctcaggaccaacgaatcaggtggtacctcctcagcatgggttctaatgagaacatacactccattcacttttcaggacatgtgttcactgtccggaagaaagaagagtataagatggccctctacaatttgtatccaggcgtgtttgagaccgttgaaatgcttccctctaaagctggcatctggagagtagagtgcttgatcggagaacatcttcacgcaggtatgagcaccttgttcctcgtgtacagcaacaaatgtcagaatccacttggcatggccagtggacacattcgcgactttcagatcacagcatctggccagtatggacaatgggccccaaagttggctcgcctccattactccggtagcataaatgcgtggtccactaaagaacctttcagctggattaaggtcgatcttcttgcccccatgatcatccacggcattaagacacagggagcgaggcagaaattctcctccctctacatctcacagttcattattatgtatagtttggacggcaagaagtggcaaacttatagaggtaacagtactggaacagacatggtgttcttcggcaacgttgatagctctggcatcaaacacaacatctttaatcctcccataatagctcggtacatcagattgcatccgacccactacagcattaggagtacactccgaatggagcttatgggttgcgacttgaattcctgttcaatgccactcggaatggagtctaaagccatctctgatgcacagataaccgccagtagctactttacgaacatgtttgctacgtggtcaccctctaaggcaaggcttcatttgcaaggccggtctaatgcctggagacctcaggtgaacaacccgaaagaatggctccaggtggactttcagaagaccatgaaagtaacaggtgtcactactcagggagttaagtccttggatactagcatgtatgtgaaggagttccttatttcctcatcacaagatggccaccagtggaccctcttctttcagaatggtaaggtcaaagtgtttcagggcaatcaagacagcttcacacccgtggtgaacagtcttgatcctccactcttgacacgataccttcgaatccatccacagtcttgggagcaccagattgcattgcgcatggaagtacttggatgcgaggctcaggacctctac

SEQ ID NO: 2132 - protein, 1457 aa, synthetic construct
  REGION 1..1457: note = Variant of human B-domain deleted Factor VIII
MQIELSTCFFLCLLRFCFSATRRYYLGAVELSWDYMQSDLGELPVDARFPPRVPKSFPFNTSQVYKKTLFVEFTDHLFNIAKPRPPWMGLLGPTIQAEVYDTVVITLKNMASHPVSLHAVGVSYWKASEGAEYDDQTSQREKEDDKVFPGGSHTYVWQVLKENGPMASDPPCLTYSYLSHVDLVKDLNSGLIGALLVCREGSLAKEKTQTLAKFILLFAVFDEGKSWHSETKNSLMQDRDAASARAWPKMHTVNGYVNRTLPGLIGCHRKSVYWHVIGMGTTPEVHSIFLEGHTFLVRNHRQASLGISPITFLTAQTGLRDLGQFLLFCHIPSHQHDGMEAYVKVDSCPEEPQLRMKNNEEAEDYDDDLTDSEMDVVRFDDDNSPSIIQARSGAKKHPKTWVHYIAAEEEDWDYAPLVLAPDDRSYKSQYLNNGPQRIGRKYKKVRFMAYTDETFKTREAIQHESGILGPLLYGEVGDTLLIIFKNQASRPYNIYPHGITDVRPLYSRRLPKGVKHLKDFPILPGEIFKYKWTITVEDGPTKSDPRCLTRYYSSFVNWERDLASGLIGPLLICYKESVDQRGNQIMSDKRNVILFSVFDENRSWYLTENIQRFLPNPAGVQLEDPEFQASNIMHSINGYVFDSLQLSVCLHEVAYWYILSIGAQTDFLSVFFSGYTFKHKGVYEDTLTLFPFSGETVFMSMENPGLWILGCHNSDFRNRGMTALLKVSSCDWNTGDYYEDSYEDISAYFDSKNNAIEPRSFSQNPPVLKRHQREGTRTTLQSDQEEIDYDDTISVEMKKVDFDIYDEDENQSPRSFQKKTRHYFIAAVERLWDYGMSSSPHVLRNRAQSGSVPQFKKVVFQEFTDGSFTQPLYRGELNEHLGLLGPYIRAEVEDNIMVTFRNQASRPYSFYSSLISYEEDQRQGAEPRKNFVKPNETKTYFWKVQHHMAPTKDEFDCKAWAYFSDVDLEKDVHSGLIGPLLVCHTNTLNPAHGRQVTVQEFALFFTIFDETKSWYFTENMERNCRAPCNIQMEDPTFKENYRFHAINGYIMDTLPGLVMAQDQRIRWYLLSMGSNENIHSIHFSGHVFTVRKKEEYKMALYNLYPGVFETVEMLPSKAGIWRVECLIGEHLHAGMSTLFLVYSNKCQNPLGMASGHIRDFQITASGQYGQWAPKLARLHYSGSINAWSTKEPFSWIKVDLLAPMIIHGIKTQGARQKFSSLYISQFIIMYSLDGKKWQTYRGNSTGTDMVFFGNVDSSGIKHNIFNPPIIARYIRLHPTHYSIRSTLRMELMGCDLNSCSMPLGMESKAISDAQITASSYFTNMFATWSPSKARLHLQGRSNAWRPQVNNPKEWLQVDFQKTMKVTGVTTQGVKSLDTSMYVKEFLISSSQDGHQWTLFFQNGKVKVFQGNQDSFTPVVNSLDPPLLTRYLRIHPQSWEHQIALRMEVLGCEAQDLY

SEQ ID NO: 2133 - DNA, 4371 bp, synthetic construct
  misc_feature 1..4371: note = Variant of human B-domain deleted Factor VIII
  source 1..4371: mol_type = other DNA
atgcagattgaactgtctacctgcttcttcctctgtttgctgaggttctgctttagcgccactagacggtactaccttggcgctgtggagctgtcctgggactatatgcagagtgatttgggagagcttcccgtcgacgcacgatttcctcctcgcgttccaaagtcatttccctttaacacaagccaggtgtacaagaagacgctcttcgtcgaattcaccgatcacctgttcaatatcgccaaacccagaccaccatggatgggtcttttggggcctaccatacaagcggaggtgtatgacacagttgttatcactctcaagaacatggcttctcatccggtaagtcttcacgcagtgggcgtgtcctactggaaagcttcagaaggagccgagtatgatgatcagacatcccagagggagaaagaagacgacaaggtatttccaggtgggtctcatacctatgtgtggcaagtgctcaaagagaatggccctatggcaagcgatccgccgtgtttgacttacagctacctttcacacgttgacctcgtcaaggacctcaactccgggttgattggagccttgttggtatgcagggaaggatctcttgccaaagagaagacacagaccctggccaagtttatccttctctttgctgtgttcgatgagggcaaaagttggcatagcgaaacgaagaattccctcatgcaggatcgcgacgcagccagcgccagagcttggcccaagatgcacactgtgaacggatatgtcaataggacgcttcctggcttgattgggtgtcatcggaaaagtgtctactggcacgtgatcggaatggggacaacaccagaggtccactccatatttctcgaaggccataccttccttgttcgaaaccacagacaggcatccttggggatctctcccattacctttctcactgcccaaacgggtcttcgtgacttgggtcagttccttctcttttgccatatcccgtcacaccagcatgatggtatggaagcttatgtgaaagtcgacagttgtcctgaggagccacagttgcgcatgaagaataatgaagaagccgaggattacgacgacgatctcaccgattctgagatggacgtggtgaggtttgatgacgacaactctccctccatcattcaagctcggagcggggcgaagaaacaccccaagacttgggtccactatatagcggcggaagaggaggattgggattacgctcctcttgtattggcaccagatgaccgctcatacaaaagccagtacctcaacaacggaccgcagagaattggccggaagtataagaaagtgcgatttatggcctatacagacgaaacctttaagacaagggaggccatccagcatgagagtgggattttgggacctcttctttacggcgaagttggtgataccctcctcatcatcttcaagaatcaagcttctcgcccctataacatttacccacacgggatcactgacgttaggcctttgtatagcagaagacttcccaaaggcgtgaagcatctcaaagacttccccattttgccaggcgagatctttaagtacaaatggaccattacagtggaagatggaccgactaaatcggaccctcgatgccttacgcggtactattcctccttcgtgaattgggagagagatttggcaagcggactcataggaccactcctcatctgttacaaggaatctgtagaccagaggggtaaccagattatgagtgataaacgcaatgtgatcctttttagcgtcttcgacgagaaccggtcctggtacttgaccgagaatatacaaaggttccttcccaaccccgcaggcgttcagttggaagaccctgagtttcaggccagcaatattatgcactcaatcaacggctatgtgtttgatagtctccagctttctgtttgcctccatgaagtagcctattggtacatcttgtcaattggtgctcaaacagacttcctctccgtcttcttctccggctacacctttaagcacaagggcgtgtatgaggacactctcacactctttccattttctggagaaaccgtgttcatgagcatggagaatccaggcctttggatcttgggttgccacaacagtgattttcgcaatcggggaatgactgctctcctcaaagtcagcagctgtgattggaacacaggcgactattacgaggattcttacgaggacataagtgcctactttgactccaagaataacgccattgagcccagatcattctcccagaatcctcccgtgcttaaaaggcatcagcgcgaaggtaccagaactactcttcagtctgatcaagaggagattgactatgacgacaccattagcgtggaaatgaagaaggaggatttcgatatctatgacgaagatgagaaccagtctccgcggagctttcagaagaagacgcgacactacttcattgcagcagtcgaaaggctttgggactacggtatgtcatcatcccctcatgtgttgcgcaatagagctcagagtggaagtgttccacagttcaagaaagtcgtctttcaagagtttacagatggcagcttcacacagcctctctatcggggcgagcttaacgaacatttgggactccttggtccctatatccgagccgaagtggaggacaacattatggttacctttaggaatcaagcctctcgcccctacagcttctactcctccctcatcagttatgaggaggatcagagacaaggcgctgaaccacggaagaactttgtgaaaccgaatgagacgaagacctacttctggaaagtacagcaccacatggcccccacaaaagacgaattcgattgcaaagcatgggcgtatttttcagacgttgacttggagaaagatgtacattcaggacttattggtcctttgttggtgtgtcacactaacactctcaatccagcccatggcaggcaggtgacagtccaggaattcgctcttttctttaccatctttgatgagaccaagtcctggtacttcacggaaaacatggagcgcaattgcagagccccctgtaacatacagatggaggaccctacctttaaggaaaattatcggttccacgcaatcaacggatacattatggatacactccctggccttgtgatggctcaggaccaacgaatcaggtggtacctcctcagcatgggttctaatgagaacatacactccattcacttttcaggacatgtgttcactgtccggaagggtgaagagtataagatggccctctacaatttgtatccaggcgtgtttgagaccgttgaaatgcttccctctaaagctggcatctggagagtagagtgcttgatcggagaacatcttcacgcaggtatgagcaccttgttcctcgtgtacagcaacaaatgtcagaatccacttggcatggccagtggacacattcgcgactttcagatcacagcatctggccagtatggacaatgggccccaaagttggctcgcctccattactccggtagcataaatgcgtggtccactaaagaacctttcagctggattaaggtcgatcttcttgcccccatgatcatccacggcattaagacacagggagcgaggcagaaattctcctccctctacatctcacagttcattattatgtatagtttggacggcaagaagtggcaaacttatagaggtaacagtactggaacagacatggtgttcttcggcaacgttgatagctctggcatcaaacacaacatctttaatcctcccataatagctcggtacatcagattgcatccgacccactacagcattaggagtacactccgaatggagcttatgggttgcgacttgaattcctgttcaatgccactcggaatggagtctaaagccatctctgatgcacagataaccgccagtagctactttacgaacatgtttgctacgtggtcaccctctaaggcaaggcttcatttgcaaggccggtctaatgcctggagacctcaggtgaacaacccgaaagaatggctccaggtggactttcagaagaccatgaaagtaacaggtgtcactactcagggagttaagtccttggatactagcatgtatgtgaaggagttccttatttcctcatcacaagatggccaccagtggaccctcttctttcagaatggtaaggtcaaagtgtttcagggcaatcaagacagcttcacacccgtggtgaacagtcttgatcctccactcttgacacgataccttcgaatccatccacagtcttgggagcaccagattgcattgcgcatggaagtacttggatgcgaggctcaggacctctac

SEQ ID NO: 2134 - protein, 1457 aa, synthetic construct
  REGION 1..1457: note = Variant of human B-domain deleted Factor VIII
MQIELSTCFFLCLLRFCFSATRRYYLGAVELSWDYMQSDLGELPVDARFPPRVPKSFPFNTSQVYKKTLFVEFTDHLFNIAKPRPPWMGLLGPTIQAEVYDTVVITLKNMASHPVSLHAVGVSYWKASEGAEYDDQTSQREKEDDKVFPGGSHTYVWQVLKENGPMASDPPCLTYSYLSHVDLVKDLNSGLIGALLVCREGSLAKEKTQTLAKFILLFAVFDEGKSWHSETKNSLMQDRDAASARAWPKMHTVNGYVNRTLPGLIGCHRKSVYWHVIGMGTTPEVHSIFLEGHTFLVRNHRQASLGISPITFLTAQTGLRDLGQFLLFCHIPSHQHDGMEAYVKVDSCPEEPQLRMKNNEEAEDYDDDLTDSEMDVVRFDDDNSPSIIQARSGAKKHPKTWVHYIAAEEEDWDYAPLVLAPDDRSYKSQYLNNGPQRIGRKYKKVRFMAYTDETFKTREAIQHESGILGPLLYGEVGDTLLIIFKNQASRPYNIYPHGITDVRPLYSRRLPKGVKHLKDFPILPGEIFKYKWTITVEDGPTKSDPRCLTRYYSSFVNWERDLASGLIGPLLICYKESVDQRGNQIMSDKRNVILFSVFDENRSWYLTENIQRFLPNPAGVQLEDPEFQASNIMHSINGYVFDSLQLSVCLHEVAYWYILSIGAQTDFLSVFFSGYTFKHKGVYEDTLTLFPFSGETVFMSMENPGLWILGCHNSDFRNRGMTALLKVSSCDWNTGDYYEDSYEDISAYFDSKNNAIEPRSFSQNPPVLKRHQREGTRTTLQSDQEEIDYDDTISVEMKKEDFDIYDEDENQSPRSFQKKTRHYFIAAVERLWDYGMSSSPHVLRNRAQSGSVPQFKKVVFQEFTDGSFTQPLYRGELNEHLGLLGPYIRAEVEDNIMVTFRNQASRPYSFYSSLISYEEDQRQGAEPRKNFVKPNETKTYFWKVQHHMAPTKDEFDCKAWAYFSDVDLEKDVHSGLIGPLLVCHTNTLNPAHGRQVTVQEFALFFTIFDETKSWYFTENMERNCRAPCNIQMEDPTFKENYRFHAINGYIMDTLPGLVMAQDQRIRWYLLSMGSNENIHSIHFSGHVFTVRKGEEYKMALYNLYPGVFETVEMLPSKAGIWRVECLIGEHLHAGMSTLFLVYSNKCQNPLGMASGHIRDFQITASGQYGQWAPKLARLHYSGSINAWSTKEPFSWIKVDLLAPMIIHGIKTQGARQKFSSLYISQFIIMYSLDGKKWQTYRGNSTGTDMVFFGNVDSSGIKHNIFNPPIIARYIRLHPTHYSIRSTLRMELMGCDLNSCSMPLGMESKAISDAQITASSYFTNMFATWSPSKARLHLQGRSNAWRPQVNNPKEWLQVDFQKTMKVTGVTTQGVKSLDTSMYVKEFLISSSQDGHQWTLFFQNGKVKVFQGNQDSFTPVVNSLDPPLLTRYLRIHPQSWEHQIALRMEVLGCEAQDLY

SEQ ID NO: 2135 - DNA, 4371 bp, synthetic construct
  misc_feature 1..4371: note = Variant of human B-domain deleted Factor VIII
  source 1..4371: mol_type = other DNA
atgcagattgaactgtctacctgcttcttcctctgtttgctgaggttctgctttagcgccactagacggtactaccttggcgctgtggagctgtcctgggactatatgcagagtgatttgggagagcttcccgtcgacgcacgatttcctcctcgcgttccaaagtcatttccctttaacacaagccaggtgtacaagaagacgctcttcgtcgaattcaccgatcacctgttcaatatcgccaaacccagaccaccatggatgggtcttttggggcctaccatacaagcggaggtgtatgacacagttgttatcactctcaagaacatggcttctcatccggtaagtcttcacgcagtgggcgtgtcctactggaaagcttcagaaggagccgagtatgatgatcagacatcccagagggagaaagaagacgacaaggtatttccaggtgggtctcatacctatgtgtggcaagtgctcaaagagaatggccctatggcaagcgatccgccgtgtttgacttacagctacctttcacacgttgacctcgtcaaggacctcaactccgggttgattggagccttgttggtatgcagggaaggatctcttgccaaagagaagacacagaccctggccaagtttatccttctctttgctgtgttcgatgagggcaaaagttggcatagcgaaacgaagaattccctcatgcaggatcgcgacgcagccagcgccagagcttggcccaagatgcacactgtgaacggatatgtcaataggacgcttcctggcttgattgggtgtcatcggaaaagtgtctactggcacgtgatcggaatggggacaacaccagaggtccactccatatttctcgaaggccataccttccttgttcgaaaccacagacaggcatccttggggatctctcccattacctttctcactgcccaaacgggtcttcgtgacttgggtcagttccttctcttttgccatatcccgtcacaccagcatgatggtatggaagcttatgtgaaagtcgacagttgtcctgaggagccacagttgcgcatgaagaataatgaagaagccgaggattacgacgacgatctcaccgattctgagatggacgtggtgaggtttgatgacgacaactctccctccatcattcaagctcggagcggggcgaagaaacaccccaagacttgggtccactatatagcggcggaagaggaggattgggattacgctcctcttgtattggcaccagatgaccgctcatacaaaagccagtacctcaacaacggaccgcagagaattggccggaagtataagaaagtgcgatttatggcctatacagacgaaacctttaagacaagggaggccatccagcatgagagtgggattttgggacctcttctttacggcgaagttggtgataccctcctcatcatcttcaagaatcaagcttctcgcccctataacatttacccacacgggatcactgacgttaggcctttgtatagcagaagacttcccaaaggcgtgaagcatctcaaagacttccccattttgccaggcgagatctttaagtacaaatggaccattacagtggaagatggaccgactaaatcggaccctcgatgccttacgcggtactattcctccttcgtgaattgggagagagatttggcaagcggactcataggaccactcctcatctgttacaaggaatctgtagaccagaggggtaaccagattatgagtgataaacgcaatgtgatcctttttagcgtcttcgacgagaaccggtcctggtacttgaccgagaatatacaaaggttccttcccaaccccgcaggcgttcagttggaagaccctgagtttcaggccagcaatattatgcactcaatcaacggctatgtgtttgatagtctccagctttctgtttgcctccatgaagtagcctattggtacatcttgtcaattggtgctcaaacagacttcctctccgtcttcttctccggctacacctttaagcacaagggcgtgtatgaggacactctcacactctttccattttctggagaaaccgtgttcatgagcatggagaatccaggcctttggatcttgggttgccacaacagtgattttcgcaatcggggaatgactgctctcctcaaagtcagcagctgtgattggaacacaggcgactattacgaggattcttacgaggacataagtgcctactttgactccgaaaataacgccattgagcccagatcattctcccagaatcctcccgtgcttaaaaggcatcagcgcgaaggtaccagaactactcttcagtctgatcaagaggagattgactatgacgacaccattagcgtggaaatgaagaaggaggatttcgatatctatgacgaagatgagaaccagtctccgcggagctttcagaagaagacgcgacactacttcattgcagcagtcgaaaggctttgggactacggtatgtcatcatcccctcatgtgttgcgcaatagagctcagagtggaagtgttccacagttcaagaaagtcgtctttcaagagtttacagatggcagcttcacacagcctctctatcggggcgagcttaacgaacatttgggactccttggtccctatatccgagccgaagtggaggacaacattatggttacctttaggaatcaagcctctcgcccctacagcttctactcctccctcatcagttatgaggaggatcagagacaaggcgctgaaccacggaagaactttgtgaaaccgaatgagacgaagacctacttctggaaagtacagcaccacatggcccccacaaaagacgaattcgattgcaaagcatgggcgtatttttcagacgttgacttggagaaagatgtacattcaggacttattggtcctttgttggtgtgtcacactaacactctcaatccagcccatggcaggcaggtgacagtccaggaattcgctcttttctttaccatctttgatgagaccaagtcctggtacttcacggaaaacatggagcgcaattgcagagccccctgtaacatacagatggaggaccctacctttaaggaaaattatcggttccacgcaatcaacggatacattatggatacactccctggccttgtgatggctcaggaccaacgaatcaggtggtacctcctcagcatgggttctaatgagaacatacactccattcacttttcaggacatgtgttcactgtccggaagaaagaagagtataagatggccctctacaatttgtatccaggcgtgtttgagaccgttgaaatgcttcccagcaaagctggcatctggagagtagagtgcttgatcggagaacatcttcacgcaggtatgagcaccttgttcctcgtgtacagcaacaaatgtcagaatccacttggcatggccagtggacacattcgcgactttcagatcacagcatctggccagtatggacaatgggccccaaagttggctcgcctccattactccggtagcataaatgcgtggtccactaaagaacctttcagctggattaaggtcgatcttcttgcccccatgatcatccacggcattaagacacagggagcgaggcagaaattctcctccctctacatctcacagttcattattatgtatagtttggacggcaagaagtggcaaacttatagaggtaacagtactggaacagacatggtgttcttcggcaacgttgatagctctggcatcaaacacaacatctttaatcctcccataatagctcggtacatcagattgcatccgacccactacagcattaggagtacactccgaatggagcttatgggttgcgacttgaattcctgttcaatgccactcggaatggagtctaaagccatctctgatgcacagataaccgccagtagctactttacgaacatgtttgctacgtggtcaccctctaaggcaaggcttcatttgcaaggccggtctaatgcctggagacctcaggtgaacaacccgaaagaatggctccaggtggactttcagaagaccatgaaagtaacaggtgtcactactcagggagttaagtccttggatactagcatgtatgtgaaggagttccttatttcctcatcacaagatggccaccagtggaccctcttctttcagaatggtaaggtcaaagtgtttcagggcaatcaagacagcttcacacccgtggtgaacagtcttgatcctccactcttgacacgataccttcgaatccatccacagtcttgggagcaccagattgcattgcgcatggaagtacttggatgcgaggctcaggacctctac

SEQ ID NO: 2136 - protein, 1457 aa, synthetic construct
  REGION 1..1457: note = Variant of human B-domain deleted Factor VIII
MQIELSTCFFLCLLRFCFSATRRYYLGAVELSWDYMQSDLGELPVDARFPPRVPKSFPFNTSQVYKKTLFVEFTDHLFNIAKPRPPWMGLLGPTIQAEVYDTVVITLKNMASHPVSLHAVGVSYWKASEGAEYDDQTSQREKEDDKVFPGGSHTYVWQVLKENGPMASDPPCLTYSYLSHVDLVKDLNSGLIGALLVCREGSLAKEKTQTLAKFILLFAVFDEGKSWHSETKNSLMQDRDAASARAWPKMHTVNGYVNRTLPGLIGCHRKSVYWHVIGMGTTPEVHSIFLEGHTFLVRNHRQASLGISPITFLTAQTGLRDLGQFLLFCHIPSHQHDGMEAYVKVDSCPEEPQLRMKNNEEAEDYDDDLTDSEMDVVRFDDDNSPSIIQARSGAKKHPKTWVHYIAAEEEDWDYAPLVLAPDDRSYKSQYLNNGPQRIGRKYKKVRFMAYTDETFKTREAIQHESGILGPLLYGEVGDTLLIIFKNQASRPYNIYPHGITDVRPLYSRRLPKGVKHLKDFPILPGEIFKYKWTITVEDGPTKSDPRCLTRYYSSFVNWERDLASGLIGPLLICYKESVDQRGNQIMSDKRNVILFSVFDENRSWYLTENIQRFLPNPAGVQLEDPEFQASNIMHSINGYVFDSLQLSVCLHEVAYWYILSIGAQTDFLSVFFSGYTFKHKGVYEDTLTLFPFSGETVFMSMENPGLWILGCHNSDFRNRGMTALLKVSSCDWNTGDYYEDSYEDISAYFDSENNAIEPRSFSQNPPVLKRHQREGTRTTLQSDQEEIDYDDTISVEMKKEDFDIYDEDENQSPRSFQKKTRHYFIAAVERLWDYGMSSSPHVLRNRAQSGSVPQFKKVVFQEFTDGSFTQPLYRGELNEHLGLLGPYIRAEVEDNIMVTFRNQASRPYSFYSSLISYEEDQRQGAEPRKNFVKPNETKTYFWKVQHHMAPTKDEFDCKAWAYFSDVDLEKDVHSGLIGPLLVCHTNTLNPAHGRQVTVQEFALFFTIFDETKSWYFTENMERNCRAPCNIQMEDPTFKENYRFHAINGYIMDTLPGLVMAQDQRIRWYLLSMGSNENIHSIHFSGHVFTVRKKEEYKMALYNLYPGVFETVEMLPSKAGIWRVECLIGEHLHAGMSTLFLVYSNKCQNPLGMASGHIRDFQITASGQYGQWAPKLARLHYSGSINAWSTKEPFSWIKVDLLAPMIIHGIKTQGARQKFSSLYISQFIIMYSLDGKKWQTYRGNSTGTDMVFFGNVDSSGIKHNIFNPPIIARYIRLHPTHYSIRSTLRMELMGCDLNSCSMPLGMESKAISDAQITASSYFTNMFATWSPSKARLHLQGRSNAWRPQVNNPKEWLQVDFQKTMKVTGVTTQGVKSLDTSMYVKEFLISSSQDGHQWTLFFQNGKVKVFQGNQDSFTPVVNSLDPPLLTRYLRIHPQSWEHQIALRMEVLGCEAQDLY

SEQ ID NO: 2137 - DNA, 4371 bp, synthetic construct
  misc_feature 1..4371: note = Variant of human B-domain deleted Factor VIII
  source 1..4371: mol_type = other DNA
atgcagattgaactgtctacctgcttcttcctctgtttgctgaggttctgctttagcgccactagacggtactaccttggcgctgtggagctgtcctgggactatatgcagagtgatttgggagagcttcccgtcgacgcacgatttcctcctcgcgttccaaagtcatttccctttaacacaagccaggtgtacaagaagacgctcttcgtcgaattcaccgatcacctgttcaatatcgccaaacccagaccaccatggatgggtcttttggggcctaccatacaagcggaggtgtatgacacagttgttatcactctcaagaacatggcttctcatccggtaagtcttcacgcagtgggcgtgtcctactggaaagcttcagaaggagccgagtatgatgatcagacatcccagagggagaaagaagacgacaaggtatttccaggtgggtctcatacctatgtgtggcaagtgctcaaagagaatggccctatggcaagcgatccgccgtgtttgacttacagctacctttcacacgttgacctcgtcaaggacctcaactccgggttgattggagccttgttggtatgcagggaaggatctcttgccaaagagaagacacagaccctggccaagtttatccttctctttgctgtgttcgatgagggcaaaagttggcatagcgaaacgaagaattccctcatgcaggatcgcgacgcagccagcgccagagcttggcccaagatgcacactgtgaacggatatgtcaataggacgcttcctggcttgattgggtgtcatcggaaaagtgtctactggcacgtgatcggaatggggacaacaccagaggtccactccatatttctcgaaggccataccttccttgttcgaaaccacagacaggcatccttggggatctctcccattacctttctcactgcccaaacgggtcttcgtgacttgggtcagttccttctcttttgccatatcccgtcacaccagcatgatggtatggaagcttatgtgaaagtcgacagttgtcctgaggagccacagttgcgcatgaagaataatgaagaagccgaggattacgacgacgatctcaccgattctgagatggacgtggtgaggtttgatgacgacaactctccctccatcattcaagctcggagcggggcgaagaaacaccccaagacttgggtccactatatagcggcggaagaggaggattgggattacgctcctcttgtattggcaccagatgaccgctcatacaaaagccagtacctcaacaacggaccgcagagaattggccggaagtataagaaagtgcgatttatggcctatacagacgaaacctttaagacaagggaggccatccagcatgagagtgggattttgggacctcttctttacggcgaagttggtgataccctcctcatcatcttcaagaatcaagcttctcgcccctataacatttacccacacgggatcactgacgttaggcctttgtatagcagaagacttcccaaaggcgtgaagcatctcaaagacttccccattttgccaggcgagatctttaagtacaaatggaccattacagtggaagatggaccgactaaatcggaccctcgatgccttacgcggtactattcctccttcgtgaattgggagagagatttggcaagcggactcataggaccactcctcatctgttacaaggaatctgtagaccagaggggtaaccagattatgagtgataaacgcaatgtgatcctttttagcgtcttcgacgagaaccggtcctggtacttgaccgagaatatacaaaggttccttcccaaccccgcaggcgttcagttggaagaccctgagtttcaggccagcaatattatgcactcaatcaacggctatgtgtttgatagtctccagctttctgtttgcctccatgaagtagcctattggtacatcttgtcaattggtgctcaaacagacttcctctccgtcttcttctccggctacacctttaagcacaagggggtgtatgaggacactctcacactctttccattttctggagaaaccgtgttcatgagcatggagaatccaggcctttggatcttgggttgccacaacagtgattttcgcaatcggggaatgactgctctcctcaaagtcagcagctgtgattggaacacaggcgactattacgaggattcttacgaggacataagtgcctactttgactccgaaaataacgccattgagcccagatcattctcccagaatcctcccgtgcttaaaaggcatcagcgcgaaggtaccagaactactcttcagtctgatcaagaggagattgactatgacgacaccattagcgtggaaatgaagaaggaggatttcgatatctatgacgaagatgagaaccagtctccgcggagctttcagaagaagacgcgacactacttcattgcagcagtcgaaaggctttgggactacggtatgtcatcatcccctcatgtgttgcgcaatagagctcagagtggaagtgttccacagttcaagaaagtcgtctttcaagagtttacagatggcagcttcacacagcctctctatcggggcgagcttaacgaacatttgggactccttggtccctatatccgagccgaagtggaggacaacattatggttacctttaggaatcaagcctctcgcccctacagcttctactcctccctcatcagttatgaggaggatcagagacaaggcgctgaaccacggaagaactttgtgaaaccgaatgagacgaagacctacttctggaaagtacagcaccacatggcccccacaaaagacgaattcgattgcaaagcatgggcgtatttttcagacgttgacttggagaaagatgtacattcaggacttattggtcctttgttggtgtgtcacactaacactctcaatccagcccatggcaggcaggtgacagtccaggaattcgctcttttctttaccatctttgatgagaccaagtcctggtacttcacggaaaacatggagcgcaattgcagagccccctgtaacatacagatggaggaccctacctttaaggaaaattatcggttccacgcaatcaacggatacattatggatacactccctggccttgtgatggctcaggaccaacgaatcaggtggtacctcctcagcatgggttctaatgagaacatacactccattcacttttcaggacatgtgttcactgtccggaagggtgaagagtataagatggccctctacaatttgtatccaggcgtgtttgagaccgttgaaatgcttccctctaaagctggcatctggagagtagagtgcttgatcggagaacatcttcacgcaggtatgagcaccttgttcctcgtgtacagcaacaaatgtcagaatccacttggcatggccagtggacacattcgcgactttcagatcacagcatctggccagtatggacaatgggccccaaagttggctcgcctccattactccggtagcataaatgcgtggtccactaaagaacctttcagctggattaaggtcgatcttcttgcccccatgatcatccacggcattaagacacagggagcgaggcagaaattctcctccctctacatctcacagttcattattatgtatagtttggacggcaagaagtggcaaacttatagaggtaacagtactggaacagacatggtgttcttcggcaacgttgatagctctggcatcaaacacaacatctttaatcctcccataatagctcggtacatcagattgcatccgacccactacagcattaggagtacactccgaatggagcttatgggttgcgacttgaattcctgttcaatgccactcggaatggagtctaaagccatctctgatgcacagataaccgccagtagctactttacgaacatgtttgctacgtggtcaccctctaaggcaaggcttcatttgcaaggccggtctaatgcctggagacctcaggtgaacaacccgaaagaatggctccaggtggactttcagaagaccatgaaagtaacaggtgtcactactcagggagttaagtccttggatactagcatgtatgtgaaggagttccttatttcctcatcacaagatggccaccagtggaccctcttctttcagaatggtaaggtcaaagtgtttcagggcaatcaagacagcttcacacccgtggtgaacagtcttgatcctccactcttgacacgataccttcgaatccatccacagtcttgggagcaccagattgcattgcgcatggaagtacttggatgcgaggctcaggacctctac

SEQ ID NO: 2138 - protein, 1457 aa, synthetic construct
  REGION 1..1457: note = Variant of human B-domain deleted Factor VIII
MQIELSTCFFLCLLRFCFSATRRYYLGAVELSWDYMQSDLGELPVDARFPPRVPKSFPFNTSQVYKKTLFVEFTDHLFNIAKPRPPWMGLLGPTIQAEVYDTVVITLKNMASHPVSLHAVGVSYWKASEGAEYDDQTSQREKEDDKVFPGGSHTYVWQVLKENGPMASDPPCLTYSYLSHVDLVKDLNSGLIGALLVCREGSLAKEKTQTLAKFILLFAVFDEGKSWHSETKNSLMQDRDAASARAWPKMHTVNGYVNRTLPGLIGCHRKSVYWHVIGMGTTPEVHSIFLEGHTFLVRNHRQASLGISPITFLTAQTGLRDLGQFLLFCHIPSHQHDGMEAYVKVDSCPEEPQLRMKNNEEAEDYDDDLTDSEMDVVRFDDDNSPSIIQARSGAKKHPKTWVHYIAAEEEDWDYAPLVLAPDDRSYKSQYLNNGPQRIGRKYKKVRFMAYTDETFKTREAIQHESGILGPLLYGEVGDTLLIIFKNQASRPYNIYPHGITDVRPLYSRRLPKGVKHLKDFPILPGEIFKYKWTITVEDGPTKSDPRCLTRYYSSFVNWERDLASGLIGPLLICYKESVDQRGNQIMSDKRNVILFSVFDENRSWYLTENIQRFLPNPAGVQLEDPEFQASNIMHSINGYVFDSLQLSVCLHEVAYWYILSIGAQTDFLSVFFSGYTFKHKGVYEDTLTLFPFSGETVFMSMENPGLWILGCHNSDFRNRGMTALLKVSSCDWNTGDYYEDSYEDISAYFDSENNAIEPRSFSQNPPVLKRHQREGTRTTLQSDQEEIDYDDTISVEMKKEDFDIYDEDENQSPRSFQKKTRHYFIAAVERLWDYGMSSSPHVLRNRAQSGSVPQFKKVVFQEFTDGSFTQPLYRGELNEHLGLLGPYIRAEVEDNIMVTFRNQASRPYSFYSSLISYEEDQRQGAEPRKNFVKPNETKTYFWKVQHHMAPTKDEFDCKAWAYFSDVDLEKDVHSGLIGPLLVCHTNTLNPAHGRQVTVQEFALFFTIFDETKSWYFTENMERNCRAPCNIQMEDPTFKENYRFHAINGYIMDTLPGLVMAQDQRIRWYLLSMGSNENIHSIHFSGHVFTVRKGEEYKMALYNLYPGVFETVEMLPSKAGIWRVECLIGEHLHAGMSTLFLVYSNKCQNPLGMASGHIRDFQITASGQYGQWAPKLARLHYSGSINAWSTKEPFSWIKVDLLAPMIIHGIKTQGARQKFSSLYISQFIIMYSLDGKKWQTYRGNSTGTDMVFFGNVDSSGIKHNIFNPPIIARYIRLHPTHYSIRSTLRMELMGCDLNSCSMPLGMESKAISDAQITASSYFTNMFATWSPSKARLHLQGRSNAWRPQVNNPKEWLQVDFQKTMKVTGVTTQGVKSLDTSMYVKEFLISSSQDGHQWTLFFQNGKVKVFQGNQDSFTPVVNSLDPPLLTRYLRIHPQSWEHQIALRMEVLGCEAQDLY

SEQ ID NO: 2139 - DNA, 4371 bp, synthetic construct
  misc_feature 1..4371: note = Variant of human B-domain deleted Factor VIII
  source 1..4371: mol_type = other DNA
atgcagattgaactgtctacctgcttcttcctctgtttgctgaggttctgctttagcgccactagacggtactaccttggcgctgtggagctgtcctgggactatatgcagagtgatttgggagagcttcccgtcgacgcacgatttcctcctcgcgttccaaagtcatttccctttaacacaagccaggtgtacaagaagacgctcttcgtcgaattcaccgatcacctgttcaatatcgccaaacccagaccaccatggatgggtcttttggggcctaccatacaagcggaggtgtatgacacagttgttatcactctcaagaacatggcttctcatccggtaagtcttcacgcagtgggcgtgtcctactggaaagcttcagaaggagccgagtatgatgatcagacatcccagagggagaaagaagacgacaaggtatttccaggtgggtctcatacctatgtgtggcaagtgctcaaagagaatggccctatggcaagcgatccgccgtgtttgacttacagctacctttcacacgttgacctcgtcaaggacctcaactccgggttgattggagccttgttggtatgcagggaaggatctcttgccaaagagaagacacagaccctggccaagtttatccttctctttgctgtgttcgatgagggcaaaagttggcatagcgaaacgaagaattccctcatgcaggatcgcgacgcagccagcgccagagcttggcccaagatgcacactgtgaacggatatgtcaataggacgcttcctggcttgattgggtgtcatcggaaaagtgtctactggcacgtgatcggaatggggacaacaccagaggtccactccatatttctcgaaggccataccttccttgttcgaaaccacagacaggcatccttggggatctctcccattacctttctcactgcccaaacgggtcttcgtgacttgggtcagttccttctcttttgccatatcccgtcacaccagcatgatggtatggaagcttatgtgaaagtcgacagttgtcctgaggagccacagttgcgcatgaagaataatgaagaagccgaggattacgacgacgatctcaccgattctgagatggacgtggtgaggtttgatgacgacaactctccctccatcattcaagctcggagcggggcgaagaaacaccccaagacttgggtccactatatagcggcggaagaggaggattgggattacgctcctcttgtattggcaccagatgaccgctcatacaaaagccagtacctcaacaacggaccgcagagaattggccggaagtataagaaagtgcgatttatggcctatacagacgaaacctttaagacaagggaggccatccagcatgagagtgggattttgggacctcttctttacggcgaagttggtgataccctcctcatcatcttcaagaatcaagcttctcgcccctataacatttacccacacgggatcactgacgttaggcctttgtatagcagaagacttcccaaaggcgtgaagcatctcaaagacttccccattttgccaggcgagatctttaagtacaaatggaccattacagtggaagatggaccgactaaatcggaccctcgatgccttacgcggtactattcctccttcgtgaattgggagagagatttggcaagcggactcataggaccactcctcatctgttacaaggaatctgtagaccagaggggtaaccagattatgagtgataaacgcaatgtgatcctttttagcgtcttcgacgagaaccggtcctggtacttgaccgagaatatacaaaggttccttcccaaccccgcaggcgttcagttggaagaccctgagtttcaggccagcaatattatgcactcaatcaacggctatgtgtttgatagtctccagctttctgtttgcctccatgaagtagcctattggtacatcttgtcaattggtgctcaaacagacttcctctccgtcttcttctccggctacacctttaagcacaagggcgtgtatgaggacactctcacactctttccattttctggagaaaccgtgttcatgagcatggagaatccaggcctttggatcttgggttgccacaacagtgattttcgcaatcggggaatgactgctctcctcaaagtcagcagctgtgattggaacacaggcgactattacgaggattcttacgaggacataagtgcctactttgactccgaaaataacgccattgagcccagatcattctcccagaatcctcccgtgcttaaaaggcatcagcgcgaaggtaccagaactactcttcagtctgatcaagaggagattgactatgacgacaccattagcgtggaaatgaagagtgaggatttcgatatctatgacgaagatgagaaccagtctccgcggagctttcagaagaagacgcgacactacttcattgcagcagtcgaaaggctttgggactacggtatgtcatcatcccctcatgtgttgcgcaatagagctcagagtggaagtgttccacagttcaagaaagtcgtctttcaagagtttacagatggcagcttcacacagcctctctatcggggcgagcttaacgaacatttgggactccttggtccctatatccgagccgaagtggaggacaacattatggttacctttaggaatcaagcctctcgcccctacagcttctactcctccctcatcagttatgaggaggatcagagacaaggcgctgaaccacggaagaactttgtgaaaccgaatgagacgaagacctacttctggaaagtacagcaccacatggcccccacaaaagacgaattcgattgcaaagcatgggcgtatttttcagacgttgacttggagaaagatgtacattcaggacttattggtcctttgttggtgtgtcacactaacactctcaatccagcccatggcaggcaggtgacagtccaggaattcgctcttttctttaccatctttgatgagaccaagtcctggtacttcacggaaaacatggagcgcaattgcagagccccctgtaacatacagatggaggaccctacctttaaggaaaattatcggttccacgcaatcaacggatacattatggatacactccctggccttgtgatggctcaggaccaacgaatcaggtggtacctcctcagcatgggttctaatgagaacatacactccattcacttttcaggacatgtgttcactgtccggaagaaagaagagtataagatggccctctacaatttgtatccaggcgtgtttgagaccgttgaaatgcttcccagcaaagctggcatctggagagtagagtgcttgatcggagaacatcttcacgcaggtatgagcaccttgttcctcgtgtacagcaacaaatgtcagaatccacttggcatggccagtggacacattcgcgactttcagatcacagcatctggccagtatggacaatgggccccaaagttggctcgcctccattactccggtagcataaatgcgtggtccactaaagaacctttcagctggattaaggtcgatcttcttgcccccatgatcatccacggcattaagacacagggagcgaggcagaaattctcctccctctacatctcacagttcattattatgtatagtttggacggcaagaagtggcaaacttatagaggtaacagtactggaacagacatggtgttcttcggcaacgttgatagctctggcatcaaacacaacatctttaatcctcccataatagctcggtacatcagattgcatccgacccactacagcattaggagtacactccgaatggagcttatgggttgcgacttgaattcctgttcaatgccactcggaatggagtctaaagccatctctgatgcacagataaccgccagtagctactttacgaacatgtttgctacgtggtcaccctctaaggcaaggcttcatttgcaaggccggtctaatgcctggagacctcaggtgaacaacccgaaagaatggctccaggtggactttcagaagaccatgaaagtaacaggtgtcactactcagggagttaagtccttggatactagcatgtatgtgaaggagttccttatttcctcatcacaagatggccaccagtggaccctcttctttcagaatggtaaggtcaaagtgtttcagggcaatcaagacagcttcacacccgtggtgaacagtcttgatcctccactcttgacacgataccttcgaatccatccacagtcttgggagcaccagattgcattgcgcatggaagtacttggatgcgaggctcaggacctctac

SEQ ID NO: 2140 - protein, 1457 aa, synthetic construct
  REGION 1..1457: note = Variant of human B-domain deleted Factor VIII
MQIELSTCFFLCLLRFCFSATRRYYLGAVELSWDYMQSDLGELPVDARFPPRVPKSFPFNTSQVYKKTLFVEFTDHLFNIAKPRPPWMGLLGPTIQAEVYDTVVITLKNMASHPVSLHAVGVSYWKASEGAEYDDQTSQREKEDDKVFPGGSHTYVWQVLKENGPMASDPPCLTYSYLSHVDLVKDLNSGLIGALLVCREGSLAKEKTQTLAKFILLFAVFDEGKSWHSETKNSLMQDRDAASARAWPKMHTVNGYVNRTLPGLIGCHRKSVYWHVIGMGTTPEVHSIFLEGHTFLVRNHRQASLGISPITFLTAQTGLRDLGQFLLFCHIPSHQHDGMEAYVKVDSCPEEPQLRMKNNEEAEDYDDDLTDSEMDVVRFDDDNSPSIIQARSGAKKHPKTWVHYIAAEEEDWDYAPLVLAPDDRSYKSQYLNNGPQRIGRKYKKVRFMAYTDETFKTREAIQHESGILGPLLYGEVGDTLLIIFKNQASRPYNIYPHGITDVRPLYSRRLPKGVKHLKDFPILPGEIFKYKWTITVEDGPTKSDPRCLTRYYSSFVNWERDLASGLIGPLLICYKESVDQRGNQIMSDKRNVILFSVFDENRSWYLTENIQRFLPNPAGVQLEDPEFQASNIMHSINGYVFDSLQLSVCLHEVAYWYILSIGAQTDFLSVFFSGYTFKHKGVYEDTLTLFPFSGETVFMSMENPGLWILGCHNSDFRNRGMTALLKVSSCDWNTGDYYEDSYEDISAYFDSENNAIEPRSFSQNPPVLKRHQREGTRTTLQSDQEEIDYDDTISVEMKSEDFDIYDEDENQSPRSFQKKTRHYFIAAVERLWDYGMSSSPHVLRNRAQSGSVPQFKKVVFQEFTDGSFTQPLYRGELNEHLGLLGPYIRAEVEDNIMVTFRNQASRPYSFYSSLISYEEDQRQGAEPRKNFVKPNETKTYFWKVQHHMAPTKDEFDCKAWAYFSDVDLEKDVHSGLIGPLLVCHTNTLNPAHGRQVTVQEFALFFTIFDETKSWYFTENMERNCRAPCNIQMEDPTFKENYRFHAINGYIMDTLPGLVMAQDQRIRWYLLSMGSNENIHSIHFSGHVFTVRKKEEYKMALYNLYPGVFETVEMLPSKAGIWRVECLIGEHLHAGMSTLFLVYSNKCQNPLGMASGHIRDFQITASGQYGQWAPKLARLHYSGSINAWSTKEPFSWIKVDLLAPMIIHGIKTQGARQKFSSLYISQFIIMYSLDGKKWQTYRGNSTGTDMVFFGNVDSSGIKHNIFNPPIIARYIRLHPTHYSIRSTLRMELMGCDLNSCSMPLGMESKAISDAQITASSYFTNMFATWSPSKARLHLQGRSNAWRPQVNNPKEWLQVDFQKTMKVTGVTTQGVKSLDTSMYVKEFLISSSQDGHQWTLFFQNGKVKVFQGNQDSFTPVVNSLDPPLLTRYLRIHPQSWEHQIALRMEVLGCEAQDLY

SEQ ID NO: 2141 - DNA, 4371 bp, synthetic construct
  misc_feature 1..4371: note = Variant of human B-domain deleted Factor VIII
  source 1..4371: mol_type = other DNA
atgcagattgaactgtctacctgcttcttcctctgtttgctgaggttctgctttagcgccactagacggtactaccttggcgctgtggagctgtcctgggactatatgcagagtgatttgggagagcttcccgtcgacgcacgatttcctcctcgcgttccaaagtcatttccctttaacacaagccaggtgtacaagaagacgctcttcgtcgaattcaccgatcacctgttcaatatcgccaaacccagaccaccatggatgggtcttttggggcctaccatacaagcggaggtgtatgacacagttgttatcactctcaagaacatggcttctcatccggtaagtcttcacgcagtgggcgtgtcctactggaaagcttcagaaggagccgagtatgatgatcagacatcccagagggagaaagaagacgacaaggtatttccaggtgggtctcatacctatgtgtggcaagtgctcaaagagaatggccctatggcaagcgatccgccgtgtttgacttacagctacctttcacacgttgacctcgtcaaggacctcaactccgggttgattggagccttgttggtatgcagggaaggatctcttgccaaagagaagacacagaccctggccaagtttatccttctctttgctgtgttcgatgagggcaaaagttggcatagcgaaacgaagaattccctcatgcaggatcgcgacgcagccagcgccagagcttggcccaagatgcacactgtgaacggatatgtcaataggacgcttcctggcttgattgggtgtcatcggaaaagtgtctactggcacgtgatcggaatggggacaacaccagaggtccactccatatttctcgaaggccataccttccttgttcgaaaccacagacaggcatccttggggatctctcccattacctttctcactgcccaaacgggtcttcgtgacttgggtcagttccttctcttttgccatatcccgtcacaccagcatgatggtatggaagcttatgtgaaagtcgacagttgtcctgaggagccacagttgcgcatgaagaataatgaagaagccgaggattacgacgacgatctcaccgattctgagatggacgtggtgaggtttgatgacgacaactctccctccatcattcaagctcggagcggggcgaagaaacaccccaagacttgggtccactatatagcggcggaagaggaggattgggattacgctcctcttgtattggcaccagatgaccgctcatacaaaagccagtacctcaacaacggaccgcagagaattggccggaagtataagaaagtgcgatttatggcctatacagacgaaacctttaagacaagggaggccatccagcatgagagtgggattttgggacctcttctttacggcgaagttggtgataccctcctcatcatcttcaagaatcaagcttctcgcccctataacatttacccacacgggatcactgacgttaggcctttgtatagcagaagacttcccaaaggcgtgaagcatctcaaagacttccccattttgccaggcgagatctttaagtacaaatggaccattacagtggaagatggaccgactaaatcggaccctcgatgccttacgcggtactattcctccttcgtgaattgggagagagatttggcaagcggactcataggaccactcctcatctgttacaaggaatctgtagaccagaggggtaaccagattatgagtgataaacgcaatgtgatcctttttagcgtcttcgacgagaaccggtcctggtacttgaccgagaatatacaaaggttccttcccaaccccgcaggcgttcagttggaagaccctgagtttcaggccagcaatattatgcactcaatcaacggctatgtgtttgatagtctccagctttctgtttgcctccatgaagtagcctattggtacatcttgtcaattggtgctcaaacagacttcctctccgtcttcttctccggctacacctttaagcacaagggggtgtatgaggacactctcacactctttccattttctggagaaaccgtgttcatgagcatggagaatccaggcctttggatcttgggttgccacaacagtgattttcgcaatcggggaatgactgctctcctcaaagtcagcagctgtgattggaacacaggcgactattacgaggattcttacgaggacataagtgcctactttgactccaagaataacgccattgagcccagatcattctcccagaatcctcccgtgcttaaaaggcatcagcgcgaaggtaccagaactactcttcagtctgatcaagaggagattgactatgacgacaccattagcgtggaaatgaagagtgaggatttcgatatctatgacgaagatgggaaccagtctccgcggagctttcagaagaagacgcgacactacttcattgcagcagtcgaaaggctttgggactacggtatgtcatcatcccctcatgtgttgcgcaatagagctcagagtggaagtgttccacagttcaagaaagtcgtctttcaagagtttacagatggcagcttcacacagcctctctatcggggcgagcttaacgaacatttgggactccttggtccctatatccgagccgaagtggaggacaacattatggttacctttaggaatcaagcctctcgcccctacagcttctactcctccctcatcagttatgaggaggatcagagacaaggcgctgaaccacggaagaactttgtgaaaccgaatgagacgaagacctacttctggaaagtacagcaccacatggcccccacaaaagacgaattcgattgcaaagcatgggcgtatttttcagacgttgacttggagaaagatgtacattcaggacttattggtcctttgttggtgtgtcacactaacactctcaatccagcccatggcaggcaggtgacagtccaggaattcgctcttttctttaccatctttgatgagaccaagtcctggtacttcacggaaaacatggagcgcaattgcagagccccctgtaacatacagatggaggaccctacctttaaggaaaattatcggttccacgcaatcaacggatacattatggatacactccctggccttgtgatggctcaggaccaacgaatcaggtggtacctcctcagcatgggttctaatgagaacatacactccattcacttttcaggacatgtgttcactgtccggaagggtgaagagtataagatggccctctacaatttgtatccaggcgtgtttgagaccgttgaaatgcttcccagcaaagctggcatctggagagtagagtgcttgatcggagaacatcttcacgcaggtatgagcaccttgttcctcgtgtacagcaacaaatgtcagaatccacttggcatggccagtggacacattcgcgactttcagatcacagcatctggccagtatggacaatgggccccaaagttggctcgcctccattactccggtagcataaatgcgtggtccactaaagaacctttcagctggattaaggtcgatcttcttgcccccatgatcatccacggcattaagacacagggagcgaggcagaaattctcctccctctacatctcacagttcattattatgtatagtttggacggcaagaagtggcaaacttatagaggtaacagtactggaacagacatggtgttcttcggcaacgttgatagctctggcatcaaacacaacatctttaatcctcccataatagctcggtacatcagattgcatccgacccactacagcattaggagtacactccgaatggagcttatgggttgcgacttgaattcctgttcaatgccactcggaatggagtctaaagccatctctgatgcacagataaccgccagtagctactttacgaacatgtttgctacgtggtcaccctctaaggcaaggcttcatttgcaaggccggtctaatgcctggagacctcaggtgaacaacccgaaagaatggctccaggtggactttcagaagaccatgaaagtaacaggtgtcactactcagggagttaagtccttggatactagcatgtatgtgaaggagttccttatttcctcatcacaagatggccaccagtggaccctcttctttcagaatggtaaggtcaaagtgtttcagggcaatcaagacagcttcacacccgtggtgaacagtcttgatcctccactcttgacacgataccttcgaatccatccacagtcttgggagcaccagattgcattgcgcatggaagtacttggatgcgaggctcaggacctctac

SEQ ID NO: 2142 - protein, 1457 aa, synthetic construct
  REGION 1..1457: note = Variant of human B-domain deleted Factor VIII
MQIELSTCFFLCLLRFCFSATRRYYLGAVELSWDYMQSDLGELPVDARFPPRVPKSFPFNTSQVYKKTLFVEFTDHLFNIAKPRPPWMGLLGPTIQAEVYDTVVITLKNMASHPVSLHAVGVSYWKASEGAEYDDQTSQREKEDDKVFPGGSHTYVWQVLKENGPMASDPPCLTYSYLSHVDLVKDLNSGLIGALLVCREGSLAKEKTQTLAKFILLFAVFDEGKSWHSETKNSLMQDRDAASARAWPKMHTVNGYVNRTLPGLIGCHRKSVYWHVIGMGTTPEVHSIFLEGHTFLVRNHRQASLGISPITFLTAQTGLRDLGQFLLFCHIPSHQHDGMEAYVKVDSCPEEPQLRMKNNEEAEDYDDDLTDSEMDVVRFDDDNSPSIIQARSGAKKHPKTWVHYIAAEEEDWDYAPLVLAPDDRSYKSQYLNNGPQRIGRKYKKVRFMAYTDETFKTREAIQHESGILGPLLYGEVGDTLLIIFKNQASRPYNIYPHGITDVRPLYSRRLPKGVKHLKDFPILPGEIFKYKWTITVEDGPTKSDPRCLTRYYSSFVNWERDLASGLIGPLLICYKESVDQRGNQIMSDKRNVILFSVFDENRSWYLTENIQRFLPNPAGVQLEDPEFQASNIMHSINGYVFDSLQLSVCLHEVAYWYILSIGAQTDFLSVFFSGYTFKHKGVYEDTLTLFPFSGETVFMSMENPGLWILGCHNSDFRNRGMTALLKVSSCDWNTGDYYEDSYEDISAYFDSKNNAIEPRSFSQNPPVLKRHQREGTRTTLQSDQEEIDYDDTISVEMKSEDFDIYDEDGNQSPRSFQKKTRHYFIAAVERLWDYGMSSSPHVLRNRAQSGSVPQFKKVVFQEFTDGSFTQPLYRGELNEHLGLLGPYIRAEVEDNIMVTFRNQASRPYSFYSSLISYEEDQRQGAEPRKNFVKPNETKTYFWKVQHHMAPTKDEFDCKAWAYFSDVDLEKDVHSGLIGPLLVCHTNTLNPAHGRQVTVQEFALFFTIFDETKSWYFTENMERNCRAPCNIQMEDPTFKENYRFHAINGYIMDTLPGLVMAQDQRIRWYLLSMGSNENIHSIHFSGHVFTVRKGEEYKMALYNLYPGVFETVEMLPSKAGIWRVECLIGEHLHAGMSTLFLVYSNKCQNPLGMASGHIRDFQITASGQYGQWAPKLARLHYSGSINAWSTKEPFSWIKVDLLAPMIIHGIKTQGARQKFSSLYISQFIIMYSLDGKKWQTYRGNSTGTDMVFFGNVDSSGIKHNIFNPPIIARYIRLHPTHYSIRSTLRMELMGCDLNSCSMPLGMESKAISDAQITASSYFTNMFATWSPSKARLHLQGRSNAWRPQVNNPKEWLQVDFQKTMKVTGVTTQGVKSLDTSMYVKEFLISSSQDGHQWTLFFQNGKVKVFQGNQDSFTPVVNSLDPPLLTRYLRIHPQSWEHQIALRMEVLGCEAQDLY

SEQ ID NO: 2143 - DNA, 4371 bp, synthetic construct
  misc_feature 1..4371: note = Variant of human B-domain deleted Factor VIII
  source 1..4371: mol_type = other DNA
atgcagattgaactgtctacctgcttcttcctctgtttgctgaggttctgctttagcgccactagacggtactaccttggcgctgtggagctgtcctgggactatatgcagagtgatttgggagagcttcccgtcgacgcacgatttcctcctcgcgttccaaagtcatttccctttaacacaagccaggtgtacaagaagacgctcttcgtcgaattcaccgatcacctgttcaatatcgccaaacccagaccaccatggatgggtcttttggggcctaccatacaagcggaggtgtatgacacagttgttatcactctcaagaacatggcttctcatccggtaagtcttcacgcagtgggcgtgtcctactggaaagcttcagaaggagccgagtatgatgatcagacatcccagagggagaaagaagacgacaaggtatttccaggtgggtctcatacctatgtgtggcaagtgctcaaagagaatggccctatggcaagcgatccgccgtgtttgacttacagctacctttcacacgttgacctcgtcaaggacctcaactccgggttgattggagccttgttggtatgcagggaaggatctcttgccaaagagaagacacagaccctggccaagtttatccttctctttgctgtgttcgatgagggcaaaagttggcatagcgaaacgaagaattccctcatgcaggatcgcgacgcagccagcgccagagcttggcccaagatgcacactgtgaacggatatgtcaataggacgcttcctggcttgattgggtgtcatcggaaaagtgtctactggcacgtgatcggaatggggacaacaccagaggtccactccatatttctcgaaggccataccttccttgttcgaaaccacagacaggcatccttggggatctctcccattacctttctcactgcccaaacgggtcttcgtgacttgggtcagttccttctcttttgccatatcccgtcacaccagcatgatggtatggaagcttatgtgaaagtcgacagttgtcctgaggagccacagttgcgcatgaagaataatgaagaagccgaggattacgacgacgatctcaccgattctgagatggacgtggtgaggtttgatgacgacaactctccctccatcattcaagctcggagcggggcgaagaaacaccccaagacttgggtccactatatagcggcggaagaggaggattgggattacgctcctcttgtattggcaccagatgaccgctcatacaaaagccagtacctcaacaacggaccgcagagaattggccggaagtataagaaagtgcgatttatggcctatacagacgaaacctttaagacaagggaggccatccagcatgagagtgggattttgggacctcttctttacggcgaagttggtgataccctcctcatcatcttcaagaatcaagcttctcgcccctataacatttacccacacgggatcactgacgttaggcctttgtatagcagaagacttcccaaaggcgtgaagcatctcaaagacttccccattttgccaggcgagatctttaagtacaaatggaccattacagtggaagatggaccgactaaatcggaccctcgatgccttacgcggtactattcctccttcgtgaattgggagagagatttggcaagcggactcataggaccactcctcatctgttacaaggaatctgtagaccagaggggtaaccagattatgagtgataaacgcaatgtgatcctttttagcgtcttcgacgagaaccggtcctggtacttgaccgagaatatacaaaggttccttcccaaccccgcaggcgttcagttggaagaccctgagtttcaggccagcaatattatgcactcaatcaacggctatgtgtttgatagtctccagctttctgtttgcctccatgaagtagcctattggtacatcttgtcaattggtgctcaaacagacttcctctccgtcttcttctccggctacacctttaagcacaagggggtgtatgaggacactctcacactctttccattttctggagaaaccgtgttcatgagcatggagaatccaggcctttggatcttgggttgccacaacagtgattttcgcaatcggggaatgactgctctcctcaaagtcagcagctgtgattggaacacaggcgactattacgaggattcttacgaggacataagtgcctactttgactccaaaaataacgccattgagcccagatcattctcccagaatcctcccgtgcttaaaaggcatcagcgcgaaggtaccagaactactcttcagtctgatcaagaggagattgactatgacgacaccattagcgtggaaatgaagagtgaggatttcgatatctatgacgaagatgagaaccagtctccgcggagctttcagaagaagacgcgacactacttcattgcagcagtcgaaaggctttgggactacggtatgtcatcatcccctcatgtgttgcgcaatagagctcagagtggaagtgttccacagttcaagaaagtcgtctttcaagagtttacagatggcagcttcacacagcctctctatcggggcgagcttaacgaacatttgggactccttggtccctatatccgagccgaagtggaggacaacattatggttacctttaggaatcaagcctctcgcccctacagcttctactcctccctcatcagttatgaggaggatcagagacaaggcgctgaaccacggaagaactttgtgaaaccgaatgagacgaagacctacttctggaaagtacagcaccacatggcccccacaaaagacgaattcgattgcaaagcatgggcgtatttttcagacgttgacttggagaaagatgtacattcaggacttattggtcctttgttggtgtgtcacactaacactctcaatccagcccatggcaggcaggtgacagtccaggaattcgctcttttctttaccatctttgatgagaccaagtcctggtacttcacggaaaacatggagcgcaattgcagagccccctgtaacatacagatggaggaccctacctttaaggaaaattatcggttccacgcaatcaacggatacattatggatacactccctggccttgtgatggctcaggaccaacgaatcaggtggtacctcctcagcatgggttctaatgagaacatacactccattcacttttcaggacatgtgttcactgtccggaagggtgaagagtataagatggccctctacaatttgtatccaggcgtgtttgagaccgttgaaatgcttccctctaaagctggcatctggagagtagagtgcttgatcggagaacatcttcacgcaggtatgagcaccttgttcctcgtgtacagcaacaaatgtcagaatccacttggcatggccagtggacacattcgcgactttcagatcacagcatctggccagtatggacaatgggccccaaagttggctcgcctccattactccggtagcataaatgcgtggtccactaaagaacctttcagctggattaaggtcgatcttcttgcccccatgatcatccacggcattaagacacagggagcgaggcagaaattctcctccctctacatctcacagttcattattatgtatagtttggacggcaagaagtggcaaacttatagaggtaacagtactggaacagacatggtgttcttcggcaacgttgatagctctggcatcaaacacaacatctttaatcctcccataatagctcggtacatcagattgcatccgacccactacagcattaggagtacactccgaatggagcttatgggttgcgacttgaattcctgttcaatgccactcggaatggagtctaaagccatctctgatgcacagataaccgccagtagctactttacgaacatgtttgctacgtggtcaccctctaaggcaaggcttcatttgcaaggccggtctaatgcctggagacctcaggtgaacaacccgaaagaatggctccaggtggactttcagaagaccatgaaagtaacaggtgtcactactcagggagttaagtccttggatactagcatgtatgtgaaggagttccttatttcctcatcacaagatggccaccagtggaccctcttctttcagaatggtaaggtcaaagtgtttcagggcaatcaagacagcttcacacccgtggtgaacagtcttgatcctccactcttgacacgataccttcgaatccatccacagtcttgggagcaccagattgcattgcgcatggaagtacttggatgcgaggctcaggacctctac

SEQ ID NO: 2144 - protein, 1457 aa, synthetic construct
  REGION 1..1457: note = Variant of human B-domain deleted Factor VIII
MQIELSTCFFLCLLRFCFSATRRYYLGAVELSWDYMQSDLGELPVDARFPPRVPKSFPFNTSQVYKKTLFVEFTDHLFNIAKPRPPWMGLLGPTIQAEVYDTVVITLKNMASHPVSLHAVGVSYWKASEGAEYDDQTSQREKEDDKVFPGGSHTYVWQVLKENGPMASDPPCLTYSYLSHVDLVKDLNSGLIGALLVCREGSLAKEKTQTLAKFILLFAVFDEGKSWHSETKNSLMQDRDAASARAWPKMHTVNGYVNRTLPGLIGCHRKSVYWHVIGMGTTPEVHSIFLEGHTFLVRNHRQASLGISPITFLTAQTGLRDLGQFLLFCHIPSHQHDGMEAYVKVDSCPEEPQLRMKNNEEAEDYDDDLTDSEMDVVRFDDDNSPSIIQARSGAKKHPKTWVHYIAAEEEDWDYAPLVLAPDDRSYKSQYLNNGPQRIGRKYKKVRFMAYTDETFKTREAIQHESGILGPLLYGEVGDTLLIIFKNQASRPYNIYPHGITDVRPLYSRRLPKGVKHLKDFPILPGEIFKYKWTITVEDGPTKSDPRCLTRYYSSFVNWERDLASGLIGPLLICYKESVDQRGNQIMSDKRNVILFSVFDENRSWYLTENIQRFLPNPAGVQLEDPEFQASNIMHSINGYVFDSLQLSVCLHEVAYWYILSIGAQTDFLSVFFSGYTFKHKGVYEDTLTLFPFSGETVFMSMENPGLWILGCHNSDFRNRGMTALLKVSSCDWNTGDYYEDSYEDISAYFDSKNNAIEPRSFSQNPPVLKRHQREGTRTTLQSDQEEIDYDDTISVEMKSEDFDIYDEDENQSPRSFQKKTRHYFIAAVERLWDYGMSSSPHVLRNRAQSGSVPQFKKVVFQEFTDGSFTQPLYRGELNEHLGLLGPYIRAEVEDNIMVTFRNQASRPYSFYSSLISYEEDQRQGAEPRKNFVKPNETKTYFWKVQHHMAPTKDEFDCKAWAYFSDVDLEKDVHSGLIGPLLVCHTNTLNPAHGRQVTVQEFALFFTIFDETKSWYFTENMERNCRAPCNIQMEDPTFKENYRFHAINGYIMDTLPGLVMAQDQRIRWYLLSMGSNENIHSIHFSGHVFTVRKGEEYKMALYNLYPGVFETVEMLPSKAGIWRVECLIGEHLHAGMSTLFLVYSNKCQNPLGMASGHIRDFQITASGQYGQWAPKLARLHYSGSINAWSTKEPFSWIKVDLLAPMIIHGIKTQGARQKFSSLYISQFIIMYSLDGKKWQTYRGNSTGTDMVFFGNVDSSGIKHNIFNPPIIARYIRLHPTHYSIRSTLRMELMGCDLNSCSMPLGMESKAISDAQITASSYFTNMFATWSPSKARLHLQGRSNAWRPQVNNPKEWLQVDFQKTMKVTGVTTQGVKSLDTSMYVKEFLISSSQDGHQWTLFFQNGKVKVFQGNQDSFTPVVNSLDPPLLTRYLRIHPQSWEHQIALRMEVLGCEAQDLY

SEQ ID NO: 2145 - DNA, 4371 bp, synthetic construct
  misc_feature 1..4371: note = Variant of human B-domain deleted Factor VIII
  source 1..4371: mol_type = other DNA
atgcagattgaactgtctacctgcttcttcctctgtttgctgaggttctgctttagcgccactagacggtactaccttggcgctgtggagctgtcctgggactatatgcagagtgatttgggagagcttcccgtcgacgcacgatttcctcctcgcgttccaaagtcatttccctttaacacaagccaggtgtacaagaagacgctcttcgtcgaattcaccgatcacctgttcaatatcgccaaacccagaccaccatggatgggtcttttggggcctaccatacaagcggaggtgtatgacacagttgttatcactctcaagaacatggcttctcatccggtaagtcttcacgcagtgggcgtgtcctactggaaagcttcagaaggagccgagtatgatgatcagacatcccagagggagaaagaagacgacaaggtatttccaggtgggtctcatacctatgtgtggcaagtgctcaaagagaatggccctatggcaagcgatccgccgtgtttgacttacagctacctttcacacgttgacctcgtcaaggacctcaactccgggttgattggagccttgttggtatgcagggaaggatctcttgccaaagagaagacacagaccctggccaagtttatccttctctttgctgtgttcgatgagggcaaaagttggcatagcgaaacgaagaattccctcatgcaggatcgcgacgcagccagcgccagagcttggcccaagatgcacactgtgaacggatatgtcaataggacgcttcctggcttgattgggtgtcatcggaaaagtgtctactggcacgtgatcggaatggggacaacaccagaggtccactccatatttctcgaaggccataccttccttgttcgaaaccacagacaggcatccttggggatctctcccattacctttctcactgcccaaacgggtcttcgtgacttgggtcagttccttctcttttgccatatcccgtcacaccagcatgatggtatggaagcttatgtgaaagtcgacagttgtcctgaggagccacagttgcgcatgaagaataatgaagaagccgaggattacgacgacgatctcaccgattctgagatggacgtggtgaggtttgatgacgacaactctccctccatcattcaagctcggagcggggcgaagaaacaccccaagacttgggtccactatatagcggcggaagaggaggattgggattacgctcctcttgtattggcaccagatgaccgctcatacaaaagccagtacctcaacaacggaccgcagagaattggccggaagtataagaaagtgcgatttatggcctatacagacgaaacctttaagacaagggaggccatccagcatgagagtgggattttgggacctcttctttacggcgaagttggtgataccctcctcatcatcttcaagaatcaagcttctcgcccctataacatttacccacacgggatcactgacgttaggcctttgtatagcagaagacttcccaaaggcgtgaagcatctcaaagacttccccattttgccaggcgagatctttaagtacaaatggaccattacagtggaagatggaccgactaaatcagaccctcgatgccttacgcggtactattcctccttcgtgaattgggagagagatttggcaagcggactcataggaccactcctcatctgttacaaggaatctgtagaccagaggggtaaccagattatgagtgataaacgcaatgtgatcctttttagcgtcttcgacgagaaccggtcctggtacttgaccgagaatatacaaaggttccttcccaaccccgcaggcgttcagttggaagaccctgagtttcaggccagcaatattatgcactcaatcaacggctatgtgtttgatagtctccagctttctgtttgcctccatgaagtagcctattggtacatcttgtcaattggtgctcaaacagacttcctctccgtcttcttctccggctacacctttaagcacaagggcgtgtatgaggacactctcacactctttccattttctggagaaaccgtgttcatgagcatggagaatccaggcctttggatcttgggttgccacaacagtgattttcgcaatcggggaatgactgctctcctcaaagtcagcagctgtgattggaacacaggcgactatgaaggggattcttacgaggacataagtgcctactttgactccaagaataacgccattgagcccagatcattctcccagaatcctcccgtgcttaaaaggcatcagcgcgaaggtaccagaactactcttcagtctgatcaagaggagattgactatgacgacaccattagcgtggaaatgaagaaggaggatttcgatatctatgacgaagatgagaaccagtctccgcggagctttcagaagaagacgcgacactacttcattgcagcagtcgaaaggctttgggactacggtatgtcatcatcccctcatgtgttgcgcaatagagctcagagtggaagtgttccacagttcaagaaagtcgtctttcaagagtttacagatggcagcttcacacagcctctctatcggggcgagcttaacgaacatttgggactccttggtccctatatccgagccgaagtggaggacaacattatggttacctttaggaatcaagcctctcgcccctacagcttctactcctccctcatcagttatgaggaggatcagagacaaggcgctgaaccacggaagaactttgtgaaaccgaatgagacgaagacctacttctggaaagtacagcaccacatggcccccacaaaagacgaattcgattgcaaagcatgggcgtatttttcagacgttgacttggagaaagatgtacattcaggacttattggtcctttgttggtgtgtcacactaacactctcaatccagcccatggcaggcaggtgacagtccaggaattcgctcttttctttaccatctttgatgagaccaagtcctggtacttcacggaaaacatggagcgcaattgcagagccccctgtaacatacagatggaggaccctacctttaaggaaaattatcggttccacgcaatcaacggatacattatggatacactccctggccttgtgatggctcaggaccaacgaatcaggtggtacctcctcagcatgggttctaatgagaacatacactccattcacttttcaggacatgtgttcactgtccggaagaaagaagagtataagatggccctctacaatttgtatccaggcgtgtttgagaccgttgaaatgcttccctctaaagctggcatctggagagtagagtgcttgatcggagaacatcttcacgcaggtatgagcaccttgttcctcgtgtacagcaacaaatgtcagaatccacttggcatggccagtggacacattcgcgactttcagatcacagcatctggccagtatggacaatgggccccaaagttggctcgcctccattactccggtagcataaatgcgtggtccactaaagaacctttcagctggattaaggtcgatcttcttgcccccatgatcatccacggcattaagacacagggagcgaggcagaaattctcctccctctacatctcacagttcattattatgtatagtttggacggcaagaagtggcaaacttatagaggtaacagtactggaacagacatggtgttcttcggcaacgttgatagctctggcatcaaacacaacatctttaatcctcccataatagctcggtacatcagattgcatccgacccactacagcattaggagtacactccgaatggagcttatgggttgcgacttgaattcctgttcaatgccactcggaatggagtctaaagccatctctgatgcacagataaccgccagtagctactttacgaacatgtttgctacgtggtcaccctctaaggcaaggcttcatttgcaaggccggtctaatgcctggagacctcaggtgaacaacccgaaagaatggctccaggtggactttcagaagaccatgaaagtaacaggtgtcactactcagggagttaagtccttggatactagcatgtatgtgaaggagttccttatttcctcatcacaagatggccaccagtggaccctcttctttcagaatggtaaggtcaaagtgtttcagggcaatcaagacagcttcacacccgtggtgaacagtcttgatcctccactcttgacacgataccttcgaatccatccacagtcttgggagcaccagattgcattgcgcatggaagtacttggatgcgaggctcaggacctctac

SEQ ID NO: 2146 - protein, 1457 aa, synthetic construct
  REGION 1..1457: note = Variant of human B-domain deleted Factor VIII
MQIELSTCFFLCLLRFCFSATRRYYLGAVELSWDYMQSDLGELPVDARFPPRVPKSFPFNTSQVYKKTLFVEFTDHLFNIAKPRPPWMGLLGPTIQAEVYDTVVITLKNMASHPVSLHAVGVSYWKASEGAEYDDQTSQREKEDDKVFPGGSHTYVWQVLKENGPMASDPPCLTYSYLSHVDLVKDLNSGLIGALLVCREGSLAKEKTQTLAKFILLFAVFDEGKSWHSETKNSLMQDRDAASARAWPKMHTVNGYVNRTLPGLIGCHRKSVYWHVIGMGTTPEVHSIFLEGHTFLVRNHRQASLGISPITFLTAQTGLRDLGQFLLFCHIPSHQHDGMEAYVKVDSCPEEPQLRMKNNEEAEDYDDDLTDSEMDVVRFDDDNSPSIIQARSGAKKHPKTWVHYIAAEEEDWDYAPLVLAPDDRSYKSQYLNNGPQRIGRKYKKVRFMAYTDETFKTREAIQHESGILGPLLYGEVGDTLLIIFKNQASRPYNIYPHGITDVRPLYSRRLPKGVKHLKDFPILPGEIFKYKWTITVEDGPTKSDPRCLTRYYSSFVNWERDLASGLIGPLLICYKESVDQRGNQIMSDKRNVILFSVFDENRSWYLTENIQRFLPNPAGVQLEDPEFQASNIMHSINGYVFDSLQLSVCLHEVAYWYILSIGAQTDFLSVFFSGYTFKHKGVYEDTLTLFPFSGETVFMSMENPGLWILGCHNSDFRNRGMTALLKVSSCDWNTGDYEGDSYEDISAYFDSKNNAIEPRSFSQNPPVLKRHQREGTRTTLQSDQEEIDYDDTISVEMKKEDFDIYDEDENQSPRSFQKKTRHYFIAAVERLWDYGMSSSPHVLRNRAQSGSVPQFKKVVFQEFTDGSFTQPLYRGELNEHLGLLGPYIRAEVEDNIMVTFRNQASRPYSFYSSLISYEEDQRQGAEPRKNFVKPNETKTYFWKVQHHMAPTKDEFDCKAWAYFSDVDLEKDVHSGLIGPLLVCHTNTLNPAHGRQVTVQEFALFFTIFDETKSWYFTENMERNCRAPCNIQMEDPTFKENYRFHAINGYIMDTLPGLVMAQDQRIRWYLLSMGSNENIHSIHFSGHVFTVRKKEEYKMALYNLYPGVFETVEMLPSKAGIWRVECLIGEHLHAGMSTLFLVYSNKCQNPLGMASGHIRDFQITASGQYGQWAPKLARLHYSGSINAWSTKEPFSWIKVDLLAPMIIHGIKTQGARQKFSSLYISQFIIMYSLDGKKWQTYRGNSTGTDMVFFGNVDSSGIKHNIFNPPIIARYIRLHPTHYSIRSTLRMELMGCDLNSCSMPLGMESKAISDAQITASSYFTNMFATWSPSKARLHLQGRSNAWRPQVNNPKEWLQVDFQKTMKVTGVTTQGVKSLDTSMYVKEFLISSSQDGHQWTLFFQNGKVKVFQGNQDSFTPVVNSLDPPLLTRYLRIHPQSWEHQIALRMEVLGCEAQDLY

SEQ ID NO: 2147 - DNA, 4371 bp, synthetic construct
  misc_feature 1..4371: note = Variant of human B-domain deleted Factor VIII
  source 1..4371: mol_type = other DNA
atgcagattgaactgtctacctgcttcttcctctgtttgctgaggttctgctttagcgccactagacggtactaccttggcgctgtggagctgtcctgggactatatgcagagtgatttgggagagcttcccgtcgacgcacgatttcctcctcgcgttccaaagtcatttccctttaacacaagccaggtgtacaagaagacgctcttcgtcgaattcaccgatcacctgttcaatatcgccaaacccagaccaccatggatgggtcttttggggcctaccatacaagcggaggtgtatgacacagttgttatcactctcaagaacatggcttctcatccggtaagtcttcacgcagtgggcgtgtcctactggaaagcttcagaaggagccgagtatgatgatcagacatcccagagggagaaagaagacgacaaggtatttccaggtgggtctcatacctatgtgtggcaagtgctcaaagagaatggccctatggccagcgatccgccgtgtttgacttacagctacctttcacacgttgacctcgtcaaggacctcaactccgggttgattggagccttgttggtatgcagggaaggatctcttgccaaagagaagacacagaccctggccaagtttatccttctctttgctgtgttcgatgagggcaaaagttggcatagcgaaacgaagaattccctcatgcaggatcgcgacgcagccagcgccagagcttggcccaagatgcacactgtgaacggatatgtcaataggacgcttcctggcttgattgggtgtcatcggaaaagtgtctactggcacgtgatcggaatggggacaacaccagaggtccactccatatttctcgaaggccataccttccttgttcgaaaccacagacaggcatccttggggatctctcccattacctttctcactgcccaaacgggtcttcgtgacttgggtcagttccttctcttttgccatatcccgtcacaccagcatgatggtatggaagcttatgtgaaagtcgacagttgtcctgaggagccacagttgcgcatgaagaataatgaagaagccgaggattacgacgacgatctcaccgattctgagatggacgtggtgaggtttgatgacgacaactctccctccatcattcaagctcggagcggggcgaagaaacaccccaagacttgggtccactatatagcggcggaagaggaggattgggattacgctcctcttgtattggcaccagatgaccgctcatacaaaagccagtacctcaacaacggaccgcagagaattggccggaagtataagaaagtgcgatttatggcctatacagacgaaacctttaagacaagggaggccatccagcatgagagtgggattttgggacctcttctttacggcgaagttggtgataccctcctcatcatcttcaagaatcaagcttctcgcccctataacatttacccacacgggatcactgacgttaggcctttgtatagcagaagacttcccaaaggcgtgaagcatctcaaagacttccccattttgccaggcgagatctttaagtacaaatggaccattacagtggaagatggaccgactaaatcagaccctcgatgccttacgcggtactattcctccttcgtgaattgggagagagatttggcaagcggactcataggaccactcctcatctgttacaaggaatctgtagaccagaggggtaaccagattatgagtgataaacgcaatgtgatcctttttagcgtcttcgacgagaaccggtcctggtacttgaccgagaatatacaaaggttccttcccaaccccgcaggcgttcagttggaagaccctgagtttcaggccagcaatattatgcactcaatcaacggctatgtgtttgatagtctccagctttctgtttgcctccatgaagtagcctattggtacatcttgtcaattggtgctcaaacagacttcctctccgtcttcttctccggctacacctttaagcacaagggcgtgtatgaggacactctcacactctttccattttctggagaaaccgtgttcatgagcatggagaatccaggcctttggatcttgggttgccacaacagtgattttcgcaatcggggaatgactgctctcctcaaagtcagcagctgtgattggaacacaggcgactatgaaggggattcttacgaggacataagtgcctactttgactccaagaataacgccattgagcccagatcattctcccagaatcctcccgtgcttaaaaggcatcagcgcgaaggtaccagaactactcttcagtctgatcaagaggagattgactatgacgacaccattagcgtggaaatgaagaaggtagatttcgatatctacgacgaggacgggaaccagtctccgcggagctttcagaagaagacgcgacactacttcattgcagcagtcgaaaggctttgggactacggtatgtcatcatcccctcatgtgttgcgcaatagagctcagagtggaagtgttccacagttcaagaaagtcgtctttcaagagtttacagatggcagcttcacacagcctctctatcggggcgagcttaacgaacatttgggactccttggtccctatatccgagccgaagtggaggacaacattatggttacctttaggaatcaagcctctcgcccctacagcttctactcctccctcatcagttatgaggaggatcagagacaaggcgctgaaccacggaagaactttgtgaaaccgaatgagacgaagacctacttctggaaagtacagcaccacatggcccccacaaaagacgaattcgattgcaaagcatgggcgtatttttcagacgttgacttggagaaagatgtacattcaggacttattggtcctttgttggtgtgtcacactaacactctcaatccagcccatggcaggcaggtgacagtccaggaattcgctcttttctttaccatctttgatgagaccaagtcctggtacttcacggaaaacatggagcgcaattgcagagccccctgtaacatacagatggaggaccctacctttaaggaaaattatcggttccacgcaatcaacggatacattatggatacactccctggccttgtgatggctcaggaccaacgaatcaggtggtacctcctcagcatgggttctaatgagaacatacactccattcacttttcaggacatgtgttcactgtccggaagaaagaagagtataagatggccctctacaatttgtatccaggcgtgtttgagaccgttgaaatgcttccctctaaagctggcatctggagagtagagtgcttgatcggagaacatcttcacgcaggtatgagcaccttgttcctcgtgtacagcaacaaatgtcagaatccacttggcatggccagtggacacattcgcgactttcagatcacagcatctggccagtatggacaatgggccccaaagttggctcgcctccattactccggtagcataaatgcgtggtccactaaagaacctttcagctggattaaggtcgatcttcttgcccccatgatcatccacggcattaagacacagggagcgaggcagaaattctcctccctctacatctcacagttcattattatgtatagtttggacggcaagaagtggcaaacttatagaggtaacagtactggaacagacatggtgttcttcggcaacgttgatagctctggcatcaaacacaacatctttaatcctcccataatagctcggtacatcagattgcatccgacccactacagcattaggagtacactccgaatggagcttatgggttgcgacttgaattcctgttcaatgccactcggaatggagtctaaagccatctctgatgcacagataaccgccagtagctactttacgaacatgtttgctacgtggtcaccctctaaggcaaggcttcatttgcaaggccggtctaatgcctggagacctcaggtgaacaacccgaaagaatggctccaggtggactttcagaagaccatgaaagtaacaggtgtcactactcagggagttaagtccttggatactagcatgtatgtgaaggagttccttatttcctcatcacaagatggccaccagtggaccctcttctttcagaatggtaaggtcaaagtgtttcagggcaatcaagacagcttcacacccgtggtgaacagtcttgatcctccactcttgacacgataccttcgaatccatccacagtcttgggagcaccagattgcattgcgcatggaagtacttggatgcgaggctcaggacctctac

SEQ ID NO: 2148 - protein, 1457 aa, synthetic construct
  REGION 1..1457: note = Variant of human B-domain deleted Factor VIII
MQIELSTCFFLCLLRFCFSATRRYYLGAVELSWDYMQSDLGELPVDARFPPRVPKSFPFNTSQVYKKTLFVEFTDHLFNIAKPRPPWMGLLGPTIQAEVYDTVVITLKNMASHPVSLHAVGVSYWKASEGAEYDDQTSQREKEDDKVFPGGSHTYVWQVLKENGPMASDPPCLTYSYLSHVDLVKDLNSGLIGALLVCREGSLAKEKTQTLAKFILLFAVFDEGKSWHSETKNSLMQDRDAASARAWPKMHTVNGYVNRTLPGLIGCHRKSVYWHVIGMGTTPEVHSIFLEGHTFLVRNHRQASLGISPITFLTAQTGLRDLGQFLLFCHIPSHQHDGMEAYVKVDSCPEEPQLRMKNNEEAEDYDDDLTDSEMDVVRFDDDNSPSIIQARSGAKKHPKTWVHYIAAEEEDWDYAPLVLAPDDRSYKSQYLNNGPQRIGRKYKKVRFMAYTDETFKTREAIQHESGILGPLLYGEVGDTLLIIFKNQASRPYNIYPHGITDVRPLYSRRLPKGVKHLKDFPILPGEIFKYKWTITVEDGPTKSDPRCLTRYYSSFVNWERDLASGLIGPLLICYKESVDQRGNQIMSDKRNVILFSVFDENRSWYLTENIQRFLPNPAGVQLEDPEFQASNIMHSINGYVFDSLQLSVCLHEVAYWYILSIGAQTDFLSVFFSGYTFKHKGVYEDTLTLFPFSGETVFMSMENPGLWILGCHNSDFRNRGMTALLKVSSCDWNTGDYEGDSYEDISAYFDSKNNAIEPRSFSQNPPVLKRHQREGTRTTLQSDQEEIDYDDTISVEMKKVDFDIYDEDGNQSPRSFQKKTRHYFIAAVERLWDYGMSSSPHVLRNRAQSGSVPQFKKVVFQEFTDGSFTQPLYRGELNEHLGLLGPYIRAEVEDNIMVTFRNQASRPYSFYSSLISYEEDQRQGAEPRKNFVKPNETKTYFWKVQHHMAPTKDEFDCKAWAYFSDVDLEKDVHSGLIGPLLVCHTNTLNPAHGRQVTVQEFALFFTIFDETKSWYFTENMERNCRAPCNIQMEDPTFKENYRFHAINGYIMDTLPGLVMAQDQRIRWYLLSMGSNENIHSIHFSGHVFTVRKKEEYKMALYNLYPGVFETVEMLPSKAGIWRVECLIGEHLHAGMSTLFLVYSNKCQNPLGMASGHIRDFQITASGQYGQWAPKLARLHYSGSINAWSTKEPFSWIKVDLLAPMIIHGIKTQGARQKFSSLYISQFIIMYSLDGKKWQTYRGNSTGTDMVFFGNVDSSGIKHNIFNPPIIARYIRLHPTHYSIRSTLRMELMGCDLNSCSMPLGMESKAISDAQITASSYFTNMFATWSPSKARLHLQGRSNAWRPQVNNPKEWLQVDFQKTMKVTGVTTQGVKSLDTSMYVKEFLISSSQDGHQWTLFFQNGKVKVFQGNQDSFTPVVNSLDPPLLTRYLRIHPQSWEHQIALRMEVLGCEAQDLY

SEQ ID NO: 2149 - DNA, 4371 bp, synthetic construct
  misc_feature 1..4371: note = Variant of human B-domain deleted Factor VIII
  source 1..4371: mol_type = other DNA
atgcagattgaactgtctacctgcttcttcctctgtttgctgaggttctgctttagcgccactagacggtactaccttggcgctgtggagctgtcctgggactatatgcagagtgatttgggagagcttcccgtcgacgcacgatttcctcctcgcgttccaaagtcatttccctttaacacaagccaggtgtacaagaagacgctcttcgtcgaattcaccgatcacctgttcaatatcgccaaacccagaccaccatggatgggtcttttggggcctaccatacaagcggaggtgtatgacacagttgttatcactctcaagaacatggcttctcatccggtaagtcttcacgcagtgggcgtgtcctactggaaagcttcagaaggagccgagtatgatgatcagacatcccagagggagaaagaagacgacaaggtatttccaggtgggtctcatacctatgtgtggcaagtgctcaaagagaatggccctatggcaagcgatccgccgtgtttgacttacagctacctttcacacgttgacctcgtcaaggacctcaactccgggttgattggagccttgttggtatgcagggaaggatctcttgccaaagagaagacacagaccctggccaagtttatccttctctttgctgtgttcgatgagggcaaaagttggcatagcgaaacgaagaattccctcatgcaggatcgcgacgcagccagcgccagagcttggcccaagatgcacactgtgaacggatatgtcaataggacgcttcctggcttgattgggtgtcatcggaaaagtgtctactggcacgtgatcggaatggggacaacaccagaggtccactccatatttctcgaaggccataccttccttgttcgaaaccacagacaggcatccttggggatctctcccattacctttctcactgcccaaacgggtcttcgtgacttgggtcagttccttctcttttgccatatcccgtcacaccagcatgatggtatggaagcttatgtgaaagtcgacagttgtcctgaggagccacagttgcgcatgaagaataatgaagaagccgaggattacgacgacgatctcaccgattctgagatggacgtggtgaggtttgatgacgacaactctccctccatcattcaagctcggagcggggcgaagaaacaccccaagacttgggtccactatatagcggcggaagaggaggattgggattacgctcctcttgtattggcaccagatgaccgctcatacaaaagccagtacctcaacaacggaccgcagagaattggccggaagtataagaaagtgcgatttatggcctatacagacgaaacctttaagacaagggaggccatccagcatgagagtgggattttgggacctcttctttacggcgaagttggtgataccctcctcatcatcttcaagaatcaagcttctcgcccctataacatttacccacacgggatcactgacgttaggcctttgtatagcagaagacttcccaaaggcgtgaagcatctcaaagacttccccattttgccaggcgagatctttaagtacaaatggaccattacagtggaagatggaccgactaaatcggaccctcgatgccttacgcggtactattcctccttcgtgaattgggagagagatttggcaagcggactcataggaccactcctcatctgttacaaggaatctgtagaccagaggggtaaccagattatgagtgataaacgcaatgtgatcctttttagcgtcttcgacgagaaccggtcctggtacttgaccgagaatatacaaaggttccttcccaaccccgcaggcgttcagttggaagaccctgagtttcaggccagcaatattatgcactcaatcaacggctatgtgtttgatagtctccagctttctgtttgcctccatgaagtagcctattggtacatcttgtcaattggtgctcaaacagacttcctctccgtcttcttctccggctacacctttaagcacaagggggtgtatgaggacactctcacactctttccattttctggagaaaccgtgttcatgagcatggagaatccaggcctttggatcttgggttgccacaacagtgattttcgcaatcggggaatgactgctctcctcaaagtcagcagctgtgattggaacacaggcgactatgaggaagattcttacgaggacataagtgcctactttgactccaagaataacgccattgagcccagatcattctcccagaatcctcccgtgcttaaaaggcatcagcgcgaaggtaccagaactactcttcagtctgatcaagaggagattgactatgacgacaccattagcgtggaaatgaagaaggtggatttcgatatctatgacgaggatgagaaccagtctccgcggagctttcagaagaagacgcgacactacttcattgcagcagtcgaaaggctttgggactacggtatgtcatcatcccctcatgtgttgcgcaatagagctcagagtggaagtgttccacagttcaagaaagtcgtctttcaagagtttacagatggcagcttcacacagcctctctatcggggcgagcttaacgaacatttgggactccttggtccctatatccgagccgaagtggaggacaacattatggttacctttaggaatcaagcctctcgcccctacagcttctactcctccctcatcagttatgaggaggatcagagacaaggcgctgaaccacggaagaactttgtgaaaccgaatgagacgaagacctacttctggaaagtacagcaccacatggcccccacaaaagacgaattcgattgcaaagcatgggcgtatttttcagacgttgacttggagaaagatgtacattcaggacttattggtcctttgttggtgtgtcacactaacactctcaatccagcccatggcaggcaggtgacagtccaggaattcgctcttttctttaccatctttgatgagaccaagtcctggtacttcacggaaaacatggagcgcaattgcagagccccctgtaacatacagatggaggaccctacctttaaggaaaattatcggttccacgcaatcaacggatacattatggatacactccctggccttgtgatggctcaggaccaacgaatcaggtggtacctcctcagcatgggttctaatgagaacatacactccattcacttttcaggacatgtgttcactgtccggaagaaagaagagtataagatggccctctacaatttgtatccaggcgtgtttgagaccgttgaaatgcttccctctaaagctggcatctggagagtagagtgcttgatcggagaacatcttcacgcaggtatgagcaccttgttcctcgtgtacagcaacaaatgtcagaatccacttggcatggccagtggacacattcgcgactttcagatcacagcatctggccagtatggacaatgggccccaaagttggctcgcctccattactccggtagcataaatgcgtggtccactaaagaacctttcagctggattaaggtcgatcttcttgcccccatgatcatccacggcattaagacacagggagcgaggcagaaattctcctccctctacatctcacagttcattattatgtatagtttggacggcaagaagtggcaaacttatagaggtaacagtactggaacagacatggtgttcttcggcaacgttgatagctctggcatcaaacacaacatctttaatcctcccataatagctcggtacatcagattgcatccgacccactacagcattaggagtacactccgaatggagcttatgggttgcgacttgaattcctgttcaatgccactcggaatggagtctaaagccatctctgatgcacagataaccgccagtagctactttacgaacatgtttgctacgtggtcaccctctaaggcaaggcttcatttgcaaggccggtctaatgcctggagacctcaggtgaacaacccgaaagaatggctccaggtggactttcagaagaccatgaaagtaacaggtgtcactactcagggagttaagtccttggatactagcatgtatgtgaaggagttccttatttcctcatcacaagatggccaccagtggaccctcttctttcagaatggtaaggtcaaagtgtttcagggcaatcaagacagcttcacacccgtggtgaacagtcttgatcctccactcttgacacgataccttcgaatccatccacagtcttgggagcaccagattgcattgcgcatggaagtacttggatgcgaggctcaggacctctac

SEQ ID NO: 2150 - protein, 1457 aa, synthetic construct
  REGION 1..1457: note = Variant of human B-domain deleted Factor VIII
MQIELSTCFFLCLLRFCFSATRRYYLGAVELSWDYMQSDLGELPVDARFPPRVPKSFPFNTSQVYKKTLFVEFTDHLFNIAKPRPPWMGLLGPTIQAEVYDTVVITLKNMASHPVSLHAVGVSYWKASEGAEYDDQTSQREKEDDKVFPGGSHTYVWQVLKENGPMASDPPCLTYSYLSHVDLVKDLNSGLIGALLVCREGSLAKEKTQTLAKFILLFAVFDEGKSWHSETKNSLMQDRDAASARAWPKMHTVNGYVNRTLPGLIGCHRKSVYWHVIGMGTTPEVHSIFLEGHTFLVRNHRQASLGISPITFLTAQTGLRDLGQFLLFCHIPSHQHDGMEAYVKVDSCPEEPQLRMKNNEEAEDYDDDLTDSEMDVVRFDDDNSPSIIQARSGAKKHPKTWVHYIAAEEEDWDYAPLVLAPDDRSYKSQYLNNGPQRIGRKYKKVRFMAYTDETFKTREAIQHESGILGPLLYGEVGDTLLIIFKNQASRPYNIYPHGITDVRPLYSRRLPKGVKHLKDFPILPGEIFKYKWTITVEDGPTKSDPRCLTRYYSSFVNWERDLASGLIGPLLICYKESVDQRGNQIMSDKRNVILFSVFDENRSWYLTENIQRFLPNPAGVQLEDPEFQASNIMHSINGYVFDSLQLSVCLHEVAYWYILSIGAQTDFLSVFFSGYTFKHKGVYEDTLTLFPFSGETVFMSMENPGLWILGCHNSDFRNRGMTALLKVSSCDWNTGDYEEDSYEDISAYFDSKNNAIEPRSFSQNPPVLKRHQREGTRTTLQSDQEEIDYDDTISVEMKKVDFDIYDEDENQSPRSFQKKTRHYFIAAVERLWDYGMSSSPHVLRNRAQSGSVPQFKKVVFQEFTDGSFTQPLYRGELNEHLGLLGPYIRAEVEDNIMVTFRNQASRPYSFYSSLISYEEDQRQGAEPRKNFVKPNETKTYFWKVQHHMAPTKDEFDCKAWAYFSDVDLEKDVHSGLIGPLLVCHTNTLNPAHGRQVTVQEFALFFTIFDETKSWYFTENMERNCRAPCNIQMEDPTFKENYRFHAINGYIMDTLPGLVMAQDQRIRWYLLSMGSNENIHSIHFSGHVFTVRKKEEYKMALYNLYPGVFETVEMLPSKAGIWRVECLIGEHLHAGMSTLFLVYSNKCQNPLGMASGHIRDFQITASGQYGQWAPKLARLHYSGSINAWSTKEPFSWIKVDLLAPMIIHGIKTQGARQKFSSLYISQFIIMYSLDGKKWQTYRGNSTGTDMVFFGNVDSSGIKHNIFNPPIIARYIRLHPTHYSIRSTLRMELMGCDLNSCSMPLGMESKAISDAQITASSYFTNMFATWSPSKARLHLQGRSNAWRPQVNNPKEWLQVDFQKTMKVTGVTTQGVKSLDTSMYVKEFLISSSQDGHQWTLFFQNGKVKVFQGNQDSFTPVVNSLDPPLLTRYLRIHPQSWEHQIALRMEVLGCEAQDLY

SEQ ID NO: 2151 - DNA, 4371 bp, synthetic construct
  misc_feature 1..4371: note = Variant of human B-domain deleted Factor VIII
  source 1..4371: mol_type = other DNA
atgcagattgaactgtctacctgcttcttcctctgtttgctgaggttctgctttagcgccactagacggtactaccttggcgctgtggagctgtcctgggactatatgcagagtgatttgggagagcttcccgtcgacgcacgatttcctcctcgcgttccaaagtcatttccctttaacacaagccaggtgtacaagaagacgctcttcgtcgaattcaccgatcacctgttcaatatcgccaaacccagaccaccatggatgggtcttttggggcctaccatacaagcggaggtgtatgacacagttgttatcactctcaagaacatggcttctcatccggtaagtcttcacgcagtgggcgtgtcctactggaaagcttcagaaggagccgagtatgatgatcagacatcccagagggagaaagaagacgacaaggtatttccaggtgggtctcatacctatgtgtggcaagtgctcaaagagaatggccctatggcaagcgatccgccgtgtttgacttacagctacctgtcacacgttgacctcgtcaaggacctcaactccgggttgattggagccttgttggtatgcagggaaggatctcttgccaaagagaagacacagaccctggccaagtttatccttctctttgctgtgttcgatgagggcaaaagttggcatagcgaaacgaagaattccctcatgcaggatcgcgacgcagccagcgccagagcttggcccaagatgcacactgtgaacggatatgtcaataggacgcttcctggcttgattgggtgtcatcggaaaagtgtctactggcacgtgatcggaatggggacaacaccagaggtccactccatatttctcgaaggccataccttccttgttcgaaaccacagacaggcatccttggggatctctcccattacctttctcactgcccaaacgggtcttcgtgacttgggtcagttccttctcttttgccatatcccgtcacaccagcatgatggtatggaagcttatgtgaaagtcgacagttgtcctgaggagccacagttgcgcatgaagaataatgaagaagccgaggattacgacgacgatctcaccgattctgagatggacgtggtgaggtttgatgacgacaactctccctccatcattcaagctcggagcggggcgaagaaacaccccaagacttgggtccactatatagcggcggaagaggaggattgggattacgctcctcttgtattggcaccagatgaccgctcatacaaaagccagtacctcaacaacggaccgcagagaattggccggaagtataagaaagtgcgatttatggcctatacagacgaaacctttaagacaagggaggccatccagcatgagagtgggattttgggacctcttctttacggcgaagttggtgataccctcctcatcatcttcaagaatcaagcttctcgcccctataacatttacccacacgggatcactgacgttaggcctttgtatagcagaagacttcccaaaggcgtgaagcatctcaaagacttccccattttgccaggcgagatctttaagtacaaatggaccattacagtggaagatggaccgactaaatcggaccctcgatgccttacgcggtactattcctccttcgtgaattgggagagagatttggcaagcggactcataggaccactcctcatctgttacaaggaatctgtagaccagaggggtaaccagattatgagtgataaacgcaatgtgatcctttttagcgtcttcgacgagaaccggtcctggtacttgaccgagaatatacaaaggttccttcccaaccccgcaggcgttcagttggaagaccctgagtttcaggccagcaatattatgcactcaatcaacggctatgtgtttgatagtctccagctttctgtttgcctccatgaagtagcctattggtacatcttgtcaattggtgctcaaacagacttcctctccgtcttcttctccggctacacctttaagcacaagggcgtgtatgaggacactctcacactctttccattttctggagaaaccgtgttcatgagcatggagaatccaggcctttggatcttgggttgccacaacagtgattttcgcaatcggggaatgactgctctcctcaaagtcagcagctgtgattggaacacaggcgactatgaagaggattcttacgaggacataagtgcctactttgactccaagaataacgccattgagcccagatcattctcccagaatcctcccgtgcttaaaaggcatcagcgcgaaggtaccagaactactcttcagtctgatcaagaggagattgactatgacgacaccattagcgtggaaatgaagaaggtagatttcgatatccaggacgaggacgggaaccagtctccgcggagctttcagaagaagacgcgacactacttcattgcagcagtcgaaaggctttgggactacggtatgtcatcatcccctcatgtgttgcgcaatagagctcagagtggaagtgttccacagttcaagaaagtcgtctttcaagagtttacagatggcagcttcacacagcctctctatcggggcgagcttaacgaacatttgggactccttggtccctatatccgagccgaagtggaggacaacattatggttacctttaggaatcaagcctctcgcccctacagcttctactcctccctcatcagttatgaggaggatcagagacaaggcgctgaaccacggaagaactttgtgaaaccgaatgagacgaagacctacttctggaaagtacagcaccacatggcccccacaaaagacgaattcgattgcaaagcatgggcgtatttttcagacgttgacttggagaaagatgtacattcaggacttattggtcctttgttggtgtgtcacactaacactctcaatccagcccatggcaggcaggtgacagtccaggaattcgctcttttctttaccatctttgatgagaccaagtcctggtacttcacggaaaacatggagcgcaattgcagagccccctgtaacatacagatggaggaccctacctttaaggaaaattatcggttccacgcaatcaacggatacattatggatacactccctggccttgtgatggctcaggaccaacgaatcaggtggtacctcctcagcatgggttctaatgaaaacatacactccattcacttttcaggacatgtgttcactgtccggaagaaagaagagtataagatggccctctacaatttgtatccaggcgtgtttgagaccgttgaaatgcttccctctaaagctggcatctggagagtagagtgcttgatcggagaacatcttcacgcaggtatgagcaccttgttcctcgtgtacagcaacaaatgtcagaatccacttggcatggccagtggacacattcgcgactttcagatcacagcatctggccagtatggacaatgggccccaaagttggctcgcctccattactccggtagcataaatgcgtggtccactaaagaacctttcagctggattaaggtcgatcttcttgcccccatgatcatccacggcattaagacacagggagcgaggcagaaattctcctccctctacatctcacagttcattattatgtatagtttggacggcaagaagtggcaaacttatagaggtaacagtactggaacagacatggtgttcttcggcaacgttgatagctctggcatcaaacacaacatctttaatcctcccataatagctcggtacatcagattgcatccgacccactacagcattaggagtacactccgaatggagcttatgggttgcgacttgaattcctgttcaatgccactcggaatggagtctaaagccatctctgatgcacagataaccgccagtagctactttacgaacatgtttgctacgtggtcaccctctaaggcaaggcttcatttgcaaggccggtctaatgcctggagacctcaggtgaacaacccgaaagaatggctccaggtggactttcagaagaccatgaaagtaacaggtgtcactactcagggagttaagtccttggatactagcatgtatgtgaaggagttccttatttcctcatcacaagatggccaccagtggaccctcttctttcagaatggtaaggtcaaagtgtttcagggcaatcaagacagcttcacacccgtggtgaacagtcttgatcctccactcttgacacgataccttcgaatccatccacagtcttgggagcaccagattgcattgcgcatggaagtacttggatgcgaggctcaggacctctac

SEQ ID NO: 2152 - protein, 1457 aa, synthetic construct
  REGION 1..1457: note = Variant of human B-domain deleted Factor VIII
MQIELSTCFFLCLLRFCFSATRRYYLGAVELSWDYMQSDLGELPVDARFPPRVPKSFPFNTSQVYKKTLFVEFTDHLFNIAKPRPPWMGLLGPTIQAEVYDTVVITLKNMASHPVSLHAVGVSYWKASEGAEYDDQTSQREKEDDKVFPGGSHTYVWQVLKENGPMASDPPCLTYSYLSHVDLVKDLNSGLIGALLVCREGSLAKEKTQTLAKFILLFAVFDEGKSWHSETKNSLMQDRDAASARAWPKMHTVNGYVNRTLPGLIGCHRKSVYWHVIGMGTTPEVHSIFLEGHTFLVRNHRQASLGISPITFLTAQTGLRDLGQFLLFCHIPSHQHDGMEAYVKVDSCPEEPQLRMKNNEEAEDYDDDLTDSEMDVVRFDDDNSPSIIQARSGAKKHPKTWVHYIAAEEEDWDYAPLVLAPDDRSYKSQYLNNGPQRIGRKYKKVRFMAYTDETFKTREAIQHESGILGPLLYGEVGDTLLIIFKNQASRPYNIYPHGITDVRPLYSRRLPKGVKHLKDFPILPGEIFKYKWTITVEDGPTKSDPRCLTRYYSSFVNWERDLASGLIGPLLICYKESVDQRGNQIMSDKRNVILFSVFDENRSWYLTENIQRFLPNPAGVQLEDPEFQASNIMHSINGYVFDSLQLSVCLHEVAYWYILSIGAQTDFLSVFFSGYTFKHKGVYEDTLTLFPFSGETVFMSMENPGLWILGCHNSDFRNRGMTALLKVSSCDWNTGDYEEDSYEDISAYFDSKNNAIEPRSFSQNPPVLKRHQREGTRTTLQSDQEEIDYDDTISVEMKKVDFDIQDEDGNQSPRSFQKKTRHYFIAAVERLWDYGMSSSPHVLRNRAQSGSVPQFKKVVFQEFTDGSFTQPLYRGELNEHLGLLGPYIRAEVEDNIMVTFRNQASRPYSFYSSLISYEEDQRQGAEPRKNFVKPNETKTYFWKVQHHMAPTKDEFDCKAWAYFSDVDLEKDVHSGLIGPLLVCHTNTLNPAHGRQVTVQEFALFFTIFDETKSWYFTENMERNCRAPCNIQMEDPTFKENYRFHAINGYIMDTLPGLVMAQDQRIRWYLLSMGSNENIHSIHFSGHVFTVRKKEEYKMALYNLYPGVFETVEMLPSKAGIWRVECLIGEHLHAGMSTLFLVYSNKCQNPLGMASGHIRDFQITASGQYGQWAPKLARLHYSGSINAWSTKEPFSWIKVDLLAPMIIHGIKTQGARQKFSSLYISQFIIMYSLDGKKWQTYRGNSTGTDMVFFGNVDSSGIKHNIFNPPIIARYIRLHPTHYSIRSTLRMELMGCDLNSCSMPLGMESKAISDAQITASSYFTNMFATWSPSKARLHLQGRSNAWRPQVNNPKEWLQVDFQKTMKVTGVTTQGVKSLDTSMYVKEFLISSSQDGHQWTLFFQNGKVKVFQGNQDSFTPVVNSLDPPLLTRYLRIHPQSWEHQIALRMEVLGCEAQDLY

SEQ ID NO: 2153 - DNA, 4371 bp, synthetic construct
  misc_feature 1..4371: note = Variant of human B-domain deleted Factor VIII
  source 1..4371: mol_type = other DNA
atgcagattgaactgtctacctgcttcttcctctgtttgctgaggttctgctttagcgccactagacggtactaccttggcgctgtggagctgtcctgggactatatgcagagtgatttgggagagcttcccgtcgacgcacgatttcctcctcgcgttccaaagtcatttccctttaacacaagccaggtgtacaagaagacgctcttcgtcgaattcaccgatcacctgttcaatatcgccaaacccagaccaccatggatgggtcttttggggcctaccatacaagcggaggtgtatgacacagttgttatcactctcaagaacatggcttctcatccggtaagtcttcacgcagtgggcgtgtcctactggaaagcttcagaaggagccgagtatgatgatcagacatcccagagggagaaagaagacgacaaggtatttccaggtgggtctcatacctatgtgtggcaagtgctcaaagagaatggccctatggccagcgatccgccgtgtttgacttacagctacctttcacacgttgacctcgtcaaggacctcaactccgggttgattggagccttgttggtatgcagggaaggatctcttgccaaagagaagacacagaccctggccaagtttatccttctctttgctgtgttcgatgagggcaaaagttggcatagcgaaacgaagaattccctcatgcaggatcgcgacgcagccagcgccagagcttggcccaagatgcacactgtgaacggatatgtcaataggacgcttcctggcttgattgggtgtcatcggaaaagtgtctactggcacgtgatcggaatggggacaacaccagaggtccactccatatttctcgaaggccataccttccttgttcgaaaccacagacaggcatccttggggatctctcccattacctttctcactgcccaaacgggtcttcgtgacttgggtcagttccttctcttttgccatatcccgtcacaccagcatgatggtatggaagcttatgtgaaagtcgacagttgtcctgaggagccacagttgcgcatgaagaataatgaagaagccgaggattacgacgacgatctcaccgattctgagatggacgtggtgaggtttgatgacgacaactctccctccatcattcaagctcggagcggggcgaagaaacaccccaagacttgggtccactatatagcggcggaagaggaggattgggattacgctcctcttgtattggcaccagatgaccgctcatacaaaagccagtacctcaacaacggaccgcagagaattggccggaagtataagaaagtgcgatttatggcctatacagacgaaacctttaagacaagggaggccatccagcatgagagtgggattttgggacctcttctttacggcgaagttggtgataccctcctcatcatcttcaagaatcaagcttctcgcccctataacatttacccacacgggatcactgacgttaggcctttgtatagcagaagacttcccaaaggcgtgaagcatctcaaagacttccccattttgccaggcgagatctttaagtacaaatggaccattacagtggaagatggaccgactaaatcggaccctcgatgccttacgcggtactattcctccttcgtgaattgggagagagatttggcaagcggactcataggaccactcctcatctgttacaaggaatctgtagaccagaggggtaaccagattatgagtgataaacgcaatgtgatcctttttagcgtcttcgacgagaaccggtcctggtacttgaccgagaatatacaaaggttccttcccaaccccgcaggcgttcagttggaagaccctgagtttcaggccagcaatattatgcactcaatcaacggctatgtgtttgatagtctccagctttctgtttgcctccatgaagtagcctattggtacatcttgtcaattggtgctcaaacagacttcctctccgtcttcttctccggctacacctttaagcacaagggcgtgtatgaggacactctcacactctttccattttctggagaaaccgtgttcatgagtatggagaatccaggcctttggatcttgggttgccacaacagtgattttcgcaatcggggaatgactgctctcctcaaagtcagcagctgtgattggaacacaggcgactatgaggaagattcttacgaggacataagtgcctactttgactccaagaataacgccattgagcccagatcattctcccagaatcctcccgtgcttaaaaggcatcagcgcgaaggtaccagaactactcttcagtctgatcaagaggagattgactatgacgacaccattagcgtggaaatgaagaaggaagatttcgatatctacgacgaggacgggaaccagtctccgcggagctttcagaagaagacgcgacactacttcattgcagcagtcgaaaggctttgggactacggtatgtcatcatcccctcatgtgttgcgcaatagagctcagagtggaagtgttccacagttcaagaaagtcgtctttcaagagtttacagatggcagcttcacacagcctctctatcggggcgagcttaacgaacatttgggactccttggtccctatatccgagccgaagtggaggacaacattatggttacctttaggaatcaagcctctcgcccctacagcttctactcctccctcatcagttatgaggaggatcagagacaaggcgctgaaccacggaagaactttgtgaaaccgaatgagacgaagacctacttctggaaagtacagcaccacatggcccccacaaaagacgaattcgattgcaaagcatgggcgtatttttcagacgttgacttggagaaagatgtacattcaggacttattggtcctttgttggtgtgtcacactaacactctcaatccagcccatggcaggcaggtgacagtccaggaattcgctcttttctttaccatctttgatgagaccaagtcctggtacttcacggaaaacatggagcgcaattgcagagccccctgtaacatacagatggaggaccctacctttaaggaaaattatcggttccacgcaatcaacggatacattatggatacactccctggccttgtgatggctcaggaccaacgaatcaggtggtacctcctcagcatgggttctaatgaaaacatacactccattcacttttcaggacatgtgttcactgtccggaagaaagaagagtataagatggccctctacaatttgtatccaggcgtgtttgagaccgttgaaatgcttcccagtaaagctggcatctggagagtagagtgcttgatcggagaacatcttcacgcaggtatgagcaccttgttcctcgtgtacagcaacaaatgtcagaatccacttggcatggccagtggacacattcgcgactttcagatcacagcatctggccagtatggacaatgggccccaaagttggctcgcctccattactccggtagcataaatgcgtggtccactaaagaacctttcagctggattaaggtcgatcttcttgcccccatgatcatccacggcattaagacacagggagcgaggcagaaattctcctccctctacatctcacagttcattattatgtatagtttggacggcaagaagtggcaaacttatagaggtaacagtactggaacagacatggtgttcttcggcaacgttgatagctctggcatcaaacacaacatctttaatcctcccataatagctcggtacatcagattgcatccgacccactacagcattaggagtacactccgaatggagcttatgggttgcgacttgaattcctgttcaatgccactcggaatggagtctaaagccatctctgatgcacagataaccgccagtagctactttacgaacatgtttgctacgtggtcaccctctaaggcaaggcttcatttgcaaggccggtctaatgcctggagacctcaggtgaacaacccgaaagaatggctccaggtggactttcagaagaccatgaaagtaacaggtgtcactactcagggagttaagtccttggatactagcatgtatgtgaaggagttccttatttcctcatcacaagatggccaccagtggaccctcttctttcagaatggtaaggtcaaagtgtttcagggcaatcaagacagcttcacacccgtggtgaacagtcttgatcctccactcttgacacgataccttcgaatccatccacagtcttgggagcaccagattgcattgcgcatggaagtacttggatgcgaggctcaggacctctac

SEQ ID NO: 2154 - protein, 1457 aa, synthetic construct
  REGION 1..1457: note = Variant of human B-domain deleted Factor VIII
MQIELSTCFFLCLLRFCFSATRRYYLGAVELSWDYMQSDLGELPVDARFPPRVPKSFPFNTSQVYKKTLFVEFTDHLFNIAKPRPPWMGLLGPTIQAEVYDTVVITLKNMASHPVSLHAVGVSYWKASEGAEYDDQTSQREKEDDKVFPGGSHTYVWQVLKENGPMASDPPCLTYSYLSHVDLVKDLNSGLIGALLVCREGSLAKEKTQTLAKFILLFAVFDEGKSWHSETKNSLMQDRDAASARAWPKMHTVNGYVNRTLPGLIGCHRKSVYWHVIGMGTTPEVHSIFLEGHTFLVRNHRQASLGISPITFLTAQTGLRDLGQFLLFCHIPSHQHDGMEAYVKVDSCPEEPQLRMKNNEEAEDYDDDLTDSEMDVVRFDDDNSPSIIQARSGAKKHPKTWVHYIAAEEEDWDYAPLVLAPDDRSYKSQYLNNGPQRIGRKYKKVRFMAYTDETFKTREAIQHESGILGPLLYGEVGDTLLIIFKNQASRPYNIYPHGITDVRPLYSRRLPKGVKHLKDFPILPGEIFKYKWTITVEDGPTKSDPRCLTRYYSSFVNWERDLASGLIGPLLICYKESVDQRGNQIMSDKRNVILFSVFDENRSWYLTENIQRFLPNPAGVQLEDPEFQASNIMHSINGYVFDSLQLSVCLHEVAYWYILSIGAQTDFLSVFFSGYTFKHKGVYEDTLTLFPFSGETVFMSMENPGLWILGCHNSDFRNRGMTALLKVSSCDWNTGDYEEDSYEDISAYFDSKNNAIEPRSFSQNPPVLKRHQREGTRTTLQSDQEEIDYDDTISVEMKKEDFDIYDEDGNQSPRSFQKKTRHYFIAAVERLWDYGMSSSPHVLRNRAQSGSVPQFKKVVFQEFTDGSFTQPLYRGELNEHLGLLGPYIRAEVEDNIMVTFRNQASRPYSFYSSLISYEEDQRQGAEPRKNFVKPNETKTYFWKVQHHMAPTKDEFDCKAWAYFSDVDLEKDVHSGLIGPLLVCHTNTLNPAHGRQVTVQEFALFFTIFDETKSWYFTENMERNCRAPCNIQMEDPTFKENYRFHAINGYIMDTLPGLVMAQDQRIRWYLLSMGSNENIHSIHFSGHVFTVRKKEEYKMALYNLYPGVFETVEMLPSKAGIWRVECLIGEHLHAGMSTLFLVYSNKCQNPLGMASGHIRDFQITASGQYGQWAPKLARLHYSGSINAWSTKEPFSWIKVDLLAPMIIHGIKTQGARQKFSSLYISQFIIMYSLDGKKWQTYRGNSTGTDMVFFGNVDSSGIKHNIFNPPIIARYIRLHPTHYSIRSTLRMELMGCDLNSCSMPLGMESKAISDAQITASSYFTNMFATWSPSKARLHLQGRSNAWRPQVNNPKEWLQVDFQKTMKVTGVTTQGVKSLDTSMYVKEFLISSSQDGHQWTLFFQNGKVKVFQGNQDSFTPVVNSLDPPLLTRYLRIHPQSWEHQIALRMEVLGCEAQDLY

SEQ ID NO: 2155 - DNA, 4371 bp, synthetic construct
  misc_feature 1..4371: note = Variant of human B-domain deleted Factor VIII
  source 1..4371: mol_type = other DNA
atgcagattgaactgtctacctgcttcttcctctgtttgctgaggttctgctttagcgccactagacggtactaccttggcgctgtggagctgtcctgggactatatgcagagtgatttgggagagcttcccgtcgacgcacgatttcctcctcgcgttccaaagtcatttccctttaacacaagccaggtgtacaagaagacgctcttcgtcgaattcaccgatcacctgttcaatatcgccaaacccagaccaccatggatgggtcttttggggcctaccatacaagcggaggtgtatgacacagttgttatcactctcaagaacatggcttctcatccggtaagtcttcacgcagtgggcgtgtcctactggaaagcttcagaaggagccgagtatgatgatcagacatcccagagggagaaagaagacgacaaggtatttccaggtgggtctcatacctatgtgtggcaagtgctcaaagagaatggccctatggcaagcgatccgccgtgtttgacttacagctacctttcacacgttgacctcgtcaaggacctcaactccgggttgattggagccttgttggtatgcagggaaggatctcttgccaaagagaagacacagaccctggccaagtttatccttctctttgctgtgttcgatgagggcaaaagttggcatagcgaaacgaagaattccctcatgcaggatcgcgacgcagccagcgccagagcttggcccaagatgcacactgtgaacggatatgtcaataggacgcttcctggcttgattgggtgtcatcggaaaagtgtctactggcacgtgatcggaatggggacaacaccagaggtccactccatatttctcgaaggccataccttccttgttcgaaaccacagacaggcatccttggggatctctcccattacctttctcactgcccaaacgggtcttcgtgacttgggtcagttccttctcttttgccatatcccgtcacaccagcatgatggtatggaagcttatgtgaaagtcgacagttgtcctgaggagccacagttgcgcatgaagaataatgaagaagccgaggattacgacgacgatctcaccgattctgagatggacgtggtgaggtttgatgacgacaactctccctccatcattcaagctcggagcggggcgaagaaacaccccaagacttgggtccactatatagcggcggaagaggaggattgggattacgctcctcttgtattggcaccagatgaccgctcatacaaaagccagtacctcaacaacggaccgcagagaattggccggaagtataagaaagtgcgatttatggcctatacagacgaaacctttaagacaagggaggccatccagcatgagagtgggattttgggacctcttctttacggcgaagttggtgataccctcctcatcatcttcaagaatcaagcttctcgcccctataacatttacccacacgggatcactgacgttaggcctttgtatagcagaagacttcccaaaggcgtgaagcatctcaaagacttccccattttgccaggcgagatctttaagtacaaatggaccattacagtggaagatggaccgactaaatcggaccctcgatgccttacgcggtactattcctccttcgtgaattgggagagagatttggcaagcggactcataggaccactcctcatctgttacaaggaatctgtagaccagaggggtaaccagattatgagtgataaacgcaatgtgatcctttttagcgtcttcgacgagaaccggtcctggtacttgaccgagaatatacaaaggttccttcccaaccccgcaggcgttcagttggaagaccctgagtttcaggccagcaatattatgcactcaatcaacggctatgtgtttgatagtctccagctttctgtttgcctccatgaagtagcctattggtacatcttgtcaattggtgctcaaacagacttcctctccgtcttcttctccggctacacctttaagcacaagggggtgtatgaggacactctcacactctttccattttctggagaaaccgtgttcatgagcatggagaatccaggcctttggatcttgggttgccacaacagtgattttcgcaatcggggaatgactgctctcctcaaagtcagcagctgtgattggaacacaggcgactatgaggaagattcttacgaggacataagtgcctactttgactccaagaataacgccattgagcccagatcattctcccagaatcctcccgtgcttaaaaggcatcagcgcgaaggtaccagaactactcttcagtctgatcaagaggagattgactatgacgacaccattagcgtggaaatgaagaaggaggatttcgatatctatgacgaggatgggaaccagtctccgcggagctttcagaagaagacgcgacactacttcattgcagcagtcgaaaggctttgggactacggtatgtcatcatcccctcatgtgttgcgcaatagagctcagagtggaagtgttccacagttcaagaaagtcgtctttcaagagtttacagatggcagcttcacacagcctctctatcggggcgagcttaacgaacatttgggactccttggtccctatatccgagccgaagtggaggacaacattatggttacctttaggaatcaagcctctcgcccctacagcttctactcctccctcatcagttatgaggaggatcagagacaaggcgctgaaccacggaagaactttgtgaaaccgaatgagacgaagacctacttctggaaagtacagcaccacatggcccccacaaaagacgaattcgattgcaaagcatgggcgtatttttcagacgttgacttggagaaagatgtacattcaggacttattggtcctttgttggtgtgtcacactaacactctcaatccagcccatggcaggcaggtgacagtccaggaattcgctcttttctttaccatctttgatgagaccaagtcctggtacttcacggaaaacatggagcgcaattgcagagccccctgtaacatacagatggaggaccctacctttaaggaaaattatcggttccacgcaatcaacggatacattatggatacactccctggccttgtgatggctcaggaccaacgaatcaggtggtacctcctcagcatgggttctaatgagaacatacactccattcacttttcaggacatgtgttcactgtccggaagggtgaagagtataagatggccctctacaatttgtatccaggcgtgtttgagaccgttgaaatgcttcccagcaaagctggcatctggagagtagagtgcttgatcggagaacatcttcacgcaggtatgagcaccttgttcctcgtgtacagcaacaaatgtcagaatccacttggcatggccagtggacacattcgcgactttcagatcacagcatctggccagtatggacaatgggccccaaagttggctcgcctccattactccggtagcataaatgcgtggtccactaaagaacctttcagctggattaaggtcgatcttcttgcccccatgatcatccacggcattaagacacagggagcgaggcagaaattctcctccctctacatctcacagttcattattatgtatagtttggacggcaagaagtggcaaacttatagaggtaacagtactggaacagacatggtgttcttcggcaacgttgatagctctggcatcaaacacaacatctttaatcctcccataatagctcggtacatcagattgcatccgacccactacagcattaggagtacactccgaatggagcttatgggttgcgacttgaattcctgttcaatgccactcggaatggagtctaaagccatctctgatgcacagataaccgccagtagctactttacgaacatgtttgctacgtggtcaccctctaaggcaaggcttcatttgcaaggccggtctaatgcctggagacctcaggtgaacaacccgaaagaatggctccaggtggactttcagaagaccatgaaagtaacaggtgtcactactcagggagttaagtccttggatactagcatgtatgtgaaggagttccttatttcctcatcacaagatggccaccagtggaccctcttctttcagaatggtaaggtcaaagtgtttcagggcaatcaagacagcttcacacccgtggtgaacagtcttgatcctccactcttgacacgataccttcgaatccatccacagtcttgggagcaccagattgcattgcgcatggaagtacttggatgcgaggctcaggacctctac

SEQ ID NO: 2156 - protein, 1457 aa, synthetic construct
  REGION 1..1457: note = Variant of human B-domain deleted Factor VIII
MQIELSTCFFLCLLRFCFSATRRYYLGAVELSWDYMQSDLGELPVDARFPPRVPKSFPFNTSQVYKKTLFVEFTDHLFNIAKPRPPWMGLLGPTIQAEVYDTVVITLKNMASHPVSLHAVGVSYWKASEGAEYDDQTSQREKEDDKVFPGGSHTYVWQVLKENGPMASDPPCLTYSYLSHVDLVKDLNSGLIGALLVCREGSLAKEKTQTLAKFILLFAVFDEGKSWHSETKNSLMQDRDAASARAWPKMHTVNGYVNRTLPGLIGCHRKSVYWHVIGMGTTPEVHSIFLEGHTFLVRNHRQASLGISPITFLTAQTGLRDLGQFLLFCHIPSHQHDGMEAYVKVDSCPEEPQLRMKNNEEAEDYDDDLTDSEMDVVRFDDDNSPSIIQARSGAKKHPKTWVHYIAAEEEDWDYAPLVLAPDDRSYKSQYLNNGPQRIGRKYKKVRFMAYTDETFKTREAIQHESGILGPLLYGEVGDTLLIIFKNQASRPYNIYPHGITDVRPLYSRRLPKGVKHLKDFPILPGEIFKYKWTITVEDGPTKSDPRCLTRYYSSFVNWERDLASGLIGPLLICYKESVDQRGNQIMSDKRNVILFSVFDENRSWYLTENIQRFLPNPAGVQLEDPEFQASNIMHSINGYVFDSLQLSVCLHEVAYWYILSIGAQTDFLSVFFSGYTFKHKGVYEDTLTLFPFSGETVFMSMENPGLWILGCHNSDFRNRGMTALLKVSSCDWNTGDYEEDSYEDISAYFDSKNNAIEPRSFSQNPPVLKRHQREGTRTTLQSDQEEIDYDDTISVEMKKEDFDIYDEDGNQSPRSFQKKTRHYFIAAVERLWDYGMSSSPHVLRNRAQSGSVPQFKKVVFQEFTDGSFTQPLYRGELNEHLGLLGPYIRAEVEDNIMVTFRNQASRPYSFYSSLISYEEDQRQGAEPRKNFVKPNETKTYFWKVQHHMAPTKDEFDCKAWAYFSDVDLEKDVHSGLIGPLLVCHTNTLNPAHGRQVTVQEFALFFTIFDETKSWYFTENMERNCRAPCNIQMEDPTFKENYRFHAINGYIMDTLPGLVMAQDQRIRWYLLSMGSNENIHSIHFSGHVFTVRKGEEYKMALYNLYPGVFETVEMLPSKAGIWRVECLIGEHLHAGMSTLFLVYSNKCQNPLGMASGHIRDFQITASGQYGQWAPKLARLHYSGSINAWSTKEPFSWIKVDLLAPMIIHGIKTQGARQKFSSLYISQFIIMYSLDGKKWQTYRGNSTGTDMVFFGNVDSSGIKHNIFNPPIIARYIRLHPTHYSIRSTLRMELMGCDLNSCSMPLGMESKAISDAQITASSYFTNMFATWSPSKARLHLQGRSNAWRPQVNNPKEWLQVDFQKTMKVTGVTTQGVKSLDTSMYVKEFLISSSQDGHQWTLFFQNGKVKVFQGNQDSFTPVVNSLDPPLLTRYLRIHPQSWEHQIALRMEVLGCEAQDLY

SEQ ID NO: 2157 - DNA, 4371 bp, synthetic construct
  misc_feature 1..4371: note = Variant of human B-domain deleted Factor VIII
  source 1..4371: mol_type = other DNA
atgcagattgaactgtctacctgcttcttcctctgtttgctgaggttctgctttagcgccactagacggtactaccttggcgctgtggagctgtcctgggactatatgcagagtgatttgggagagcttcccgtcgacgcacgatttcctcctcgcgttccaaagtcatttccctttaacacaagccaggtgtacaagaagacgctcttcgtcgaattcaccgatcacctgttcaatatcgccaaacccagaccaccatggatgggtcttttggggcctaccatacaagcggaggtgtatgacacagttgttatcactctcaagaacatggcttctcatccggtaagtcttcacgcagtgggcgtgtcctactggaaagcttcagaaggagccgagtatgatgatcagacatcccagagggagaaagaagacgacaaggtatttccaggtgggtctcatacctatgtgtggcaagtgctcaaagagaatggccctatggcaagcgatccgccgtgtttgacttacagctacctttcacacgttgacctcgtcaaggacctcaactccgggttgattggagccttgttggtatgcagggaaggatctcttgccaaagagaagacacagaccctggccaagtttatccttctctttgctgtgttcgatgagggcaaaagttggcatagcgaaacgaagaattccctcatgcaggatcgcgacgcagccagcgccagagcttggcccaagatgcacactgtgaacggatatgtcaataggacgcttcctggcttgattgggtgtcatcggaaaagtgtctactggcacgtgatcggaatggggacaacaccagaggtccactccatatttctcgaaggccataccttccttgttcgaaaccacagacaggcatccttggggatctctcccattacctttctcactgcccaaacgggtcttcgtgacttgggtcagttccttctcttttgccatatcccgtcacaccagcatgatggtatggaagcttatgtgaaagtagacagttgtcctgaggagccacagttgcgcatgaagaataatgaagaagccgaggattacgacgacgatctcaccgattctgagatggacgtggtgaggtttgatgacgacaactctccctccatcattcaagctcggagcggggcgaagaaacaccccaagacttgggtccactatatagcggcggaagaggaggattgggattacgctcctcttgtattggcaccagatgaccgctcatacaaaagccagtacctcaacaacggaccgcagagaattggccggaagtataagaaagtgcgatttatggcctatacagacgaaacctttaagacaagggaggccatccagcatgagagtgggattttgggacctcttctttacggcgaagttggtgataccctcctcatcatcttcaagaatcaagcttctcgcccctataacatttacccacacgggatcactgacgttaggcctttgtatagcagaagacttcccaaaggcgtgaagcatctcaaagacttccccattttgccaggcgagatctttaagtacaaatggaccattacagtggaagatggaccgactaaatcggaccctcgatgccttacgcggtactattcctccttcgtgaattgggagagagatttggcaagcggactcataggaccactcctcatctgttacaaggaatctgtagaccagaggggtaaccagattatgagtgataaacgcaatgtgatcctttttagcgtcttcgacgagaaccggtcctggtacttgaccgagaatatacaaaggttccttcccaaccccgcaggcgttcagttggaagaccctgagtttcaggccagcaatattatgcactcaatcaacggctatgtgtttgatagtctccagctttctgtttgcctccatgaagtagcctattggtacatcttgtcaattggtgctcaaacagacttcctctccgtcttcttctccggctacacctttaagcacaagggggtgtatgaggacactctcacactctttccattttctggagaaaccgtgttcatgagcatggagaatccaggcctttggatcttgggttgccacaacagtgattttcgcaatcggggaatgactgctctcctcaaagtcagcagctgtgattggaacacaggcgactatgaggaagattcttacgaggacataagtgcctactttgactccaagaataacgccattgagcccagatcattctcccagaatcctcccgtgcttaaaaggcatcagcgcgaaggtaccagaactactcttcagtctgatcaagaggagattgactatgacgacaccattagcgtggaaatgaagaaggaggatttcgatatctatgacgaagatgggaaccagtctccgcggagctttcagaagaagacgcgacactacttcattgcagcagtcgaaaggctttgggactacggtatgtcatcatcccctcatgtgttgcgcaatagagctcagagtggaagtgttccacagttcaagaaagtcgtctttcaagagtttacagatggcagcttcacacagcctctctatcggggcgagcttaacgaacatttgggactccttggtccctatatccgagccgaagtggaggacaacattatggttacctttaggaatcaagcctctcgcccctacagcttctactcctccctcatcagttatgaggaggatcagagacaaggcgctgaaccacggaagaactttgtgaaaccgaatgagacgaagacctacttctggaaagtacagcaccacatggcccccacaaaagacgaattcgattgcaaagcatgggcgtatttttcagacgttgacttggagaaagatgtacattcaggacttattggtcctttgttggtgtgtcacactaacactctcaatccagcccatggcaggcaggtgacagtccaggaattcgctcttttctttaccatctttgatgagaccaagtcctggtacttcacggaaaacatggagcgcaattgcagagccccctgtaacatacagatggaggaccctacctttaaggaaaattatcggttccacgcaatcaacggatacattatggatacactccctggccttgtgatggctcaggaccaacgaatcaggtggtacctcctcagcatgggttctaatgagaacatacactccattcacttttcaggacatgtgttcactgtccggaagggtgaagagtataagatggccctctacaatttgtatccaggcgtgtttgagaccgttgaaatgcttcccatcaaagctggcatctggagagtagagtgcttgatcggagaacatcttcacgcaggtatgagcaccttgttcctcgtgtacagcaacaaatgtcagaatccacttggcatggccagtggacacattcgcgactttcagatcacagcatctggccagtatggacaatgggccccaaagttggctcgcctccattactccggtagcataaatgcgtggtccactaaagaacctttcagctggattaaggtcgatcttcttgcccccatgatcatccacggcattaagacacagggagcgaggcagaaattctcctccctctacatctcacagttcattattatgtatagtttggacggcaagaagtggcaaacttatagaggtaacagtactggaacagacatggtgttcttcggcaacgttgatagctctggcatcaaacacaacatctttaatcctcccataatagctcggtacatcagattgcatccgacccactacagcattaggagtacactccgaatggagcttatgggttgcgacttgaattcctgttcaatgccactcggaatggagtctaaagccatctctgatgcacagataaccgccagtagctactttacgaacatgtttgctacgtggtcaccctctaaggcaaggcttcatttgcaaggccggtctaatgcctggagacctcaggtgaacaacccgaaagaatggctccaggtggactttcagaagaccatgaaagtaacaggtgtcactactcagggagttaagtccttggatactagcatgtatgtgaaggagttccttatttcctcatcacaagatggccaccagtggaccctcttctttcagaatggtaaggtcaaagtgtttcagggcaatcaagacagcttcacacccgtggtgaacagtcttgatcctccactcttgacacgataccttcgaatccatccacagtcttgggagcaccagattgcattgcgcatggaagtacttggatgcgaggctcaggacctctac

SEQ ID NO: 2158 - protein, 1457 aa, synthetic construct
  REGION 1..1457: note = Variant of human B-domain deleted Factor VIII
MQIELSTCFFLCLLRFCFSATRRYYLGAVELSWDYMQSDLGELPVDARFPPRVPKSFPFNTSQVYKKTLFVEFTDHLFNIAKPRPPWMGLLGPTIQAEVYDTVVITLKNMASHPVSLHAVGVSYWKASEGAEYDDQTSQREKEDDKVFPGGSHTYVWQVLKENGPMASDPPCLTYSYLSHVDLVKDLNSGLIGALLVCREGSLAKEKTQTLAKFILLFAVFDEGKSWHSETKNSLMQDRDAASARAWPKMHTVNGYVNRTLPGLIGCHRKSVYWHVIGMGTTPEVHSIFLEGHTFLVRNHRQASLGISPITFLTAQTGLRDLGQFLLFCHIPSHQHDGMEAYVKVDSCPEEPQLRMKNNEEAEDYDDDLTDSEMDVVRFDDDNSPSIIQARSGAKKHPKTWVHYIAAEEEDWDYAPLVLAPDDRSYKSQYLNNGPQRIGRKYKKVRFMAYTDETFKTREAIQHESGILGPLLYGEVGDTLLIIFKNQASRPYNIYPHGITDVRPLYSRRLPKGVKHLKDFPILPGEIFKYKWTITVEDGPTKSDPRCLTRYYSSFVNWERDLASGLIGPLLICYKESVDQRGNQIMSDKRNVILFSVFDENRSWYLTENIQRFLPNPAGVQLEDPEFQASNIMHSINGYVFDSLQLSVCLHEVAYWYILSIGAQTDFLSVFFSGYTFKHKGVYEDTLTLFPFSGETVFMSMENPGLWILGCHNSDFRNRGMTALLKVSSCDWNTGDYEEDSYEDISAYFDSKNNAIEPRSFSQNPPVLKRHQREGTRTTLQSDQEEIDYDDTISVEMKKEDFDIYDEDGNQSPRSFQKKTRHYFIAAVERLWDYGMSSSPHVLRNRAQSGSVPQFKKVVFQEFTDGSFTQPLYRGELNEHLGLLGPYIRAEVEDNIMVTFRNQASRPYSFYSSLISYEEDQRQGAEPRKNFVKPNETKTYFWKVQHHMAPTKDEFDCKAWAYFSDVDLEKDVHSGLIGPLLVCHTNTLNPAHGRQVTVQEFALFFTIFDETKSWYFTENMERNCRAPCNIQMEDPTFKENYRFHAINGYIMDTLPGLVMAQDQRIRWYLLSMGSNENIHSIHFSGHVFTVRKGEEYKMALYNLYPGVFETVEMLPIKAGIWRVECLIGEHLHAGMSTLFLVYSNKCQNPLGMASGHIRDFQITASGQYGQWAPKLARLHYSGSINAWSTKEPFSWIKVDLLAPMIIHGIKTQGARQKFSSLYISQFIIMYSLDGKKWQTYRGNSTGTDMVFFGNVDSSGIKHNIFNPPIIARYIRLHPTHYSIRSTLRMELMGCDLNSCSMPLGMESKAISDAQITASSYFTNMFATWSPSKARLHLQGRSNAWRPQVNNPKEWLQVDFQKTMKVTGVTTQGVKSLDTSMYVKEFLISSSQDGHQWTLFFQNGKVKVFQGNQDSFTPVVNSLDPPLLTRYLRIHPQSWEHQIALRMEVLGCEAQDLY

SEQ ID NO: 2159 - DNA, 4371 bp, synthetic construct
  misc_feature 1..4371: note = Variant of human B-domain deleted Factor VIII
  source 1..4371: mol_type = other DNA
atgcagattgaactgtctacctgcttcttcctctgtttgctgaggttctgctttagcgccactagacggtactaccttggcgctgtggagctgtcctgggactatatgcagagtgatttgggagagcttcccgtcgacgcacgatttcctcctcgcgttccaaagtcatttccctttaacacaagccaggtgtacaagaagacgctcttcgtcgaattcaccgatcacctgttcaatatcgccaaacccagaccaccatggatgggtcttttggggcctaccatacaagcggaggtgtatgacacagttgttatcactctcaagaacatggcttctcatccggtaagtcttcacgcagtgggcgtgtcctactggaaagcttcagaaggagccgagtatgatgatcagacatcccagagggagaaagaagacgacaaggtatttccaggtgggtctcatacctatgtgtggcaagtgctcaaagagaatggccctatggcaagcgatccgccgtgtttgacttacagctacctttcacacgttgacctcgtcaaggacctcaactccgggttgattggagccttgttggtatgcagggaaggatctcttgccaaagagaagacacagaccctggccaagtttatccttctctttgctgtgttcgatgagggcaaaagttggcatagcgaaacgaagaattccctcatgcaggatcgcgacgcagccagcgccagagcttggcccaagatgcacactgtgaacggatatgtcaataggacgcttcctggcttgattgggtgtcatcggaaaagtgtctactggcacgtgatcggaatggggacaacaccagaggtccactccatatttctcgaaggccataccttccttgttcgaaaccacagacaggcatccttggggatctctcccattacctttctcactgcccaaacgggtcttcgtgacttgggtcagttccttctcttttgccatatcccgtcacaccagcatgatggtatggaagcttatgtgaaagtcgacagttgtcctgaggagccacagttgcgcatgaagaataatgaagaagccgaggattacgacgacgatctcaccgattctgagatggacgtggtgaggtttgatgacgacaactctccctccatcattcaagctcggagcggggcgaagaaacaccccaagacttgggtccactatatagcggcggaagaggaggattgggattacgctcctcttgtattggcaccagatgaccgctcatacaaaagccagtacctcaacaacggaccgcagagaattggccggaagtataagaaagtgcgatttatggcctatacagacgaaacctttaagacaagggaggccatccagcatgagagtgggattttgggacctcttctttacggcgaagttggtgataccctcctcatcatcttcaagaatcaagcttctcgcccctataacatttacccacacgggatcactgacgttaggcctttgtatagcagaagacttcccaaaggcgtgaagcatctcaaagacttccccattttgccaggcgagatctttaagtacaaatggaccattacagtggaagatggaccgactaaatcggaccctcgatgccttacgcggtactattcctccttcgtgaattgggagagagatttggcaagcggactcataggaccactcctcatctgttacaaggaatctgtagaccagaggggtaaccagattatgagtgataaacgcaatgtgatcctttttagcgtcttcgacgagaaccggtcctggtacttgaccgagaatatacaaaggttccttcccaaccccgcaggcgttcagttggaagaccctgagtttcaggccagcaatattatgcactcaatcaacggctatgtgtttgatagtctccagctttctgtttgcctccatgaagtagcctattggtacatcttgtcaattggtgctcaaacagacttcctctccgtcttcttctccggctacacctttaagcacaagggggtgtatgaggacactctcacactctttccattttctggagaaaccgtgttcatgagcatggagaatccaggcctttggatcttgggttgccacaacagtgattttcgcaatcggggaatgactgctctcctcaaagtcagcagctgtgattggaacacaggcgactatgaggaagattcttacgaggacataagtgcctactttgactccaagaataacgccattgagcccagatcattctcccagaatcctcccgtgcttaaaaggcatcagcgcgaaggtaccagaactactcttcagtctgatcaagaggagattgactatgacgacaccattagcgtggaaatgaagaaggaggatttcgatatctatgacgaagatgggaaccagtctccgcggagctttcagaagaagacgcgacactacttcattgcagcagtcgaaaggctttgggactacggtatgtcatcatcccctcatgtgttgcgcaatagagctcagagtggaagtgttccacagttcaagaaagtcgtctttcaagagtttacagatggcagcttcacacagcctctctatcggggcgagcttaacgaacatttgggactccttggtccctatatccgagccgaagtggaggacaacattatggttacctttaggaatcaagcctctcgcccctacagcttctactcctccctcatcagttatgaggaggatcagagacaaggcgctgaaccacggaagaactttgtgaaaccgaatgagacgaagacctacttctggaaagtacagcaccacatggcccccacaaaagacgaattcgattgcaaagcatgggcgtatttttcagacgttgacttggagaaagatgtacattcaggacttattggtcctttgttggtgtgtcacactaacactctcaatccagcccatggcaggcaggtgacagtccaggaattcgctcttttctttaccatctttgatgagaccaagtcctggtacttcacggaaaacatggagcgcaattgcagagccccctgtaacatacagatggaggaccctacctttaaggaaaattatcggttccacgcaatcaacggatacattatggatacactccctggccttgtgatggctcaggaccaacgaatcaggtggtacctcctcagcatgggttctaatgagaacatacactccattcacttttcaggacatgtgttcactgtccggaagaaagaagagtataagatggccctctacaatttgtatccaggcgtgtttgagaccgttgaaatgcttcccatcaaagctggcatctggagagtagagtgcttgatcggagaacatcttcacgcaggtatgagcaccttgttcctcgtgtacagcaacaaatgtcagaatccacttggcatggccagtggacacattcgcgactttcagatcacagcatctggccagtatggacaatgggccccaaagttggctcgcctccattactccggtagcataaatgcgtggtccactaaagaacctttcagctggattaaggtcgatcttcttgcccccatgatcatccacggcattaagacacagggagcgaggcagaaattctcctccctctacatctcacagttcattattatgtatagtttggacggcaagaagtggcaaacttatagaggtaacagtactggaacagacatggtgttcttcggcaacgttgatagctctggcatcaaacacaacatctttaatcctcccataatagctcggtacatcagattgcatccgacccactacagcattaggagtacactccgaatggagcttatgggttgcgacttgaattcctgttcaatgccactcggaatggagtctaaagccatctctgatgcacagataaccgccagtagctactttacgaacatgtttgctacgtggtcaccctctaaggcaaggcttcatttgcaaggccggtctaatgcctggagacctcaggtgaacaacccgaaagaatggctccaggtggactttcagaagaccatgaaagtaacaggtgtcactactcagggagttaagtccttggatactagcatgtatgtgaaggagttccttatttcctcatcacaagatggccaccagtggaccctcttctttcagaatggtaaggtcaaagtgtttcagggcaatcaagacagcttcacacccgtggtgaacagtcttgatcctccactcttgacacgataccttcgaatccatccacagtcttgggagcaccagattgcattgcgcatggaagtacttggatgcgaggctcaggacctctac

SEQ ID NO: 2160 - protein, 1457 aa, synthetic construct
  REGION 1..1457: note = Variant of human B-domain deleted Factor VIII
MQIELSTCFFLCLLRFCFSATRRYYLGAVELSWDYMQSDLGELPVDARFPPRVPKSFPFNTSQVYKKTLFVEFTDHLFNIAKPRPPWMGLLGPTIQAEVYDTVVITLKNMASHPVSLHAVGVSYWKASEGAEYDDQTSQREKEDDKVFPGGSHTYVWQVLKENGPMASDPPCLTYSYLSHVDLVKDLNSGLIGALLVCREGSLAKEKTQTLAKFILLFAVFDEGKSWHSETKNSLMQDRDAASARAWPKMHTVNGYVNRTLPGLIGCHRKSVYWHVIGMGTTPEVHSIFLEGHTFLVRNHRQASLGISPITFLTAQTGLRDLGQFLLFCHIPSHQHDGMEAYVKVDSCPEEPQLRMKNNEEAEDYDDDLTDSEMDVVRFDDDNSPSIIQARSGAKKHPKTWVHYIAAEEEDWDYAPLVLAPDDRSYKSQYLNNGPQRIGRKYKKVRFMAYTDETFKTREAIQHESGILGPLLYGEVGDTLLIIFKNQASRPYNIYPHGITDVRPLYSRRLPKGVKHLKDFPILPGEIFKYKWTITVEDGPTKSDPRCLTRYYSSFVNWERDLASGLIGPLLICYKESVDQRGNQIMSDKRNVILFSVFDENRSWYLTENIQRFLPNPAGVQLEDPEFQASNIMHSINGYVFDSLQLSVCLHEVAYWYILSIGAQTDFLSVFFSGYTFKHKGVYEDTLTLFPFSGETVFMSMENPGLWILGCHNSDFRNRGMTALLKVSSCDWNTGDYEEDSYEDISAYFDSKNNAIEPRSFSQNPPVLKRHQREGTRTTLQSDQEEIDYDDTISVEMKKEDFDIYDEDGNQSPRSFQKKTRHYFIAAVERLWDYGMSSSPHVLRNRAQSGSVPQFKKVVFQEFTDGSFTQPLYRGELNEHLGLLGPYIRAEVEDNIMVTFRNQASRPYSFYSSLISYEEDQRQGAEPRKNFVKPNETKTYFWKVQHHMAPTKDEFDCKAWAYFSDVDLEKDVHSGLIGPLLVCHTNTLNPAHGRQVTVQEFALFFTIFDETKSWYFTENMERNCRAPCNIQMEDPTFKENYRFHAINGYIMDTLPGLVMAQDQRIRWYLLSMGSNENIHSIHFSGHVFTVRKKEEYKMALYNLYPGVFETVEMLPIKAGIWRVECLIGEHLHAGMSTLFLVYSNKCQNPLGMASGHIRDFQITASGQYGQWAPKLARLHYSGSINAWSTKEPFSWIKVDLLAPMIIHGIKTQGARQKFSSLYISQFIIMYSLDGKKWQTYRGNSTGTDMVFFGNVDSSGIKHNIFNPPIIARYIRLHPTHYSIRSTLRMELMGCDLNSCSMPLGMESKAISDAQITASSYFTNMFATWSPSKARLHLQGRSNAWRPQVNNPKEWLQVDFQKTMKVTGVTTQGVKSLDTSMYVKEFLISSSQDGHQWTLFFQNGKVKVFQGNQDSFTPVVNSLDPPLLTRYLRIHPQSWEHQIALRMEVLGCEAQDLY

SEQ ID NO: 2161 - DNA, 4371 bp, synthetic construct
  misc_feature 1..4371: note = Variant of human B-domain deleted Factor VIII
  source 1..4371: mol_type = other DNA
atgcagattgaactgtctacctgcttcttcctctgtttgctgaggttctgctttagcgccactagacggtactaccttggcgctgtggagctgtcctgggactatatgcagagtgatttgggagagcttcccgtcgacgcacgatttcctcctcgcgttccaaagtcatttccctttaacacaagccaggtgtacaagaagacgctcttcgtcgaattcaccgatcacctgttcaatatcgccaaacccagaccaccatggatgggtcttttggggcctaccatacaagcggaggtgtatgacacagttgttatcactctcaagaacatggcttctcatccggtaagtcttcacgcagtgggcgtgtcctactggaaagcttcagaaggagccgagtatgatgatcagacatcccagagggagaaagaagacgacaaggtatttccaggtgggtctcatacctatgtgtggcaagtgctcaaagagaatggccctatggccagcgatccgccgtgtttgacttacagctacctttcacacgttgacctcgtcaaggacctcaactccgggttgattggagccttgttggtatgcagggaaggatctcttgccaaagagaagacacagaccctggccaagtttatccttctctttgctgtgttcgatgagggcaaaagttggcatagcgaaacgaagaattccctcatgcaggatcgcgacgcagccagcgccagagcttggcccaagatgcacactgtgaacggatatgtcaataggacgcttcctggcttgattgggtgtcatcggaaaagtgtctactggcacgtgatcggaatggggacaacaccagaggtccactccatatttctcgaaggccataccttccttgttcgaaaccacagacaggcatccttggggatctctcccattacctttctcactgcccaaacgctgcttcgtgacttgggtcagttccttctcttttgccatatcccgtcacaccagcatgatggtatggaagcttatgtgaaagtcgacagttgtcctgaggagccacagttgcgcatgaagaataatgaagaagccgaggattacgacgacgatctcaccgattctgagatggacgtggtgaggtttgatgacgacaactctccctccatcattcaagctcggagcggggcgaagaaacaccccaagacttgggtccactatatagcggcggaagaggaggattgggattacgctcctcttgtattggcaccagatgaccgctcatacaaaagccagtacctcaacaacggaccgcagagaattggccggaagtataagaaagtgcgatttatggcctatacagacgaaacctttaagacaagggaggccatccagcatgagagtgggattttgggacctcttctttacggcgaagttggtgataccctcctcatcatcttcaagaatcaagcttctcgcccctataacatttacccacacgggatcactgacgttaggcctttgtatagcagaagacttcccaaaggcgtgaagcatctcaaagacttccccattttgccaggcgagatctttaagtacaaatggaccattacagtggaagatggaccgactaaatcggaccctcgatgccttacgcggtactattcctccttcgtgaattgggagagagatttggcaagcggactcataggaccactcctcatctgttacaaggaatctgtagaccagaggggtaaccagattatgagtgataaacgcaatgtgatcctttttagcgtcttcgacgagaaccggtcctggtacttgaccgagaatatacaaaggttccttcccaaccccgcaggcgttcagttggaagaccctgagtttcaggccagcaatattatgcactcaatcaacggctatgtgtttgatagtctccagctttctgtttgcctccatgaagtagcctattggtacatcttgtcaattggtgctcaaacagacttcctctccgtcttcttctccggctacacctttaagcacaagggcgtgtatgaggacactctcacactctttccattttctggagaaaccgtgttcatgagtatggagaatccaggcctttggatcttgggttgccacaacagtgattttcgcaatcggggaatgactgctctcctcaaagtcagcagctgtgattggaacacaggcgactatgaggaagattcttacgaggacataagtgcctactttgactccaagaataacgccattgagcccagatcattctcccagaatcctcccgtgcttaaaaggcatcagcgcgaaggtaccagaactactcttcagtctgatcaagaggagattgactatgacgacaccattagcgtggaaatgaagaaggaggatttcgatatctatgacgaagatgagaaccagtctccgcggagctttcagaagaagacgcgacactacttcattgcagcagtcgaaaggctttgggactacggtatgtcatcatcccctcatgtgttgcgcaatagagctcagagtggaagtgttccacagttcaagaaagtcgtctttcaagagtttacagatggcagcttcacacagcctctctatcggggcgagcttaacgaacatttgggactccttggtccctatatccgagccgaagtggaggacaacattatggttacctttaggaatcaagcctctcgcccctacagcttctactcctccctcatcagttatgaggaggatcagagacaaggcgctgaaccacggaagaactttgtgaaaccgaatgagacgaagacctacttctggaaagtacagcaccacatggcccccacaaaagacgaattcgattgcaaagcatgggcgtatttttcagacgttgacttggagaaagatgtacattcaggacttattggtcctttgttggtgtgtcacactaacactctcaatccagcccatggcaggcaggtgacagtccaggaattcgctcttttctttaccatctttgatgagaccaagtcctggtacttcacggaaaacatggagcgcaattgcagagccccctgtaacatacagatggaggaccctacctttaaggaaaattatcggttccacgcaatcaacggatacattatggatacactccctggccttgtgatggctcaggaccaacgaatcaggtggtacctcctcagcatgggttctaatgaaaacatacactccattcacttttcaggacatgtgttcactgtccggaagaaagaagagtataagatggccctctacaatttgtatccaggcgtgtttgagaccgttgaaatgcttccctctaaagctggcatctggagagtagagtgcttgatcggagaacatcttcacgcaggtatgagcaccttgttcctcgtgtacagcaacaaatgtcagaatccacttggcatggccagtggacacattcgcgactttcagatcacagcatctggccagtatggacaatgggccccaaagttggctcgcctccattactccggtagcataaatgcgtggtccactaaagaacctttcagctggattaaggtcgatcttcttgcccccatgatcatccacggcattaagacacagggagcgaggcagaaattctcctccctctacatctcacagttcattattatgtatagtttggacggcaagaagtggcaaacttatagaggtaacagtactggaacagacatggtgttcttcggcaacgttgatagctctggcatcaaacacaacatctttaatcctcccataatagctcggtacatcagattgcatccgacccactacagcattaggagtacactccgaatggagcttatgggttgcgacttgaattcctgttcaatgccactcggaatggagtctaaagccatctctgatgcacagataaccgccagtagctactttacgaacatgtttgctacgtggtcaccctctaaggcaaggcttcatttgcaaggccggtctaatgcctggagacctcaggtgaacaacccgaaagaatggctccaggtggactttcagaagaccatgaaagtaacaggtgtcactactcagggagttaagtccttggatactagcatgtatgtgaaggagttccttatttcctcatcacaagatggccaccagtggaccctcttctttcagaatggtaaggtcaaagtgtttcagggcaatcaagacagcttcacacccgtggtgaacagtcttgatcctccactcttgacacgataccttcgaatccatccacagtcttgggagcaccagattgcattgcgcatggaagtacttggatgcgaggctcaggacctctac

SEQ ID NO: 2162 - protein, 1457 aa, synthetic construct; identical to SEQ ID NO: 1674
  REGION 1..1457: note = Variant of human B-domain deleted Factor VIII

SEQ ID NO: 2163 - DNA, 4371 bp, synthetic construct
  misc_feature 1..4371: note = Variant of human B-domain deleted Factor VIII
  source 1..4371: mol_type = other DNA
atgcagattgaactgtctacctgcttcttcctctgtttgctgaggttctgctttagcgccactagacggtactaccttggcgctgtggagctgtcctgggactatatgcagagtgatttgggagagcttcccgtcgacgcacgatttcctcctcgcgttccaaagtcatttccctttaacacaagccaggtgtacaagaagacgctcttcgtcgaattcaccgatcacctgttcaatatcgccaaacccagaccaccatggatgggtcttttggggcctaccatacaagcggaggtgtatgacacagttgttatcactctcaagaacatggcttctcatccggtaagtcttcacgcagtgggcgtgtcctactggaaagcttcagaaggagccgagtatgatgatcagacatcccagagggagaaagaagacgacaaggtatttccaggtgggtctcatacctatgtgtggcaagtgctcaaagagaatggccctatggccagcgatccgccgtgtttgacttacagctacctttcacacgttgacctcgtcaaggacctcaactccgggttgattggagccttgttggtatgcagggaaggatctcttgccaaagagaagacacagaccctggccaagtttatccttctctttgctgtgttcgatgagggcaaaagttggcatagcgaaacgaagaattccctcatgcaggatcgcgacgcagccagcgccagagcttggcccaagatgcacactgtgaacggatatgtcaataggacgcttcctggcttgattgggtgtcatcggaaaagtgtctactggcacgtgatcggaatggggacaacaccagaggtccactccatatttctcgaaggccataccttccttgttcgaaaccacagacaggcatccttggggatctctcccattacctttctcactgcccaaacgctgcttcgtgacttgggtcagttccttctcttttgccatatcccgtcacaccagcatgatggtatggaagcttatgtgaaagtcgacagttgtcctgaggagccacagttgcgcatgaagaataatgaagaagccgaggattacgacgacgatctcaccgattctgagatggacgtggtgaggtttgatgacgacaactctccctccatcattcaagctcggagcggggcgaagaaacaccccaagacttgggtccactatatagcggcggaagaggaggattgggattacgctcctcttgtattggcaccagatgaccgctcatacaaaagccagtacctcaacaacggaccgcagagaattggccggaagtataagaaagtgcgatttatggcctatacagacgaaacctttaagacaagggaggccatccagcatgagagtgggattttgggacctcttctttacggcgaagttggtgataccctcctcatcatcttcaagaatcaagcttctcgcccctataacatttacccacacgggatcactgacgttaggcctttgtatagcagaagacttcccaaaggcgtgaagcatctcaaagacttccccattttgccaggcgagatctttaagtacaaatggaccattacagtggaagatggaccgactaaatcagaccctcgatgccttacgcggtactattcctccttcgtgaattgggagagagatttggcaagcggactcataggaccactcctcatctgttacaaggaatctgtagaccagaggggtaaccagattatgagtgataaacgcaatgtgatcctttttagcgtcttcgacgagaaccggtcctggtacttgaccgagaatatacaaaggttccttcccaaccccgcaggcgttcagttggaagaccctgagtttcaggccagcaatattatgcactcaatcaacggctatgtgtttgatagtctccagctttctgtttgcctccatgaagtagcctattggtacatcttgtcaattggtgctcaaacagacttcctctccgtcttcttctccggctacacctttaagcacaagggcgtgtatgaggacactctcacactctttccattttctggagaaaccgtgttcatgagcatggagaatccaggcctttggatcttgggttgccacaacagtgattttcgcaatcggggaatgactgctctcctcaaagtcagcagctgtgattggaacacaggcgactatgaggaagattcttacgaggacataagtgcctactttgactccaagaataacgccattgagcccagatcattctcccagaatcctcccgtgcttaaaaggcatcagcgcgaaggtaccagaactactcttcagtctgatcaagaggagattgactatgacgacaccattagcgtggaaatgaagaaggaggatttcgatatctatgacgaagatgagaaccagtctccgcggagctttcagaagaagacgcgacactacttcattgcagcagtcgaaaggctttgggactacggtatgtcatcatcccctcatgtgttgcgcaatagagctcagagtggaagtgttccacagttcaagaaagtcgtctttcaagagtttacagatggcagcttcacacagcctctctatcggggcgagcttaacgaacatttgggactccttggtccctatatccgagccgaagtggaggacaacattatggttacctttaggaatcaagcctctcgcccctacagcttctactcctccctcatcagttatgaggaggatcagagacaaggcgctgaaccacggaagaactttgtgaaaccgaatgagacgaagacctacttctggaaagtacagcaccacatggcccccacaaaagacgaattcgattgcaaagcatgggcgtatttttcagacgttgacttggagaaagatgtacattcaggacttattggtcctttgttggtgtgtcacactaacactctcaatccagcccatggcaggcaggtgacagtccaggaattcgctcttttctttaccatctttgatgagaccaagtcctggtacttcacggaaaacatggagcgcaattgcagagccccctgtaacatacagatggaggaccctacctttaaggaaaattatcggttccacgcaatcaacggatacattatggatacactccctggccttgtgatggctcaggaccaacgaatcaggtggtacctcctcagcatgggttctaatagtaacatacactccattcacttttcaggacatgtgttcactgtccggaagaaagaagagtataagatggccctctacaatttgtatccaggcgtgtttgagaccgttgaaatgcttccctctaaagctggcatctggagagtagagtgcttgatcggagaacatcttcacgcaggtatgagcaccttgttcctcgtgtacagcaacaaatgtcagaatccacttggcatggccagtggacacattcgcgactttcagatcacagcatctggccagtatggacaatgggccccaaagttggctcgcctccattactccggtagcataaatgcgtggtccactaaagaacctttcagctggattaaggtcgatcttcttgcccccatgatcatccacggcattaagacacagggagcgaggcagaaattctcctccctctacatctcacagttcattattatgtatagtttggacggcaagaagtggcaaacttatagaggtaacagtactggaacagacatggtgttcttcggcaacgttgatagctctggcatcaaacacaacatctttaatcctcccataatagctcggtacatcagattgcatccgacccactacagcattaggagtacactccgaatggagcttatgggttgcgacttgaattcctgttcaatgccactcggaatggagtctaaagccatctctgatgcacagataaccgccagtagctactttacgaacatgtttgctacgtggtcaccctctaaggcaaggcttcatttgcaaggccggtctaatgcctggagacctcaggtgaacaacccgaaagaatggctccaggtggactttcagaagaccatgaaagtaacaggtgtcactactcagggagttaagtccttggatactagcatgtatgtgaaggagttccttatttcctcatcacaagatggccaccagtggaccctcttctttcagaatggtaaggtcaaagtgtttcagggcaatcaagacagcttcacacccgtggtgaacagtcttgatcctccactcttgacacgataccttcgaatccatccacagtcttgggagcaccagattgcattgcgcatggaagtacttggatgcgaggctcaggacctctac

SEQ ID NO: 2164 - protein, 1457 aa, synthetic construct
  REGION 1..1457: note = Variant of human B-domain deleted Factor VIII
MQIELSTCFFLCLLRFCFSATRRYYLGAVELSWDYMQSDLGELPVDARFPPRVPKSFPFNTSQVYKKTLFVEFTDHLFNIAKPRPPWMGLLGPTIQAEVYDTVVITLKNMASHPVSLHAVGVSYWKASEGAEYDDQTSQREKEDDKVFPGGSHTYVWQVLKENGPMASDPPCLTYSYLSHVDLVKDLNSGLIGALLVCREGSLAKEKTQTLAKFILLFAVFDEGKSWHSETKNSLMQDRDAASARAWPKMHTVNGYVNRTLPGLIGCHRKSVYWHVIGMGTTPEVHSIFLEGHTFLVRNHRQASLGISPITFLTAQTLLRDLGQFLLFCHIPSHQHDGMEAYVKVDSCPEEPQLRMKNNEEAEDYDDDLTDSEMDVVRFDDDNSPSIIQARSGAKKHPKTWVHYIAAEEEDWDYAPLVLAPDDRSYKSQYLNNGPQRIGRKYKKVRFMAYTDETFKTREAIQHESGILGPLLYGEVGDTLLIIFKNQASRPYNIYPHGITDVRPLYSRRLPKGVKHLKDFPILPGEIFKYKWTITVEDGPTKSDPRCLTRYYSSFVNWERDLASGLIGPLLICYKESVDQRGNQIMSDKRNVILFSVFDENRSWYLTENIQRFLPNPAGVQLEDPEFQASNIMHSINGYVFDSLQLSVCLHEVAYWYILSIGAQTDFLSVFFSGYTFKHKGVYEDTLTLFPFSGETVFMSMENPGLWILGCHNSDFRNRGMTALLKVSSCDWNTGDYEEDSYEDISAYFDSKNNAIEPRSFSQNPPVLKRHQREGTRTTLQSDQEEIDYDDTISVEMKKEDFDIYDEDENQSPRSFQKKTRHYFIAAVERLWDYGMSSSPHVLRNRAQSGSVPQFKKVVFQEFTDGSFTQPLYRGELNEHLGLLGPYIRAEVEDNIMVTFRNQASRPYSFYSSLISYEEDQRQGAEPRKNFVKPNETKTYFWKVQHHMAPTKDEFDCKAWAYFSDVDLEKDVHSGLIGPLLVCHTNTLNPAHGRQVTVQEFALFFTIFDETKSWYFTENMERNCRAPCNIQMEDPTFKENYRFHAINGYIMDTLPGLVMAQDQRIRWYLLSMGSNSNIHSIHFSGHVFTVRKKEEYKMALYNLYPGVFETVEMLPSKAGIWRVECLIGEHLHAGMSTLFLVYSNKCQNPLGMASGHIRDFQITASGQYGQWAPKLARLHYSGSINAWSTKEPFSWIKVDLLAPMIIHGIKTQGARQKFSSLYISQFIIMYSLDGKKWQTYRGNSTGTDMVFFGNVDSSGIKHNIFNPPIIARYIRLHPTHYSIRSTLRMELMGCDLNSCSMPLGMESKAISDAQITASSYFTNMFATWSPSKARLHLQGRSNAWRPQVNNPKEWLQVDFQKTMKVTGVTTQGVKSLDTSMYVKEFLISSSQDGHQWTLFFQNGKVKVFQGNQDSFTPVVNSLDPPLLTRYLRIHPQSWEHQIALRMEVLGCEAQDLY

SEQ ID NO: 2165 - DNA, 4371 bp, synthetic construct
  misc_feature 1..4371: note = Variant of human B-domain deleted Factor VIII
  source 1..4371: mol_type = other DNA
atgcagattgaactgtctacctgcttcttcctctgtttgctgaggttctgctttagcgccactagacggtactaccttggcgctgtggagctgtcctgggactatatgcagagtgatttgggagagcttcccgtcgacgcacgatttcctcctcgcgttccaaagtcatttccctttaacacaagccaggtgtacaagaagacgctcttcgtcgaattcaccgatcacctgttcaatatcgccaaacccagaccaccatggatgggtcttttggggcctaccatacaagcggaggtgtatgacacagttgttatcactctcaagaacatggcttctcatccggtaagtcttcacgcagtgggcgtgtcctactggaaagcttcagaaggagccgagtatgatgatcagacatcccagagggagaaagaagacgacaaggtatttccaggtgggtctcatacctatgtgtggcaagtgctcaaagagaatggccctatggcaagcgatccgccgtgtttgacttacagctacctttcacacgttgacctcgtcaaggacctcaactccgggttgattggagccttgttggtatgcagggaaggatctcttgccaaagagaagacacagaccctggccaagtttatccttctctttgctgtgttcgatgagggcaaaagttggcatagcgaaacgaagaattccctcatgcaggatcgcgacgcagccagcgccagagcttggcccaagatgcacactgtgaacggatatgtcaataggacgcttcctggcttgattgggtgtcatcggaaaagtgtctactggcacgtgatcggaatggggacaacaccagaggtccactccatatttctcgaaggccataccttccttgttcgaaaccacagacaggcatccttggggatctctcccattacctttctcactgcccaaacgctgcttcgtgacttgggtcagttccttctcttttgccatatcccgtcacaccagcatgatggtatggaagcttatgtgaaagtcgacagttgtcctgaggagccacagttgcgcatgaagaataatgaagaagccgaggattacgacgacgatctcaccgattctgagatggacgtggtgaggtttgatgacgacaactctccctccatcattcaagctcggagcggggcgaagaaacaccccaagacttgggtccactatatagcggcggaagaggaggattgggattacgctcctcttgtattggcaccagatgaccgctcatacaaaagccagtacctcaacaacggaccgcagagaattggccggaagtataagaaagtgcgatttatggcctatacagacgaaacctttaagacaagggaggccatccagcatgagagtgggattttgggacctcttctttacggcgaagttggtgataccctcctcatcatcttcaagaatcaagcttctcgcccctataacatttacccacacgggatcactgacgttaggcctttgtatagcagaagacttcccaaaggcgtgaagcatctcaaagacttccccattttgccaggcgagatctttaagtacaaatggaccattacagtggaagatggaccgactaaatcggaccctcgatgccttacgcggtactattcctccttcgtgaattgggagagagatttggcaagcggactcataggaccactcctcatctgttacaaggaatctgtagaccagaggggtaaccagattatgagtgataaacgcaatgtgatcctttttagcgtcttcgacgagaaccggtcctggtacttgaccgagaatatacaaaggttccttcccaaccccgcaggcgttcagttggaagaccctgagtttcaggccagcaatattatgcactcaatcaacggctatgtgtttgatagtctccagctttctgtttgcctccatgaagtagcctattggtacatcttgtcaattggtgctcaaacagacttcctctccgtcttcttctccggctacacctttaagcacaagggcgtgtatgaggacactctcacactctttccattttctggagaaaccgtgttcatgagcatggagaatccaggcctttggatcttgggttgccacaacagtgattttcgcaatcggggaatgactgctctcctcaaagtcagcagctgtgattggaacacaggcgactatgaggaagattcttacgaggacataagtgcctactttgactccaagaataacgccattgagcccagatcattctcccagaatcctcccgtgcttaaaaggcatcagcgcgaaggtaccagaactactcttcagtctgatcaagaggagattgactatgacgacaccattagcgtggaaatgaagaaggaggatttcgatatctatgacgaagatgagaaccagtctccgcggagctttcagaagaagacgcgacactacttcattgcagcagtcgaaaggctttgggactacggtatgtcatcatcccctcatgtgttgcgcaatagagctcagagtggaagtgttccacagttcaagaaagtcgtctttcaagagtttacagatggcagcttcacacagcctctctatcggggcgagcttaacgaacatttgggactccttggtccctatatccgagccgaagtggaggacaacattatggttacctttaggaatcaagcctctcgcccctacagcttctactcctccctcatcagttatgaggaggatcagagacaaggcgctgaaccacggaagaactttgtgaaaccgaatgagacgaagacctacttctggaaagtacagcaccacatggcccccacaaaagacgaattcgattgcaaagcatgggcgtatttttcagacgttgacttggagaaagatgtacattcaggacttattggtcctttgttggtgtgtcacactaacactctcaatccagcccatggcaggcaggtgacagtccaggaattcgctcttttctttaccatctttgatgagaccaagtcctggtacttcacggaaaacatggagcgcaattgcagagccccctgtaacatacagatggaggaccctacctttaaggaaaattatcggttccacgcaatcaacggatacattatggatacactccctggccttgtgatggctcaggaccaacgaatcaggtggtacctcctcagcatgggttctaatagtaacatacactccattcacttttcaggacatgtgttcactgtccggaagaaagaagagtataagatggccctctacaatttgtatccaggcgtgtttgagaccgttgaaatgcttcccattaaagctggcatctggagagtagagtgcttgatcggagaacatcttcacgcaggtatgagcaccttgttcctcgtgtacagcaacaaatgtcagaatccacttggcatggccagtggacacattcgcgactttcagatcacagcatctggccagtatggacaatgggccccaaagttggctcgcctccattactccggtagcataaatgcgtggtccactaaagaacctttcagctggattaaggtcgatcttcttgcccccatgatcatccacggcattaagacacagggagcgaggcagaaattctcctccctctacatctcacagttcattattatgtatagtttggacggcaagaagtggcaaacttatagaggtaacagtactggaacagacatggtgttcttcggcaacgttgatagctctggcatcaaacacaacatctttaatcctcccataatagctcggtacatcagattgcatccgacccactacagcattaggagtacactccgaatggagcttatgggttgcgacttgaattcctgttcaatgccactcggaatggagtctaaagccatctctgatgcacagataaccgccagtagctactttacgaacatgtttgctacgtggtcaccctctaaggcaaggcttcatttgcaaggccggtctaatgcctggagacctcaggtgaacaacccgaaagaatggctccaggtggactttcagaagaccatgaaagtaacaggtgtcactactcagggagttaagtccttggatactagcatgtatgtgaaggagttccttatttcctcatcacaagatggccaccagtggaccctcttctttcagaatggtaaggtcaaagtgtttcagggcaatcaagacagcttcacacccgtggtgaacagtcttgatcctccactcttgacacgataccttcgaatccatccacagtcttgggagcaccagattgcattgcgcatggaagtacttggatgcgaggctcaggacctctac

SEQ ID NO: 2166 - protein, 1457 aa, synthetic construct
  REGION 1..1457: note = Variant of human B-domain deleted Factor VIII
MQIELSTCFFLCLLRFCFSATRRYYLGAVELSWDYMQSDLGELPVDARFPPRVPKSFPFNTSQVYKKTLFVEFTDHLFNIAKPRPPWMGLLGPTIQAEVYDTVVITLKNMASHPVSLHAVGVSYWKASEGAEYDDQTSQREKEDDKVFPGGSHTYVWQVLKENGPMASDPPCLTYSYLSHVDLVKDLNSGLIGALLVCREGSLAKEKTQTLAKFILLFAVFDEGKSWHSETKNSLMQDRDAASARAWPKMHTVNGYVNRTLPGLIGCHRKSVYWHVIGMGTTPEVHSIFLEGHTFLVRNHRQASLGISPITFLTAQTLLRDLGQFLLFCHIPSHQHDGMEAYVKVDSCPEEPQLRMKNNEEAEDYDDDLTDSEMDVVRFDDDNSPSIIQARSGAKKHPKTWVHYIAAEEEDWDYAPLVLAPDDRSYKSQYLNNGPQRIGRKYKKVRFMAYTDETFKTREAIQHESGILGPLLYGEVGDTLLIIFKNQASRPYNIYPHGITDVRPLYSRRLPKGVKHLKDFPILPGEIFKYKWTITVEDGPTKSDPRCLTRYYSSFVNWERDLASGLIGPLLICYKESVDQRGNQIMSDKRNVILFSVFDENRSWYLTENIQRFLPNPAGVQLEDPEFQASNIMHSINGYVFDSLQLSVCLHEVAYWYILSIGAQTDFLSVFFSGYTFKHKGVYEDTLTLFPFSGETVFMSMENPGLWILGCHNSDFRNRGMTALLKVSSCDWNTGDYEEDSYEDISAYFDSKNNAIEPRSFSQNPPVLKRHQREGTRTTLQSDQEEIDYDDTISVEMKKEDFDIYDEDENQSPRSFQKKTRHYFIAAVERLWDYGMSSSPHVLRNRAQSGSVPQFKKVVFQEFTDGSFTQPLYRGELNEHLGLLGPYIRAEVEDNIMVTFRNQASRPYSFYSSLISYEEDQRQGAEPRKNFVKPNETKTYFWKVQHHMAPTKDEFDCKAWAYFSDVDLEKDVHSGLIGPLLVCHTNTLNPAHGRQVTVQEFALFFTIFDETKSWYFTENMERNCRAPCNIQMEDPTFKENYRFHAINGYIMDTLPGLVMAQDQRIRWYLLSMGSNSNIHSIHFSGHVFTVRKKEEYKMALYNLYPGVFETVEMLPIKAGIWRVECLIGEHLHAGMSTLFLVYSNKCQNPLGMASGHIRDFQITASGQYGQWAPKLARLHYSGSINAWSTKEPFSWIKVDLLAPMIIHGIKTQGARQKFSSLYISQFIIMYSLDGKKWQTYRGNSTGTDMVFFGNVDSSGIKHNIFNPPIIARYIRLHPTHYSIRSTLRMELMGCDLNSCSMPLGMESKAISDAQITASSYFTNMFATWSPSKARLHLQGRSNAWRPQVNNPKEWLQVDFQKTMKVTGVTTQGVKSLDTSMYVKEFLISSSQDGHQWTLFFQNGKVKVFQGNQDSFTPVVNSLDPPLLTRYLRIHPQSWEHQIALRMEVLGCEAQDLY

SEQ ID NO: 2167 - DNA, 4371 bp, synthetic construct
  misc_feature 1..4371: note = Variant of human B-domain deleted Factor VIII
  source 1..4371: mol_type = other DNA
atgcagattgaactgtctacctgcttcttcctctgtttgctgaggttctgctttagcgccactagacggtactaccttggcgctgtggagctgtcctgggactatatgcagagtgatttgggagagcttcccgtcgacgcacgatttcctcctcgcgttccaaagtcatttccctttaacacaagccaggtgtacaagaagacgctcttcgtcgaattcaccgatcacctgttcaatatcgccaaacccagaccaccatggatgggtcttttggggcctaccatacaagcggaggtgtatgacacagttgttatcactctcaagaacatggcttctcatccggtaagtcttcacgcagtgggcgtgtcctactggaaagcttcagaaggagccgagtatgatgatcagacatcccagagggagaaagaagacgacaaggtatttccaggtgggtctcatacctatgtgtggcaagtgctcaaagagaatggccctatggccagcgatccgccgtgtttgacttacagctacctgtcacacgttgacctcgtcaaggacctcaactccgggttgattggagccttgttggtatgcagggaaggatctcttgccaaagagaagacacagaccctggccaagtttatccttctctttgctgtgttcgatgagggcaaaagttggcatagcgaaacgaagaattccctcatgcaggatcgcgacgcagccagcgccagagcttggcccaagatgcacactgtgaacggatatgtcaataggacgcttcctggcttgattgggtgtcatcggaaaagtgtctactggcacgtgatcggaatggggacaacaccagaggtccactccatatttctcgaaggccataccttccttgttcgaaaccacagacaggcatccttggggatctctcccattacctttctcactgcccaaacgctgcttcgtgacttgggtcagttccttctcttttgccatatcccgtcacaccagcatgatggtatggaagcttatgtgaaagtcgacagttgtcctgaggagccacagttgcgcatgaagaataatgaagaagccgaggattacgacgacgatctcaccgattctgagatggacgtggtgaggtttgatgacgacaactctccctccatcattcaagctcggagcggggcgaagaaacaccccaagacttgggtccactatatagcggcggaagaggaggattgggattacgctcctcttgtattggcaccagatgaccgctcatacaaaagccagtacctcaacaacggaccgcagagaattggccggaagtataagaaagtgcgatttatggcctatacagacgaaacctttaagacaagggaggccatccagcatgagagtgggattttgggacctcttctttacggcgaagttggtgataccctcctcatcatcttcaagaatcaagcttctcgcccctataacatttacccacacgggatcactgacgttaggcctttgtatagcagaagacttcccaaaggcgtgaagcatctcaaagacttccccattttgccaggcgagatctttaagtacaaatggaccattacagtggaagatggaccgactaaatcagaccctcgatgccttacgcggtactattcctccttcgtgaattgggagagagatttggcaagcggactcataggaccactcctcatctgttacaaggaatctgtagaccagaggggtaaccagattatgagtgataaacgcaatgtgatcctttttagcgtcttcgacgagaaccggtcctggtacttgaccgagaatatacaaaggttccttcccaaccccgcaggcgttcagttggaagaccctgagtttcaggccagcaatattatgcactcaatcaacggctatgtgtttgatagtctccagctttctgtttgcctccatgaagtagcctattggtacatcttgtcaattggtgctcaaacagacttcctctccgtcttcttctccggctacacctttaagcacaagggcgtgtatgaggacactctcacactctttccattttctggagaaaccgtgttcatgagcatggagaatccaggcctttggatcttgggttgccacaacagtgattttcgcaatcggggaatgactgctctcctcaaagtcagcagctgtgattggaacacaggcgactatgaaggggattcttacgaggacataagtgcctactttgactccaagaataacgccattgagcccagatcattctcccagaatcctcccgtgcttaaaaggcatcagcgcgaaggtaccagaactactcttcagtctgatcaagaggagattgactatgacgacaccattagcgtggaaatgaagaaggaagatttcgatatccaggacgagtcggggaaccagtctccgcggagctttcagaagaagacgcgacactacttcattgcagcagtcgaaaggctttgggactacggtatgtcatcatcccctcatgtgttgcgcaatagagctcagagtggaagtgttccacagttcaagaaagtcgtctttcaagagtttacagatggcagcttcacacagcctctctatcggggcgagcttaacgaacatttgggactccttggtccctatatccgagccgaagtggaggacaacattatggttacctttaggaatcaagcctctcgcccctacagcttctactcctccctcatcagttatgaggaggatcagagacaaggcgctgaaccacggaagaactttgtgaaaccgaatgagacgaagacctacttctggaaagtacagcaccacatggcccccacaaaagacgaattcgattgcaaagcatgggcgtatttttcagacgttgacttggagaaagatgtacattcaggacttattggtcctttgttggtgtgtcacactaacactctcaatccagcccatggcaggcaggtgacagtccaggaattcgctcttttctttaccatctttgatgagaccaagtcctggtacttcacggaaaacatggagcgcaattgcagagccccctgtaacatacagatggaggaccctacctttaaggaaaattatcggttccacgcaatcaacggatacattatggatacactccctggccttgtgatggctcaggaccaacgaatcaggtggtacctcctcagcatgggttctaatagtaacatacactccattcacttttcaggacatgtgttcactgtccggaagaaagaagagtataagatggccctctacaatttgtatccaggcgtgtttgagaccgttgaaatgcttccctctaaagctggcatctggagagtagagtgcttgatcggagaacatcttcacgcaggtatgagcaccttgttcctcgtgtacagcaacaaatgtcagaatccacttggcatggccagtggacacattcgcgactttcagatcacagcatctggccagtatggacaatgggccccaaagttggctcgcctccattactccggtagcataaatgcgtggtccactaaagaacctttcagctggattaaggtcgatcttcttgcccccatgatcatccacggcattaagacacagggagcgaggcagaaattctcctccctctacatctcacagttcattattatgtatagtttggacggcaagaagtggcaaacttatagaggtaacagtactggaacagacatggtgttcttcggcaacgttgatagctctggcatcaaacacaacatctttaatcctcccataatagctcggtacatcagattgcatccgacccactacagcattaggagtacactccgaatggagcttatgggttgcgacttgaattcctgttcaatgccactcggaatggagtctaaagccatctctgatgcacagataaccgccagtagctactttacgaacatgtttgctacgtggtcaccctctaaggcaaggcttcatttgcaaggccggtctaatgcctggagacctcaggtgaacaacccgaaagaatggctccaggtggactttcagaagaccatgaaagtaacaggtgtcactactcagggagttaagtccttggatactagcatgtatgtgaaggagttccttatttcctcatcacaagatggccaccagtggaccctcttctttcagaatggtaaggtcaaagtgtttcagggcaatcaagacagcttcacacccgtggtgaacagtcttgatcctccactcttgacacgataccttcgaatccatccacagtcttgggagcaccagattgcattgcgcatggaagtacttggatgcgaggctcaggacctctac

SEQ ID NO: 2168 - protein, 1457 aa, synthetic construct
  REGION 1..1457: note = Variant of human B-domain deleted Factor VIII
MQIELSTCFFLCLLRFCFSATRRYYLGAVELSWDYMQSDLGELPVDARFPPRVPKSFPFNTSQVYKKTLFVEFTDHLFNIAKPRPPWMGLLGPTIQAEVYDTVVITLKNMASHPVSLHAVGVSYWKASEGAEYDDQTSQREKEDDKVFPGGSHTYVWQVLKENGPMASDPPCLTYSYLSHVDLVKDLNSGLIGALLVCREGSLAKEKTQTLAKFILLFAVFDEGKSWHSETKNSLMQDRDAASARAWPKMHTVNGYVNRTLPGLIGCHRKSVYWHVIGMGTTPEVHSIFLEGHTFLVRNHRQASLGISPITFLTAQTLLRDLGQFLLFCHIPSHQHDGMEAYVKVDSCPEEPQLRMKNNEEAEDYDDDLTDSEMDVVRFDDDNSPSIIQARSGAKKHPKTWVHYIAAEEEDWDYAPLVLAPDDRSYKSQYLNNGPQRIGRKYKKVRFMAYTDETFKTREAIQHESGILGPLLYGEVGDTLLIIFKNQASRPYNIYPHGITDVRPLYSRRLPKGVKHLKDFPILPGEIFKYKWTITVEDGPTKSDPRCLTRYYSSFVNWERDLASGLIGPLLICYKESVDQRGNQIMSDKRNVILFSVFDENRSWYLTENIQRFLPNPAGVQLEDPEFQASNIMHSINGYVFDSLQLSVCLHEVAYWYILSIGAQTDFLSVFFSGYTFKHKGVYEDTLTLFPFSGETVFMSMENPGLWILGCHNSDFRNRGMTALLKVSSCDWNTGDYEGDSYEDISAYFDSKNNAIEPRSFSQNPPVLKRHQREGTRTTLQSDQEEIDYDDTISVEMKKEDFDIQDESGNQSPRSFQKKTRHYFIAAVERLWDYGMSSSPHVLRNRAQSGSVPQFKKVVFQEFTDGSFTQPLYRGELNEHLGLLGPYIRAEVEDNIMVTFRNQASRPYSFYSSLISYEEDQRQGAEPRKNFVKPNETKTYFWKVQHHMAPTKDEFDCKAWAYFSDVDLEKDVHSGLIGPLLVCHTNTLNPAHGRQVTVQEFALFFTIFDETKSWYFTENMERNCRAPCNIQMEDPTFKENYRFHAINGYIMDTLPGLVMAQDQRIRWYLLSMGSNSNIHSIHFSGHVFTVRKKEEYKMALYNLYPGVFETVEMLPSKAGIWRVECLIGEHLHAGMSTLFLVYSNKCQNPLGMASGHIRDFQITASGQYGQWAPKLARLHYSGSINAWSTKEPFSWIKVDLLAPMIIHGIKTQGARQKFSSLYISQFIIMYSLDGKKWQTYRGNSTGTDMVFFGNVDSSGIKHNIFNPPIIARYIRLHPTHYSIRSTLRMELMGCDLNSCSMPLGMESKAISDAQITASSYFTNMFATWSPSKARLHLQGRSNAWRPQVNNPKEWLQVDFQKTMKVTGVTTQGVKSLDTSMYVKEFLISSSQDGHQWTLFFQNGKVKVFQGNQDSFTPVVNSLDPPLLTRYLRIHPQSWEHQIALRMEVLGCEAQDLY

SEQ ID NO: 2169 - DNA, 4371 bp, synthetic construct
  misc_feature 1..4371: note = Variant of human B-domain deleted Factor VIII
  source 1..4371: mol_type = other DNA
atgcagattgaactgtctacctgcttcttcctctgtttgctgaggttctgctttagcgccactagacggtactaccttggcgctgtggagctgtcctgggactatatgcagagtgatttgggagagcttcccgtcgacgcacgatttcctcctcgcgttccaaagtcatttccctttaacacaagccaggtgtacaagaagacgctcttcgtcgaattcaccgatcacctgttcaatatcgccaaacccagaccaccatggatgggtcttttggggcctaccatacaagcggaggtgtatgacacagttgttatcactctcaagaacatggcttctcatccggtaagtcttcacgcagtgggcgtgtcctactggaaagcttcagaaggagccgagtatgatgatcagacatcccagagggagaaagaagacgacaaggtatttccaggtgggtctcatacctatgtgtggcaagtgctcaaagagaatggccctatggccagcgatccgccgtgtttgacttacagctacctttcacacgttgacctcgtcaaggacctcaactccgggttgattggagccttgttggtatgcagggaaggatctcttgccaaagagaagacacagaccctggccaagtttatccttctctttgctgtgttcgatgagggcaaaagttggcatagcgaaacgaagaattccctcatgcaggatcgcgacgcagccagcgccagagcttggcccaagatgcacactgtgaacggatatgtcaataggacgcttcctggcttgattgggtgtcatcggaaaagtgtctactggcacgtgatcggaatggggacaacaccagaggtccactccatatttctcgaaggccataccttccttgttcgaaaccacagacaggcatccttggggatctctcccattacctttctcactgcccaaacgctgcttcgtgacttgggtcagttccttctcttttgccatatcccgtcacaccagcatgatggtatggaagcttatgtgaaagtcgacagttgtcctgaggagccacagttgcgcatgaagaataatgaagaagccgaggattacgacgacgatctcaccgattctgagatggacgtggtgaggtttgatgacgacaactctccctccatcattcaagctcggagcggggcgaagaaacaccccaagacttgggtccactatatagcggcggaagaggaggattgggattacgctcctcttgtattggcaccagatgaccgctcatacaaaagccagtacctcaacaacggaccgcagagaattggccggaagtataagaaagtgcgatttatggcctatacagacgaaacctttaagacaagggaggccatccagcatgagagtgggattttgggacctcttctttacggcgaagttggtgataccctcctcatcatcttcaagaatcaagcttctcgcccctataacatttacccacacgggctcactgacgttaggcctttgtatagcagaagacttcccaaaggcgtgaagcatctcaaagacttccccattttgccaggcgagatctttaagtacaaatggaccattacagtggaagatggaccgactaaatcagaccctcgatgccttacgcggtactattcctccttcgtgaattgggagagagatttggcaagcggactcataggaccactcctcatctgttacaaggaatctgtagaccagaggggtaaccagattatgagtgataaacgcaatgtgatcctttttagcgtcttcgacgagaaccggtcctggtacttgaccgagaatatacaaaggttccttcccaaccccgcaggcgttcagttggaagaccctgagtttcaggccagcaatattatgcactcaatcaacggctatgtgtttgatagtctccagctttctgtttgcctccatgaagtagcctattggtacatcttgtcaattggtgctcaaacagacttcctctccgtcttcttctccggctacacctttaagcacaagggcgtgtatgaggacactctcacactctttccattttctggagaaaccgtgttcatggaaatggagaatccaggcctttggatcttgggttgccacaacagtgattttcgcaatcggggaatgactgctctcctcaaagtcagcagctgtgattggaacacaggcgactattatgaggattcttacgaggacataagtgcctactttgactccaagaataacgccattgagcccagatcattctcccagaatcctcccgtgcttaaaaggcatcagcgcgaaggtaccagaactactcttcagtctgatcaagaggagattgactatgacgacaccattagcgtggaaatgaagaaggaggatttcgatatctatgacgaagatgggaaccagtctccgcggagctttcagaagaagacgcgacactacttcattgcagcagtcgaaaggctttgggactacggtatgtcatcatcccctcatgtgttgcgcaatagagctcagagtggaagtgttccacagttcaagaaagtcgtctttcaagagtttacagatggcagcttcacacagcctctctatcggggcgagcttaacgaacatttgggactccttggtccctatatccgagccgaagtggaggacaacattatggttacctttaggaatcaagcctctcgcccctacagcttctactcctccctcatcagttatgaggaggatcagagacaaggcgctgaaccacggaagaactttgtgaaaccgaatgagacgaagacctacttctggaaagtacagcaccacatggcccccacaaaagacgaattcgattgcaaagcatgggcgtatttttcagacgttgacttggagaaagatgtacattcaggacttattggtcctttgttggtgtgtcacactaacactctcaatccagcccatggcaggcaggtgacagtccaggaattcgctcttttctttaccatctttgatgagaccaagtcctggtacttcacggaaaacatggagcgcaattgcagagccccctgtaacatacagatggaggaccctacctttaaggaaaattatcggttccacgcaatcaacggatacattatggatacactccctggccttgtgatggctcaggaccaacgaatcaggtggtacctcctcagcatgggttctaatgagaacatacactccattcacttttcaggacatgtgttcactgtccggaagaaagaagagtataagatggccctctacaatttgtatccaggcgtgtttgagaccgttgaaatgcttcccagtaaagctggcatctggagagtagagtgcttgatcggagaacatcttcacgcaggtatgagcaccttgttcctcgtgtacagcaacaaatgtcagaatccacttggcatggccagtggacacattcgcgactttcagatcacagcatctggccagtatggacaatgggccccaaagttggctcgcctccattactccggtagcataaatgcgtggtccactaaagaacctttcagctggattaaggtcgatcttcttgcccccatgatcatccacggcattaagacacagggagcgaggcagaaattctcctccctctacatctcacagttcattattatgtatagtttggacggcaagaagtggcaaacttatagaggtaacagtactggaacagacatggtgttcttcggcaacgttgatagctctggcatcaaacacaacatctttaatcctcccataatagctcggtacatcagattgcatccgacccactacagcattaggagtacactccgaatggagcttatgggttgcgacttgaattcctgttcaatgccactcggaatggagtctaaagccatctctgatgcacagataaccgccagtagctactttacgaacatgtttgctacgtggtcaccctctaaggcaaggcttcatttgcaaggccggtctaatgcctggagacctcaggtgaacaacccgaaagaatggctccaggtggactttcagaagaccatgaaagtaacaggtgtcactactcagggagttaagtccttggatactagcatgtatgtgaaggagttccttatttcctcatcacaagatggccaccagtggaccctcttctttcagaatggtaaggtcaaagtgtttcagggcaatcaagacagcttcacacccgtggtgaacagtcttgatcctccactcttgacacgataccttcgaatccatccacagtcttgggagcaccagattgcattgcgcatggaagtacttggatgcgaggctcaggacctctac

SEQ ID NO: 2170 - protein, 1457 aa, synthetic construct
  REGION 1..1457: note = Variant of human B-domain deleted Factor VIII
MQIELSTCFFLCLLRFCFSATRRYYLGAVELSWDYMQSDLGELPVDARFPPRVPKSFPFNTSQVYKKTLFVEFTDHLFNIAKPRPPWMGLLGPTIQAEVYDTVVITLKNMASHPVSLHAVGVSYWKASEGAEYDDQTSQREKEDDKVFPGGSHTYVWQVLKENGPMASDPPCLTYSYLSHVDLVKDLNSGLIGALLVCREGSLAKEKTQTLAKFILLFAVFDEGKSWHSETKNSLMQDRDAASARAWPKMHTVNGYVNRTLPGLIGCHRKSVYWHVIGMGTTPEVHSIFLEGHTFLVRNHRQASLGISPITFLTAQTLLRDLGQFLLFCHIPSHQHDGMEAYVKVDSCPEEPQLRMKNNEEAEDYDDDLTDSEMDVVRFDDDNSPSIIQARSGAKKHPKTWVHYIAAEEEDWDYAPLVLAPDDRSYKSQYLNNGPQRIGRKYKKVRFMAYTDETFKTREAIQHESGILGPLLYGEVGDTLLIIFKNQASRPYNIYPHGLTDVRPLYSRRLPKGVKHLKDFPILPGEIFKYKWTITVEDGPTKSDPRCLTRYYSSFVNWERDLASGLIGPLLICYKESVDQRGNQIMSDKRNVILFSVFDENRSWYLTENIQRFLPNPAGVQLEDPEFQASNIMHSINGYVFDSLQLSVCLHEVAYWYILSIGAQTDFLSVFFSGYTFKHKGVYEDTLTLFPFSGETVFMEMENPGLWILGCHNSDFRNRGMTALLKVSSCDWNTGDYYEDSYEDISAYFDSKNNAIEPRSFSQNPPVLKRHQREGTRTTLQSDQEEIDYDDTISVEMKKEDFDIYDEDGNQSPRSFQKKTRHYFIAAVERLWDYGMSSSPHVLRNRAQSGSVPQFKKVVFQEFTDGSFTQPLYRGELNEHLGLLGPYIRAEVEDNIMVTFRNQASRPYSFYSSLISYEEDQRQGAEPRKNFVKPNETKTYFWKVQHHMAPTKDEFDCKAWAYFSDVDLEKDVHSGLIGPLLVCHTNTLNPAHGRQVTVQEFALFFTIFDETKSWYFTENMERNCRAPCNIQMEDPTFKENYRFHAINGYIMDTLPGLVMAQDQRIRWYLLSMGSNENIHSIHFSGHVFTVRKKEEYKMALYNLYPGVFETVEMLPSKAGIWRVECLIGEHLHAGMSTLFLVYSNKCQNPLGMASGHIRDFQITASGQYGQWAPKLARLHYSGSINAWSTKEPFSWIKVDLLAPMIIHGIKTQGARQKFSSLYISQFIIMYSLDGKKWQTYRGNSTGTDMVFFGNVDSSGIKHNIFNPPIIARYIRLHPTHYSIRSTLRMELMGCDLNSCSMPLGMESKAISDAQITASSYFTNMFATWSPSKARLHLQGRSNAWRPQVNNPKEWLQVDFQKTMKVTGVTTQGVKSLDTSMYVKEFLISSSQDGHQWTLFFQNGKVKVFQGNQDSFTPVVNSLDPPLLTRYLRIHPQSWEHQIALRMEVLGCEAQDLY

SEQ ID NO: 2171 - DNA, 4371 bp, synthetic construct
  misc_feature 1..4371: note = Variant of human B-domain deleted Factor VIII
  source 1..4371: mol_type = other DNA
atgcagattgaactgtctacctgcttcttcctctgtttgctgaggttctgctttagcgccactagacggtactaccttggcgctgtggagctgtcctgggactatatgcagagtgatttgggagagcttcccgtcgacgcacgatttcctcctcgcgttccaaagtcatttccctttaacacaagccaggtgtacaagaagacgctcttcgtcgaattcaccgatcacctgttcaatatcgccaaacccagaccaccatggatgggtcttttggggcctaccatacaagcggaggtgtatgacacagttgttatcactctcaagaacatggcttctcatccggtaagtcttcacgcagtgggcgtgtcctactggaaagcttcagaaggagccgagtatgatgatcagacatcccagagggagaaagaagacgacaaggtatttccaggtgggtctcatacctatgtgtggcaagtgctcaaagagaatggccctatggcaagcgatccgccgtgtttgacttacagctacctgtcacacgttgacctcgtcaaggacctcaactccgggttgattggagccttgttggtatgcagggaaggatctcttgccaaagagaagacacagaccctggccaagtttatccttctctttgctgtgttcgatgagggcaaaagttggcatagcgaaacgaagaattccctcatgcaggatcgcgacgcagccagcgccagagcttggcccaagatgcacactgtgaacggatatgtcaataggacgcttcctggcttgattgggtgtcatcggaaaagtgtctactggcacgtgatcggaatggggacaacaccagaggtccactccatatttctcgaaggccataccttccttgttcgaaaccacagacaggcatccttggggatctctcccattacctttctcactgcccaaacgctgcttcgtgacttgggtcagttccttctcttttgccatatcccgtcacaccagcatgatggtatggaagcttatgtgaaagtcgacagttgtcctgaggagccacagttgcgcatgaagaataatgaagaagccgaggattacgacgacgatctcaccgattctgagatggacgtggtgaggtttgatgacgacaactctccctccatcattcaagctcggagcggggcgaagaaacaccccaagacttgggtccactatatagcggcggaagaggaggattgggattacgctcctcttgtattggcaccagatgaccgctcatacaaaagccagtacctcaacaacggaccgcagagaattggccggaagtataagaaagtgcgatttatggcctatacagacgaaacctttaagacaagggaggccatccagcatgagagtgggattttgggacctcttctttacggcgaagttggtgataccctcctcatcatcttcaagaatcaagcttctcgcccctataacatttacccacacgggatcactgacgttaggcctttgtatagcagaagacttcccaaaggcgtgaagcatctcaaagacttccccattttgccaggcgagatctttaagtacaaatggaccattacagtggaagatggaccgactaaatcggaccctcgatgccttacgcggtactattcctccttcgtgaattgggagagagatttggcaagcggactcataggaccactcctcatctgttacaaggaatctgtagaccagaggggtaaccagattatgagtgataaacgcaatgtgatcctttttagcgtcttcgacgagaaccggtcctggtacttgaccgagaatatacaaaggttccttcccaaccccgcaggcgttcagttggaagaccctgagtttcaggccagcaatattatgcactcaatcaacggctatgtgtttgatagtctccagctttctgtttgcctccatgaagtagcctattggtacatcttgtcaattggtgctcaaacagacttcctctccgtcttcttctccggctacacctttaagcacaagggcgtgtatgaggacactctcacactctttccattttctggagaaaccgtgttcatgagtatggagaatccaggcctttggatcttgggttgccacaacagtgattttcgcaatcggggaatgactgctctcctcaaagtcagcagctgtgattggaacacaggcgactatgaggaagattcttacgaggacataagtgcctactttgactccaagaataacgccattgagcccagatcattctcccagaatcctcccgtgcttaaaaggcatcagcgcgaaggtaccagaactactcttcagtctgatcaagaggagattgactatgacgacaccattagcgtggaaatgaagaaggaggatttcgatatctatgacgaagatgagaaccagtctccgcggagctttcagaagaagacgcgacactacttcattgcagcagtcgaaaggctttgggactacggtatgtcatcatcccctcatgtgttgcgcaatagagctcagagtggaagtgttccacagttcaagaaagtcgtctttcaagagtttacagatggcagcttcacacagcctctctatcggggcgagcttaacgaacatttgggactccttggtccctatatccgagccgaagtggaggacaacattatggttacctttaggaatcaagcctctcgcccctacagcttctactcctccctcatcagttatgaggaggatcagagacaaggcgctgaaccacggaagaactttgtgaaaccgaatgagacgaagacctacttctggaaagtacagcaccacatggcccccacaaaagacgaattcgattgcaaagcatgggcgtatttttcagacgttgacttggagaaagatgtacattcaggacttattggtcctttgttggtgtgtcacactaacactctcaatccagcccatggcaggcaggtgacagtccaggaattcgctcttttctttaccatctttgatgagaccaagtcctggtacttcacggaaaacatggagcgcaattgcagagccccctgtaacatacagatggaggaccctacctttaaggaaaattatcggttccacgcaatcaacggatacattatggatacactccctggccttgtgatggctcaggaccaacgaatcaggtggtacctcctcagcatgggttctaatgagaacatacactccattcacttttcaggacatgtgttcactgtccggaaggcggaagagtataagatggccctctacaatttgtatccaggcgtgtttgagaccgttgaaatgcttccctctaaagctggcatctggagagtagagtgcttgatcggagaacatcttcacgcaggtatgagcaccttgttcctcgtgtacagcaacaaatgtcagaatccacttggcatggccagtggacacattcgcgactttcagatcacagcatctggccagtatggacaatgggccccaaagttggctcgcctccattactccggtagcataaatgcgtggtccactaaagaacctttcagctggattaaggtcgatcttcttgcccccatgatcatccacggcattaagacacagggagcgaggcagaaattctcctccctctacatctcacagttcattattatgtatagtttggacggcaagaagtggcaaacttatagaggtaacagtactggaacagacatggtgttcttcggcaacgttgatagctctggcatcaaacacaacatctttaatcctcccataatagctcggtacatcagattgcatccgacccactacagcattaggagtacactccgaatggagcttatgggttgcgacttgaattcctgttcaatgccactcggaatggagtctaaagccatctctgatgcacagataaccgccagtagctactttacgaacatgtttgctacgtggtcaccctctaaggcaaggcttcatttgcaaggccggtctaatgcctggagacctcaggtgaacaacccgaaagaatggctccaggtggactttcagaagaccatgaaagtaacaggtgtcactactcagggagttaagtccttggatactagcatgtatgtgaaggagttccttatttcctcatcacaagatggccaccagtggaccctcttctttcagaatggtaaggtcaaagtgtttcagggcaatcaagacagcttcacacccgtggtgaacagtcttgatcctccactcttgacacgataccttcgaatccatccacagtcttgggagcaccagattgcattgcgcatggaagtacttggatgcgaggctcaggacctctac

SEQ ID NO: 2172 - protein, 1457 aa, synthetic construct
  REGION 1..1457: note = Variant of human B-domain deleted Factor VIII
MQIELSTCFFLCLLRFCFSATRRYYLGAVELSWDYMQSDLGELPVDARFPPRVPKSFPFNTSQVYKKTLFVEFTDHLFNIAKPRPPWMGLLGPTIQAEVYDTVVITLKNMASHPVSLHAVGVSYWKASEGAEYDDQTSQREKEDDKVFPGGSHTYVWQVLKENGPMASDPPCLTYSYLSHVDLVKDLNSGLIGALLVCREGSLAKEKTQTLAKFILLFAVFDEGKSWHSETKNSLMQDRDAASARAWPKMHTVNGYVNRTLPGLIGCHRKSVYWHVIGMGTTPEVHSIFLEGHTFLVRNHRQASLGISPITFLTAQTLLRDLGQFLLFCHIPSHQHDGMEAYVKVDSCPEEPQLRMKNNEEAEDYDDDLTDSEMDVVRFDDDNSPSIIQARSGAKKHPKTWVHYIAAEEEDWDYAPLVLAPDDRSYKSQYLNNGPQRIGRKYKKVRFMAYTDETFKTREAIQHESGILGPLLYGEVGDTLLIIFKNQASRPYNIYPHGITDVRPLYSRRLPKGVKHLKDFPILPGEIFKYKWTITVEDGPTKSDPRCLTRYYSSFVNWERDLASGLIGPLLICYKESVDQRGNQIMSDKRNVILFSVFDENRSWYLTENIQRFLPNPAGVQLEDPEFQASNIMHSINGYVFDSLQLSVCLHEVAYWYILSIGAQTDFLSVFFSGYTFKHKGVYEDTLTLFPFSGETVFMSMENPGLWILGCHNSDFRNRGMTALLKVSSCDWNTGDYEEDSYEDISAYFDSKNNAIEPRSFSQNPPVLKRHQREGTRTTLQSDQEEIDYDDTISVEMKKEDFDIYDEDENQSPRSFQKKTRHYFIAAVERLWDYGMSSSPHVLRNRAQSGSVPQFKKVVFQEFTDGSFTQPLYRGELNEHLGLLGPYIRAEVEDNIMVTFRNQASRPYSFYSSLISYEEDQRQGAEPRKNFVKPNETKTYFWKVQHHMAPTKDEFDCKAWAYFSDVDLEKDVHSGLIGPLLVCHTNTLNPAHGRQVTVQEFALFFTIFDETKSWYFTENMERNCRAPCNIQMEDPTFKENYRFHAINGYIMDTLPGLVMAQDQRIRWYLLSMGSNENIHSIHFSGHVFTVRKAEEYKMALYNLYPGVFETVEMLPSKAGIWRVECLIGEHLHAGMSTLFLVYSNKCQNPLGMASGHIRDFQITASGQYGQWAPKLARLHYSGSINAWSTKEPFSWIKVDLLAPMIIHGIKTQGARQKFSSLYISQFIIMYSLDGKKWQTYRGNSTGTDMVFFGNVDSSGIKHNIFNPPIIARYIRLHPTHYSIRSTLRMELMGCDLNSCSMPLGMESKAISDAQITASSYFTNMFATWSPSKARLHLQGRSNAWRPQVNNPKEWLQVDFQKTMKVTGVTTQGVKSLDTSMYVKEFLISSSQDGHQWTLFFQNGKVKVFQGNQDSFTPVVNSLDPPLLTRYLRIHPQSWEHQIALRMEVLGCEAQDLY

SEQ ID NO: 2173 - DNA, 4371 bp, synthetic construct
  misc_feature 1..4371: note = Variant of human B-domain deleted Factor VIII
  source 1..4371: mol_type = other DNA
atgcagattgaactgtctacctgcttcttcctctgtttgctgaggttctgctttagcgccactagacggtactaccttggcgctgtggagctgtcctgggactatatgcagagtgatttgggagagcttcccgtcgacgcacgatttcctcctcgcgttccaaagtcatttccctttaacacaagccaggtgtacaagaagacgctcttcgtcgaattcaccgatcacctgttcaatatcgccaaacccagaccaccatggatgggtcttttggggcctaccatacaagcggaggtgtatgacacagttgttatcactctcaagaacatggcttctcatccggtaagtcttcacgcagtgggcgtgtcctactggaaagcttcagaaggagccgagtatgatgatcagacatcccagagggagaaagaagacgacaaggtatttccaggtgggtctcatacctatgtgtggcaagtgctcaaagagaatggccctatggccagcgatccgccgtgtttgacttacagctacctttcacacgttgacctcgtcaaggacctcaactccgggttgattggagccttgttggtatgcagggaaggatctcttgccaaagagaagacacagaccctggccaagtttatccttctctttgctgtgttcgatgagggcaaaagttggcatagcgaaacgaagaattccctcatgcaggatcgcgacgcagccagcgccagagcttggcccaagatgcacactgtgaacggatatgtcaataggacgcttcctggcttgattgggtgtcatcggaaaagtgtctactggcacgtgatcggaatggggacaacaccagaggtccactccatatttctcgaaggccataccttccttgttcgaaaccacagacaggcatccttggggatctctcccattacctttctcactgcccaaacgctgcttcgtgacttgggtcagttccttctcttttgccatatcccgtcacaccagcatgatggtatggaagcttatgtgaaagtcgacagttgtcctgaggagccacagttgcgcatgaagaataatgaagaagccgaggattacgacgacgatctcaccgattctgagatggacgtggtgaggtttgatgacgacaactctccctccatcattcaagctcggagcggggcgaagaaacaccccaagacttgggtccactatatagcggcggaagaggaggattgggattacgctcctcttgtattggcaccagatgaccgctcatacaaaagccagtacctcaacaacggaccgcagagaattggccggaagtataagaaagtgcgatttatggcctatacagacgaaacctttaagacaagggaggccatccagcatgagagtgggattttgggacctcttctttacggcgaagttggtgataccctcctcatcatcttcaagaatcaagcttctcgcccctataacatttacccacacgggatcactgacgttaggcctttgtatagcagaagacttcccaaaggcgtgaagcatctcaaagacttccccattttgccaggcgagatctttaagtacaaatggaccattacagtggaagatggaccgactaaatcagaccctcgatgccttacgcggtactattcctccttcgtgaattgggagagagatttggcaagcggactcataggaccactcctcatctgttacaaggaatctgtagaccagaggggtaaccagattatgagtgataaacgcaatgtgatcctttttagcgtcttcgacgagaaccggtcctggtacttgaccgagaatatacaaaggttccttcccaaccccgcaggcgttcagttggaagaccctgagtttcaggccagcaatattatgcactcaatcaacggctatgtgtttgatagtctccagctttctgtttgcctccatgaagtagcctattggtacatcttgtcaattggtgctcaaacagacttcctctccgtcttcttctccggctacacctttaagcacaagggcgtgtatgaggacactctcacactctttccattttctggagaaaccgtgttcatgagtatggagaatccaggcctttggatcttgggttgccacaacagtgattttcgcaatcggggaatgactgctctcctcaaagtcagcagctgtgattggaacacaggcgactatgaggaagattcttacgaggacataagtgcctactttgactccgagaataacgccattgagcccagatcattctcccagaatcctcccgtgcttaaaaggcatcagcgcgaaggtaccagaactactcttcagtctgatcaagaggagattgactatgacgacaccattagcgtggaaatgaagaaggaggatttcgatatctatgacgaagatgagaaccagtctccgcggagctttcagaagaagacgcgacactacttcattgcagcagtcgaaaggctttgggactacggtatgtcatcatcccctcatgtgttgcgcaatagagctcagagtggaagtgttccacagttcaagaaagtcgtctttcaagagtttacagatggcagcttcacacagcctctctatcggggcgagcttaacgaacatttgggactccttggtccctatatccgagccgaagtggaggacaacattatggttacctttaggaatcaagcctctcgcccctacagcttctactcctccctcatcagttatgaggaggatcagagacaaggcgctgaaccacggaagaactttgtgaaaccgaatgagacgaagacctacttctggaaagtacagcaccacatggcccccacaaaagacgaattcgattgcaaagcatgggcgtatttttcagacgttgacttggagaaagatgtacattcaggacttattggtcctttgttggtgtgtcacactaacactctcaatccagcccatggcaggcaggtgacagtccaggaattcgctcttttctttaccatctttgatgagaccaagtcctggtacttcacggaaaacatggagcgcaattgcagagccccctgtaacatacagatggaggaccctacctttaaggaaaattatcggttccacgcaatcaacggatacattatggatacactccctggccttgtgatggctcaggaccaacgaatcaggtggtacctcctcagcatgggttctaatgagaacatacactccattcacttttcaggacatgtgttcactgtccggaaggcggaagagtataagatggccctctacaatttgtatccaggcgtgtttgagaccgttgaaatgcttccctctaaagctggcatctggagagtagagtgcttgatcggagaacatcttcacgcaggtatgagcaccttgttcctcgtgtacagcaacaaatgtcagaatccacttggcatggccagtggacacattcgcgactttcagatcacagcatctggccagtatggacaatgggccccaaagttggctcgcctccattactccggtagcataaatgcgtggtccactaaagaacctttcagctggattaaggtcgatcttcttgcccccatgatcatccacggcattaagacacagggagcgaggcagaaattctcctccctctacatctcacagttcattattatgtatagtttggacggcaagaagtggcaaacttatagaggtaacagtactggaacagacatggtgttcttcggcaacgttgatagctctggcatcaaacacaacatctttaatcctcccataatagctcggtacatcagattgcatccgacccactacagcattaggagtacactccgaatggagcttatgggttgcgacttgaattcctgttcaatgccactcggaatggagtctaaagccatctctgatgcacagataaccgccagtagctactttacgaacatgtttgctacgtggtcaccctctaaggcaaggcttcatttgcaaggccggtctaatgcctggagacctcaggtgaacaacccgaaagaatggctccaggtggactttcagaagaccatgaaagtaacaggtgtcactactcagggagttaagtccttggatactagcatgtatgtgaaggagttccttatttcctcatcacaagatggccaccagtggaccctcttctttcagaatggtaaggtcaaagtgtttcagggcaatcaagacagcttcacacccgtggtgaacagtcttgatcctccactcttgacacgataccttcgaatccatccacagtcttgggagcaccagattgcattgcgcatggaagtacttggatgcgaggctcaggacctctac

SEQ ID NO: 2174 - protein, 1457 aa, synthetic construct
  REGION 1..1457: note = Variant of human B-domain deleted Factor VIII
MQIELSTCFFLCLLRFCFSATRRYYLGAVELSWDYMQSDLGELPVDARFPPRVPKSFPFNTSQVYKKTLFVEFTDHLFNIAKPRPPWMGLLGPTIQAEVYDTVVITLKNMASHPVSLHAVGVSYWKASEGAEYDDQTSQREKEDDKVFPGGSHTYVWQVLKENGPMASDPPCLTYSYLSHVDLVKDLNSGLIGALLVCREGSLAKEKTQTLAKFILLFAVFDEGKSWHSETKNSLMQDRDAASARAWPKMHTVNGYVNRTLPGLIGCHRKSVYWHVIGMGTTPEVHSIFLEGHTFLVRNHRQASLGISPITFLTAQTLLRDLGQFLLFCHIPSHQHDGMEAYVKVDSCPEEPQLRMKNNEEAEDYDDDLTDSEMDVVRFDDDNSPSIIQARSGAKKHPKTWVHYIAAEEEDWDYAPLVLAPDDRSYKSQYLNNGPQRIGRKYKKVRFMAYTDETFKTREAIQHESGILGPLLYGEVGDTLLIIFKNQASRPYNIYPHGITDVRPLYSRRLPKGVKHLKDFPILPGEIFKYKWTITVEDGPTKSDPRCLTRYYSSFVNWERDLASGLIGPLLICYKESVDQRGNQIMSDKRNVILFSVFDENRSWYLTENIQRFLPNPAGVQLEDPEFQASNIMHSINGYVFDSLQLSVCLHEVAYWYILSIGAQTDFLSVFFSGYTFKHKGVYEDTLTLFPFSGETVFMSMENPGLWILGCHNSDFRNRGMTALLKVSSCDWNTGDYEEDSYEDISAYFDSENNAIEPRSFSQNPPVLKRHQREGTRTTLQSDQEEIDYDDTISVEMKKEDFDIYDEDENQSPRSFQKKTRHYFIAAVERLWDYGMSSSPHVLRNRAQSGSVPQFKKVVFQEFTDGSFTQPLYRGELNEHLGLLGPYIRAEVEDNIMVTFRNQASRPYSFYSSLISYEEDQRQGAEPRKNFVKPNETKTYFWKVQHHMAPTKDEFDCKAWAYFSDVDLEKDVHSGLIGPLLVCHTNTLNPAHGRQVTVQEFALFFTIFDETKSWYFTENMERNCRAPCNIQMEDPTFKENYRFHAINGYIMDTLPGLVMAQDQRIRWYLLSMGSNENIHSIHFSGHVFTVRKAEEYKMALYNLYPGVFETVEMLPSKAGIWRVECLIGEHLHAGMSTLFLVYSNKCQNPLGMASGHIRDFQITASGQYGQWAPKLARLHYSGSINAWSTKEPFSWIKVDLLAPMIIHGIKTQGARQKFSSLYISQFIIMYSLDGKKWQTYRGNSTGTDMVFFGNVDSSGIKHNIFNPPIIARYIRLHPTHYSIRSTLRMELMGCDLNSCSMPLGMESKAISDAQITASSYFTNMFATWSPSKARLHLQGRSNAWRPQVNNPKEWLQVDFQKTMKVTGVTTQGVKSLDTSMYVKEFLISSSQDGHQWTLFFQNGKVKVFQGNQDSFTPVVNSLDPPLLTRYLRIHPQSWEHQIALRMEVLGCEAQDLY

SEQ ID NO: 2175 - DNA, 4371 bp, synthetic construct
  misc_feature 1..4371: note = Variant of human B-domain deleted Factor VIII
  source 1..4371: mol_type = other DNA
atgcagattgaactgtctacctgcttcttcctctgtttgctgaggttctgctttagcgccactagacggtactaccttggcgctgtggagctgtcctgggactatatgcagagtgatttgggagagcttcccgtcgacgcacgatttcctcctcgcgttccaaagtcatttccctttaacacaagccaggtgtacaagaagacgctcttcgtcgaattcaccgatcacctgttcaatatcgccaaacccagaccaccatggatgggtcttttggggcctaccatacaagcggaggtgtatgacacagttgttatcactctcaagaacatggcttctcatccggtaagtcttcacgcagtgggcgtgtcctactggaaagcttcagaaggagccgagtatgatgatcagacatcccagagggagaaagaagacgacaaggtatttccaggtgggtctcatacctatgtgtggcaagtgctcaaagagaatggccctatggccagcgatccgccgtgtttgacttacagctacctttcacacgttgacctcgtcaaggacctcaactccgggttgattggagccttgttggtatgcagggaaggatctcttgccaaagagaagacacagaccctggccaagtttatccttctctttgctgtgttcgatgagggcaaaagttggcatagcgaaacgaagaattccctcatgcaggatcgcgacgcagccagcgccagagcttggcccaagatgcacactgtgaacggatatgtcaataggacgcttcctggcttgattgggtgtcatcggaaaagtgtctactggcacgtgatcggaatggggacaacaccagaggtccactccatatttctcgaaggccataccttccttgttcgaaaccacagacaggcatccttggggatctctcccattacctttctcactgcccaaacgctgcttcgtgacttgggtcagttccttctcttttgccatatcccgtcacaccagcatgatggtatggaagcttatgtgaaagtcgacagttgtcctgaggagccacagttgcgcatgaagaataatgaagaagccgaggattacgacgacgatctcaccgattctgagatggacgtggtgaggtttgatgacgacaactctccctccatcattcaagctcggagcggggcgaagaaacaccccaagacttgggtccactatatagcggcggaagaggaggattgggattacgctcctcttgtattggcaccagatgaccgctcatacaaaagccagtacctcaacaacggaccgcagagaattggccggaagtataagaaagtgcgatttatggcctatacagacgaaacctttaagacaagggaggccatccagcatgagagtgggattttgggacctcttctttacggcgaagttggtgataccctcctcatcatcttcaagaatcaagcttctcgcccctataacatttacccacacgggatcactgacgttaggcctttgtatagcagaagacttcccaaaggcgtgaagcatctcaaagacttccccattttgccaggcgagatctttaagtacaaatggaccattacagtggaagatggaccgactaaatcggaccctcgatgccttacgcggtactattcctccttcgtgaattgggagagagatttggcaagcggactcataggaccactcctcatctgttacaaggaatctgtagaccagaggggtaaccagattatgagtgataaacgcaatgtgatcctttttagcgtcttcgacgagaaccggtcctggtacttgaccgagaatatacaaaggttccttcccaaccccgcaggcgttcagttggaagaccctgagtttcaggccagcaatattatgcactcaatcaacggctatgtgtttgatagtctccagctttctgtttgcctccatgaagtagcctattggtacatcttgtcaattggtgctcaaacagacttcctctccgtcttcttctccggctacacctttaagcacaagggcgtgtatgaggacactctcacactctttccattttctggagaaaccgtgttcatgagcatggagaatccaggcctttggatcttgggttgccacaacagtgattttcgcaatcggggaatgactgctctcctcaaagtcagcagctgtgattggaacacaggcgactatgaggaagattcttacgaggacataagtgcctactttgactccaagaataacgccattgagcccagatcattctcccagaatcctcccgtgcttaaaaggcatcagcgcgaaggtaccagaactactcttcagtctgatcaagaggagattgactatgacgacaccattagcgtggaaatgaagaaggaggatttcgatatctatgacgaagatgagaaccagtctccgcggagctttcagaagaagacgcgacactacttcattgcagcagtcgaaaggctttgggactacggtatgtcatcatcccctcatgtgttgcgcaatagagctcagagtggaagtgttccacagttcaagaaagtcgtctttcaagagtttacagatggcagcttcacacagcctctctatcggggcgagcttaacgaacatttgggactccttggtccctatatccgagccgaagtggaggacaacattatggttacctttaggaatcaagcctctcgcccctacagcttctactcctccctcatcagttatgaggaggatcagagacaaggcgctgaaccacggaagaactttgtgaaaccgaatgagacgaagacctacttctggaaagtacagcaccacatggcccccacaaaagacgaattcgattgcaaagcatgggcgtatttttcagacgttgacttggagaaagatgtacattcaggacttattggtcctttgttggtgtgtcacactaacactctcaatccagcccatggcaggcaggtgacagtccaggaattcgctcttttctttaccatctttgatgagaccaagtcctggtacttcacggaaaacatggagcgcaattgcagagccccctgtaacatacagatggaggaccctacctttaaggaaaattatcggttccacgcaatcaacggatacattatggatacactccctggccttgtgatggctcaggaccaacgaatcaggtggtacctcctcagcatgggttctaatgagaacatacactccattcacttttcaggacatgtgttcactgtccggaagaaagaagagtataagatggccctctacaatttgtatccaggcgtgtttgagaccgttgaaatgcttcccattaaagctggcatctggagagtagagtgcttgatcggagaacatcttcacgcaggtatgagcaccttgttcctcgtgtacagcaacaaatgtcagaatccacttggcatggccagtggacacattcgcgactttcagatcacagcatctggccagtatggacaatgggccccaaagttggctcgcctccattactccggtagcataaatgcgtggtccactaaagaacctttcagctggattaaggtcgatcttcttgcccccatgatcatccacggcattaagacacagggagcgaggcagaaattctcctccctctacatctcacagttcattattatgtatagtttggacggcaagaagtggcaaacttatagaggtaacagtactggaacagacatggtgttcttcggcaacgttgatagctctggcatcaaacacaacatctttaatcctcccataatagctcggtacatcagattgcatccgacccactacagcattaggagtacactccgaatggagcttatgggttgcgacttgaattcctgttcaatgccactcggaatggagtctaaagccatctctgatgcacagataaccgccagtagctactttacgaacatgtttgctacgtggtcaccctctaaggcaaggcttcatttgcaaggccggtctaatgcctggagacctcaggtgaacaacccgaaagaatggctccaggtggactttcagaagaccatgaaagtaacaggtgtcactactcagggagttaagtccttggatactagcatgtatgtgaaggagttccttatttcctcatcacaagatggccaccagtggaccctcttctttcagaatggtaaggtcaaagtgtttcagggcaatcaagacagcttcacacccgtggtgaacagtcttgatcctccactcttgacacgataccttcgaatccatccacagtcttgggagcaccagattgcattgcgcatggaagtacttggatgcgaggctcaggacctctac

SEQ ID NO: 2176 - protein, 1457 aa, synthetic construct
  REGION 1..1457: note = Variant of human B-domain deleted Factor VIII
MQIELSTCFFLCLLRFCFSATRRYYLGAVELSWDYMQSDLGELPVDARFPPRVPKSFPFNTSQVYKKTLFVEFTDHLFNIAKPRPPWMGLLGPTIQAEVYDTVVITLKNMASHPVSLHAVGVSYWKASEGAEYDDQTSQREKEDDKVFPGGSHTYVWQVLKENGPMASDPPCLTYSYLSHVDLVKDLNSGLIGALLVCREGSLAKEKTQTLAKFILLFAVFDEGKSWHSETKNSLMQDRDAASARAWPKMHTVNGYVNRTLPGLIGCHRKSVYWHVIGMGTTPEVHSIFLEGHTFLVRNHRQASLGISPITFLTAQTLLRDLGQFLLFCHIPSHQHDGMEAYVKVDSCPEEPQLRMKNNEEAEDYDDDLTDSEMDVVRFDDDNSPSIIQARSGAKKHPKTWVHYIAAEEEDWDYAPLVLAPDDRSYKSQYLNNGPQRIGRKYKKVRFMAYTDETFKTREAIQHESGILGPLLYGEVGDTLLIIFKNQASRPYNIYPHGITDVRPLYSRRLPKGVKHLKDFPILPGEIFKYKWTITVEDGPTKSDPRCLTRYYSSFVNWERDLASGLIGPLLICYKESVDQRGNQIMSDKRNVILFSVFDENRSWYLTENIQRFLPNPAGVQLEDPEFQASNIMHSINGYVFDSLQLSVCLHEVAYWYILSIGAQTDFLSVFFSGYTFKHKGVYEDTLTLFPFSGETVFMSMENPGLWILGCHNSDFRNRGMTALLKVSSCDWNTGDYEEDSYEDISAYFDSKNNAIEPRSFSQNPPVLKRHQREGTRTTLQSDQEEIDYDDTISVEMKKEDFDIYDEDENQSPRSFQKKTRHYFIAAVERLWDYGMSSSPHVLRNRAQSGSVPQFKKVVFQEFTDGSFTQPLYRGELNEHLGLLGPYIRAEVEDNIMVTFRNQASRPYSFYSSLISYEEDQRQGAEPRKNFVKPNETKTYFWKVQHHMAPTKDEFDCKAWAYFSDVDLEKDVHSGLIGPLLVCHTNTLNPAHGRQVTVQEFALFFTIFDETKSWYFTENMERNCRAPCNIQMEDPTFKENYRFHAINGYIMDTLPGLVMAQDQRIRWYLLSMGSNENIHSIHFSGHVFTVRKKEEYKMALYNLYPGVFETVEMLPIKAGIWRVECLIGEHLHAGMSTLFLVYSNKCQNPLGMASGHIRDFQITASGQYGQWAPKLARLHYSGSINAWSTKEPFSWIKVDLLAPMIIHGIKTQGARQKFSSLYISQFIIMYSLDGKKWQTYRGNSTGTDMVFFGNVDSSGIKHNIFNPPIIARYIRLHPTHYSIRSTLRMELMGCDLNSCSMPLGMESKAISDAQITASSYFTNMFATWSPSKARLHLQGRSNAWRPQVNNPKEWLQVDFQKTMKVTGVTTQGVKSLDTSMYVKEFLISSSQDGHQWTLFFQNGKVKVFQGNQDSFTPVVNSLDPPLLTRYLRIHPQSWEHQIALRMEVLGCEAQDLY

SEQ ID NO: 2177 - DNA, 4371 bp, synthetic construct
  misc_feature 1..4371: note = Variant of human B-domain deleted Factor VIII
  source 1..4371: mol_type = other DNA
atgcagattgaactgtctacctgcttcttcctctgtttgctgaggttctgctttagcgccactagacggtactaccttggcgctgtggagctgtcctgggactatatgcagagtgatttgggagagcttcccgtcgacgcacgatttcctcctcgcgttccaaagtcatttccctttaacacaagccaggtgtacaagaagacgctcttcgtcgaattcaccgatcacctgttcaatatcgccaaacccagaccaccatggatgggtcttttggggcctaccatacaagcggaggtgtatgacacagttgttatcactctcaagaacatggcttctcatccggtaagtcttcacgcagtgggcgtgtcctactggaaagcttcagaaggagccgagtatgatgatcagacatcccagagggagaaagaagacgacaaggtatttccaggtgggtctcatacctatgtgtggcaagtgctcaaagagaatggccctatggccagcgatccgccgtgtttgacttacagctacctttcacacgttgacctcgtcaaggacctcaactccgggttgattggagccttgttggtatgcagggaaggatctcttgccaaagagaagacacagaccctggccaagtttatccttctctttgctgtgttcgatgagggcaaaagttggcatagcgaaacgaagaattccctcatgcaggatcgcgacgcagccagcgccagagcttggcccaagatgcacactgtgaacggatatgtcaataggacgcttcctggcttgattgggtgtcatcggaaaagtgtctactggcacgtgatcggaatggggacaacaccagaggtccactccatatttctcgaaggccataccttccttgttcgaaaccacagacaggcatccttggggatctctcccattacctttctcactgcccaaacgctgcttcgtgacttgggtcagttccttctcttttgccatatcccgtcacaccagcatgatggtatggaagcttatgtgaaagtcgacagttgtcctgaggagccacagttgcgcatgaagaataatgaagaagccgaggattacgacgacgatctcaccgattctgagatggacgtggtgaggtttgatgacgacaactctccctccatcattcaagctcggagcggggcgaagaaacaccccaagacttgggtccactatatagcggcggaagaggaggattgggattacgctcctcttgtattggcaccagatgaccgctcatacaaaagccagtacctcaacaacggaccgcagagaattggccggaagtataagaaagtgcgatttatggcctatacagacgaaacctttaagacaagggaggccatccagcatgagagtgggattttgggacctcttctttacggcgaagttggtgataccctcctcatcatcttcaagaatcaagcttctcgcccctataacatttacccacacgggatcactgacgttaggcctttgtatagcagaagacttcccaaaggcgtgaagcatctcaaagacttccccattttgccaggcgagatctttaagtacaaatggaccattacagtggaagatggaccgactaaaccggaccctcgatgccttacgcggtactattcctccttcgtgaattgggagagagatttggcaagcggactcataggaccactcctcatctgttacaaggaatctgtagaccagaggggtaaccagattatgagtgataaacgcaatgtgatcctttttagcgtcttcgacgagaaccggtcctggtacttgaccgagaatatacaaaggttccttcccaaccccgcaggcgttcagttggaagaccctgagtttcaggccagcaatattatgcactcaatcaacggctatgtgtttgatagtctccagctttctgtttgcctccatgaagtagcctattggtacatcttgtcaattggtgctcaaacagacttcctctccgtcttcttctccggctacacctttaagcacaagggcgtgtatgaggacactctcacactctttccattttctggagaaaccgtgttcatgagcatggagaatccaggcctttggatcttgggttgccacaacagtgattttcgcaatcggggaatgactgctctcctcaaagtcagcagctgtgattggaacacaggcgactatgaaggggattcttacgaggacataagtgcctactttgactccaagaataacgccattgagcccagatcattctcccagaatcctcccgtgcttaaaaggcatcagcgcgaaggtaccagaactactcttcagtctgatcaagaggagattgactatgacgacaccattagcgtggaaatgaagaaggaggatttcgatatctatgacgaagatgagaaccagtctccgcggagctttcagaagaagacgcgacactacttcattgcagcagtcgaaaggctttgggactacggtatgtcatcatcccctcatgtgttgcgcaatagagctcagagtggaagtgttccacagttcaagaaagtcgtctttcaagagtttacagatggcagcttcacacagcctctctatcggggcgagcttaacgaacatttgggactccttggtccctatatccgagccgaagtggaggacaacattatggttacctttaggaatcaagcctctcgcccctacagcttctactcctccctcatcagttatgaggaggatcagagacaaggcgctgaaccacggaagaactttgtgaaaccgaatgagacgaagacctacttctggaaagtacagcaccacatggcccccacaaaagacgaattcgattgcaaagcatgggcgtatttttcagacgttgacttggagaaagatgtacattcaggacttattggtcctttgttggtgtgtcacactaacactctcaatccagcccatggcaggcaggtgacagtccaggaattcgctcttttctttaccatctttgatgagaccaagtcctggtacttcacggaaaacatggagcgcaattgcagagccccctgtaacatacagatggaggaccctacctttaaggaaaattatcggttccacgcaatcaacggatacattatggatacactccctggccttgtgatggctcaggaccaacgaatcaggtggtacctcctcagcatgggttctaatgaaaacatacactccattcacttttcaggacatgtgttcactgtccggaagaaagaagagtataagatggccctctacaatttgtatccaggcgtgtttgagaccgttgaaatgcttccctctaaagctggcatctggagagtagagtgcttgatcggagaacatcttcacgcaggtatgagcaccttgttcctcgtgtacagcaacaaatgtcagaatccacttggcatggccagtggacacattcgcgactttcagatcacagcatctggccagtatggacaatgggccccaaagttggctcgcctccattactccggtagcataaatgcgtggtccactaaagaacctttcagctggattaaggtcgatcttcttgcccccatgatcatccacggcattaagacacagggagcgaggcagaaattctcctccctctacatctcacagttcattattatgtatagtttggacggcaagaagtggcaaacttatagaggtaacagtactggaacagacatggtgttcttcggcaacgttgatagctctggcatcaaacacaacatctttaatcctcccataatagctcggtacatcagattgcatccgacccactacagcattaggagtacactccgaatggagcttatgggttgcgacttgaattcctgttcaatgccactcggaatggagtctaaagccatctctgatgcacagataaccgccagtagctactttacgaacatgtttgctacgtggtcaccctctaaggcaaggcttcatttgcaaggccggtctaatgcctggagacctcaggtgaacaacccgaaagaatggctccaggtggactttcagaagaccatgaaagtaacaggtgtcactactcagggagttaagtccttggatactagcatgtatgtgaaggagttccttatttcctcatcacaagatggccaccagtggaccctcttctttcagaatggtaaggtcaaagtgtttcagggcaatcaagacagcttcacacccgtggtgaacagtcttgatcctccactcttgacacgataccttcgaatccatccacagtcttgggagcaccagattgcattgcgcatggaagtacttggatgcgaggctcaggacctctac

SEQ ID NO: 2178 - protein, 1457 aa, synthetic construct
  REGION 1..1457: note = Variant of human B-domain deleted Factor VIII
MQIELSTCFFLCLLRFCFSATRRYYLGAVELSWDYMQSDLGELPVDARFPPRVPKSFPFNTSQVYKKTLFVEFTDHLFNIAKPRPPWMGLLGPTIQAEVYDTVVITLKNMASHPVSLHAVGVSYWKASEGAEYDDQTSQREKEDDKVFPGGSHTYVWQVLKENGPMASDPPCLTYSYLSHVDLVKDLNSGLIGALLVCREGSLAKEKTQTLAKFILLFAVFDEGKSWHSETKNSLMQDRDAASARAWPKMHTVNGYVNRTLPGLIGCHRKSVYWHVIGMGTTPEVHSIFLEGHTFLVRNHRQASLGISPITFLTAQTLLRDLGQFLLFCHIPSHQHDGMEAYVKVDSCPEEPQLRMKNNEEAEDYDDDLTDSEMDVVRFDDDNSPSIIQARSGAKKHPKTWVHYIAAEEEDWDYAPLVLAPDDRSYKSQYLNNGPQRIGRKYKKVRFMAYTDETFKTREAIQHESGILGPLLYGEVGDTLLIIFKNQASRPYNIYPHGITDVRPLYSRRLPKGVKHLKDFPILPGEIFKYKWTITVEDGPTKPDPRCLTRYYSSFVNWERDLASGLIGPLLICYKESVDQRGNQIMSDKRNVILFSVFDENRSWYLTENIQRFLPNPAGVQLEDPEFQASNIMHSINGYVFDSLQLSVCLHEVAYWYILSIGAQTDFLSVFFSGYTFKHKGVYEDTLTLFPFSGETVFMSMENPGLWILGCHNSDFRNRGMTALLKVSSCDWNTGDYEGDSYEDISAYFDSKNNAIEPRSFSQNPPVLKRHQREGTRTTLQSDQEEIDYDDTISVEMKKEDFDIYDEDENQSPRSFQKKTRHYFIAAVERLWDYGMSSSPHVLRNRAQSGSVPQFKKVVFQEFTDGSFTQPLYRGELNEHLGLLGPYIRAEVEDNIMVTFRNQASRPYSFYSSLISYEEDQRQGAEPRKNFVKPNETKTYFWKVQHHMAPTKDEFDCKAWAYFSDVDLEKDVHSGLIGPLLVCHTNTLNPAHGRQVTVQEFALFFTIFDETKSWYFTENMERNCRAPCNIQMEDPTFKENYRFHAINGYIMDTLPGLVMAQDQRIRWYLLSMGSNENIHSIHFSGHVFTVRKKEEYKMALYNLYPGVFETVEMLPSKAGIWRVECLIGEHLHAGMSTLFLVYSNKCQNPLGMASGHIRDFQITASGQYGQWAPKLARLHYSGSINAWSTKEPFSWIKVDLLAPMIIHGIKTQGARQKFSSLYISQFIIMYSLDGKKWQTYRGNSTGTDMVFFGNVDSSGIKHNIFNPPIIARYIRLHPTHYSIRSTLRMELMGCDLNSCSMPLGMESKAISDAQITASSYFTNMFATWSPSKARLHLQGRSNAWRPQVNNPKEWLQVDFQKTMKVTGVTTQGVKSLDTSMYVKEFLISSSQDGHQWTLFFQNGKVKVFQGNQDSFTPVVNSLDPPLLTRYLRIHPQSWEHQIALRMEVLGCEAQDLY

SEQ ID NO: 2179 - DNA, 4371 bp, synthetic construct
  misc_feature 1..4371: note = Variant of human B-domain deleted Factor VIII
  source 1..4371: mol_type = other DNA
atgcagattgaactgtctacctgcttcttcctctgtttgctgaggttctgctttagcgccactagacggtactaccttggcgctgtggagctgtcctgggactatatgcagagtgatttgggagagcttcccgtcgacgcacgatttcctcctcgcgttccaaagtcatttccctttaacacaagccaggtgtacaagaagacgctcttcgtcgaattcaccgatcacctgttcaatatcgccaaacccagaccaccatggatgggtcttttggggcctaccatacaagcggaggtgtatgacacagttgttatcactctcaagaacatggcttctcatccggtaagtcttcacgcagtgggcgtgtcctactggaaagcttcagaaggagccgagtatgatgatcagacatcccagagggagaaagaagacgacaaggtatttccaggtgggtctcatacctatgtgtggcaagtgctcaaagagaatggccctatggcaagcgatccgccgtgtttgacttacagctacctttcacacgttgacctcgtcaaggacctcaactccgggttgattggagccttgttggtatgcagggaaggatctcttgccaaagagaagacacagaccctggccaagtttatccttctctttgctgtgttcgatgagggcaaaagttggcatagcgaaacgaagaattccctcatgcaggatcgcgacgcagccagcgccagagcttggcccaagatgcacactgtgaacggatatgtcaataggacgcttcctggcttgattgggtgtcatcggaaaagtgtctactggcacgtgatcggaatggggacaacaccagaggtccactccatatttctcgaaggccataccttccttgttcgaaaccacagacaggcatccttggggatctctcccattacctttctcactgcccaaacgctgcttcgtgacttgggtcagttccttctcttttgccatatcccgtcacaccagcatgatggtatggaagcttatgtgaaagtcgacagttgtcctgaggagccacagttgcgcatgaagaataatgaagaagccgaggattacgacgacgatctcaccgattctgagatggacgtggtgaggtttgatgacgacaactctccctccatcattcaagctcggagcggggcgaagaaacaccccaagacttgggtccactatatagcggcggaagaggaggattgggattacgctcctcttgtattggcaccagatgaccgctcatacaaaagccagtacctcaacaacggaccgcagagaattggccggaagtataagaaagtgcgatttatggcctatacagacgaaacctttaagacaagggaggccatccagcatgagagtgggattttgggacctcttctttacggcgaagttggtgataccctcctcatcatcttcaagaatcaagcttctcgcccctataacatttacccacacgggatcactgacgttaggcctttgtatagcagaagacttcccaaaggcgtgaagcatctcaaagacttccccattttgccaggcgagatctttaagtacaaatggaccattacagtggaagatggaccgactaaaccggaccctcgatgccttacgcggtactattcctccttcgtgaattgggagagagatttggcaagcggactcataggaccactcctcatctgttacaaggaatctgtagaccagaggggtaaccagattatgagtgataaacgcaatgtgatcctttttagcgtcttcgacgagaaccggtcctggtacttgaccgagaatatacaaaggttccttcccaaccccgcaggcgttcagttggaagaccctgagtttcaggccagcaatattatgcactcaatcaacggctatgtgtttgatagtctccagctttctgtttgcctccatgaagtagcctattggtacatcttgtcaattggtgctcaaacagacttcctctccgtcttcttctccggctacacctttaagcacaagaacgtgtatgaggacactctcacactctttccattttctggagaaaccgtgttcatgagcatggagaatccaggcctttggatcttgggttgccacaacagtgattttcgcaatcggggaatgactgctctcctcaaagtcagcagctgtgattggaacacaggcgactatgaggaagattcttacgaggacataagtgcctactttgactccgagaataacgccattgagcccagatcattctcccagaatcctcccgtgcttaaaaggcatcagcgcgaaggtaccagaactactcttcagtctgatcaagaggagattgactatgacgacaccattagcgtggaaatgaagaaggaggatttcgatatctatgacgaagatgagaaccagtctccgcggagctttcagaagaagacgcgacactacttcattgcagcagtcgaaaggctttgggactacggtatgtcatcatcccctcatgtgttgcgcaatagagctcagagtggaagtgttccacagttcaagaaagtcgtctttcaagagtttacagatggcagcttcacacagcctctctatcggggcgagcttaacgaacatttgggactccttggtccctatatccgagccgaagtggaggacaacattatggttacctttaggaatcaagcctctcgcccctacagcttctactcctccctcatcagttatgaggaggatcagagacaaggcgctgaaccacggaagaactttgtgaaaccgaatgagacgaagacctacttctggaaagtacagcaccacatggcccccacaaaagacgaattcgattgcaaagcatgggcgtatttttcagacgttgacttggagaaagatgtacattcaggacttattggtcctttgttggtgtgtcacactaacactctcaatccagcccatggcaggcaggtgacagtccaggaattcgctcttttctttaccatctttgatgagaccaagtcctggtacttcacggaaaacatggagcgcaattgcagagccccctgtaacatacagatggaggaccctacctttaaggaaaattatcggttccacgcaatcaacggatacattatggatacactccctggccttgtgatggctcaggaccaacgaatcaggtggtacctcctcagcatgggttctaatgagaacatacactccattcacttttcaggacatgtgttcactgtccggaagaaagaagagtataagatggccctctacaatttgtatccaggcgtgtttgagaccgttgaaatgcttcccattaaagctggcatctggagagtagagtgcttgatcggagaacatcttcacgcaggtatgagcaccttgttcctcgtgtacagcaacaaatgtcagaatccacttggcatggccagtggacacattcgcgactttcagatcacagcatctggccagtatggacaatgggccccaaagttggctcgcctccattactccggtagcataaatgcgtggtccactaaagaacctttcagctggattaaggtcgatcttcttgcccccatgatcatccacggcattaagacacagggagcgaggcagaaattctcctccctctacatctcacagttcattattatgtatagtttggacggcaagaagtggcaaacttatagaggtaacagtactggaacagacatggtgttcttcggcaacgttgatagctctggcatcaaacacaacatctttaatcctcccataatagctcggtacatcagattgcatccgacccactacagcattaggagtacactccgaatggagcttatgggttgcgacttgaattcctgttcaatgccactcggaatggagtctaaagccatctctgatgcacagataaccgccagtagctactttacgaacatgtttgctacgtggtcaccctctaaggcaaggcttcatttgcaaggccggtctaatgcctggagacctcaggtgaacaacccgaaagaatggctccaggtggactttcagaagaccatgaaagtaacaggtgtcactactcagggagttaagtccttggatactagcatgtatgtgaaggagttccttatttcctcatcacaagatggccaccagtggaccctcttctttcagaatggtaaggtcaaagtgtttcagggcaatcaagacagcttcacacccgtggtgaacagtcttgatcctccactcttgacacgataccttcgaatccatccacagtcttgggagcaccagattgcattgcgcatggaagtacttggatgcgaggctcaggacctctac

SEQ ID NO: 2180 - protein, 1457 aa, synthetic construct
  REGION 1..1457: note = Variant of human B-domain deleted Factor VIII
MQIELSTCFFLCLLRFCFSATRRYYLGAVELSWDYMQSDLGELPVDARFPPRVPKSFPFNTSQVYKKTLFVEFTDHLFNIAKPRPPWMGLLGPTIQAEVYDTVVITLKNMASHPVSLHAVGVSYWKASEGAEYDDQTSQREKEDDKVFPGGSHTYVWQVLKENGPMASDPPCLTYSYLSHVDLVKDLNSGLIGALLVCREGSLAKEKTQTLAKFILLFAVFDEGKSWHSETKNSLMQDRDAASARAWPKMHTVNGYVNRTLPGLIGCHRKSVYWHVIGMGTTPEVHSIFLEGHTFLVRNHRQASLGISPITFLTAQTLLRDLGQFLLFCHIPSHQHDGMEAYVKVDSCPEEPQLRMKNNEEAEDYDDDLTDSEMDVVRFDDDNSPSIIQARSGAKKHPKTWVHYIAAEEEDWDYAPLVLAPDDRSYKSQYLNNGPQRIGRKYKKVRFMAYTDETFKTREAIQHESGILGPLLYGEVGDTLLIIFKNQASRPYNIYPHGITDVRPLYSRRLPKGVKHLKDFPILPGEIFKYKWTITVEDGPTKPDPRCLTRYYSSFVNWERDLASGLIGPLLICYKESVDQRGNQIMSDKRNVILFSVFDENRSWYLTENIQRFLPNPAGVQLEDPEFQASNIMHSINGYVFDSLQLSVCLHEVAYWYILSIGAQTDFLSVFFSGYTFKHKNVYEDTLTLFPFSGETVFMSMENPGLWILGCHNSDFRNRGMTALLKVSSCDWNTGDYEEDSYEDISAYFDSENNAIEPRSFSQNPPVLKRHQREGTRTTLQSDQEEIDYDDTISVEMKKEDFDIYDEDENQSPRSFQKKTRHYFIAAVERLWDYGMSSSPHVLRNRAQSGSVPQFKKVVFQEFTDGSFTQPLYRGELNEHLGLLGPYIRAEVEDNIMVTFRNQASRPYSFYSSLISYEEDQRQGAEPRKNFVKPNETKTYFWKVQHHMAPTKDEFDCKAWAYFSDVDLEKDVHSGLIGPLLVCHTNTLNPAHGRQVTVQEFALFFTIFDETKSWYFTENMERNCRAPCNIQMEDPTFKENYRFHAINGYIMDTLPGLVMAQDQRIRWYLLSMGSNENIHSIHFSGHVFTVRKKEEYKMALYNLYPGVFETVEMLPIKAGIWRVECLIGEHLHAGMSTLFLVYSNKCQNPLGMASGHIRDFQITASGQYGQWAPKLARLHYSGSINAWSTKEPFSWIKVDLLAPMIIHGIKTQGARQKFSSLYISQFIIMYSLDGKKWQTYRGNSTGTDMVFFGNVDSSGIKHNIFNPPIIARYIRLHPTHYSIRSTLRMELMGCDLNSCSMPLGMESKAISDAQITASSYFTNMFATWSPSKARLHLQGRSNAWRPQVNNPKEWLQVDFQKTMKVTGVTTQGVKSLDTSMYVKEFLISSSQDGHQWTLFFQNGKVKVFQGNQDSFTPVVNSLDPPLLTRYLRIHPQSWEHQIALRMEVLGCEAQDLY

SEQ ID NO: 2181 - DNA, 4371 bp, synthetic construct
  misc_feature 1..4371: note = Variant of human B-domain deleted Factor VIII
  source 1..4371: mol_type = other DNA
atgcagattgaactgtctacctgcttcttcctctgtttgctgaggttctgctttagcgccactagacggtactaccttggcgctgtggagctgtcctgggactatatgcagagtgatttgggagagcttcccgtcgacgcacgatttcctcctcgcgttccaaagtcatttccctttaacacaagccaggtgtacaagaagacgctcttcgtcgaattcaccgatcacctgttcaatatcgccaaacccagaccaccatggatgggtcttttggggcctaccatacaagcggaggtgtatgacacagttgttatcactctcaagaacatggcttctcatccggtaagtcttcacgcagtgggcgtgtcctactggaaagcttcagaaggagccgagtatgatgatcagacatcccagagggagaaagaagacgacaaggtatttccaggtgggtctcatacctatgtgtggcaagtgctcaaagagaatggccctatggcaagcgatccgccgtgtttgacttacagctacctttcacacgttgacctcgtcaaggacctcaactccgggttgattggagccttgttggtatgcagggaaggatctcttgccaaagagaagacacagaccctggccaagtttatccttctctttgctgtgttcgatgagggcaaaagttggcatagcgaaacgaagaattccctcatgcaggatcgcgacgcagccagcgccagagcttggcccaagatgcacactgtgaacggatatgtcaataggacgcttcctggcttgattgggtgtcatcggaaaagtgtctactggcacgtgatcggaatggggacaacaccagaggtccactccatatttctcgaaggccataccttccttgttcgaaaccacagacaggcatccttggggatctctcccattacctttctcactgcccaaacgctgcttcgtgacttgggtcagttccttctcttttgccatatcccgtcacaccagcatgatggtatggaagcttatgtgaaagtcgacagttgtcctgaggagccacagttgcgcatgaagaataatgaagaagccgaggattacgacgacgatctcaccgattctgagatggacgtggtgaggtttgatgacgacaactctccctccatcattcaagctcggagcggggcgaagaaacaccccaagacttgggtccactatatagcggcggaagaggaggattgggattacgctcctcttgtattggcaccagatgaccgctcatacaaaagccagtacctcaacaacggaccgcagagaattggccggaagtataagaaagtgcgatttatggcctatacagacgaaacctttaagacaagggaggccatccagcatgagagtgggattttgggacctcttctttacggcgaagttggtgataccctcctcatcatcttcaagaatcaagcttctcgcccctataacatttacccacacgggatcactgacgttaggcctttgtatagcagaagacttcccaaaggcgtgaagcatctcaaagacttccccattttgccaggcgagatctttaagtacaaatggaccattacagtggaagatggaccgactaaaccggaccctcgatgccttacgcggtactattcctccttcgtgaattgggagagagatttggcaagcggactcataggaccactcctcatctgttacaaggaatctgtagaccagaggggtaaccagattatgagtgataaacgcaatgtgatcctttttagcgtcttcgacgagaaccggtcctggtacttgaccgagaatatacaaaggttccttcccaaccccgcaggcgttcagttggaagaccctgagtttcaggccagcaatattatgcactcaatcaacggctatgtgtttgatagtctccagctttctgtttgcctccatgaagtagcctattggtacatcttgtcaattggtgctcaaacagacttcctctccgtcttcttctccggctacacctttaagcacaagggcgtgtatgaggacactctcacactctttccattttctggagaaaccgtgttcatgagcatggagaatccaggcctttggatcttgggttgccacaacagtgattttcgcaatcggggaatgactgctctcctcaaagtcagcagctgtgattggaacacaggcgactatgaggaagattcttacgaggacataagtgcctactttgactccaagaataacgccattgagcccagatcattctcccagaatcctcccgtgcttaaaaggcatcagcgcgaaggtaccagaactactcttcagtctgatcaagaggagattgactatgacgacaccattagcgtggaaatgaagaaggaggatttcgatatctatgacgaagatgagaaccagtctccgcggagctttcagaagaagacgcgacactacttcattgcagcagtcgaaaggctttgggactacggtatgtcatcatcccctcatgtgttgcgcaatagagctcagagtggaagtgttccacagttcaagaaagtcgtctttcaagagtttacagatggcagcttcacacagcctctctatcggggcgagcttaacgaacatttgggactccttggtccctatatccgagccgaagtggaggacaacattatggttacctttaggaatcaagcctctcgcccctacagcttctactcctccctcatcagttatgaggaggatcagagacaaggcgctgaaccacggaagaactttgtgaaaccgaatgagacgaagacctacttctggaaagtacagcaccacatggcccccacaaaagacgaattcgattgcaaagcatgggcgtatttttcagacgttgacttggagaaagatgtacattcaggacttattggtcctttgttggtgtgtcacactaacactctcaatccagcccatggcaggcaggtgacagtccaggaattcgctcttttctttaccatctttgatgagaccaagtcctggtacttcacggaaaacatggagcgcaattgcagagccccctgtaacatacagatggaggaccctacctttaaggaaaattatcggttccacgcaatcaacggatacattatggatacactccctggccttgtgatggctcaggaccaacgaatcaggtggtacctcctcagcatgggttctaatgagaacatacactccattcacttttcaggacatgtgttcactgtccggaaggcggaagagtataagatggccctctacaatttgtatccaggcgtgtttgagaccgttgaaatgcttcccagtaaagctggcatctggagagtagagtgcttgatcggagaacatcttcacgcaggtatgagcaccttgttcctcgtgtacagcaacaaatgtcagaatccacttggcatggccagtggacacattcgcgactttcagatcacagcatctggccagtatggacaatgggccccaaagttggctcgcctccattactccggtagcataaatgcgtggtccactaaagaacctttcagctggattaaggtcgatcttcttgcccccatgatcatccacggcattaagacacagggagcgaggcagaaattctcctccctctacatctcacagttcattattatgtatagtttggacggcaagaagtggcaaacttatagaggtaacagtactggaacagacatggtgttcttcggcaacgttgatagctctggcatcaaacacaacatctttaatcctcccataatagctcggtacatcagattgcatccgacccactacagcattaggagtacactccgaatggagcttatgggttgcgacttgaattcctgttcaatgccactcggaatggagtctaaagccatctctgatgcacagataaccgccagtagctactttacgaacatgtttgctacgtggtcaccctctaaggcaaggcttcatttgcaaggccggtctaatgcctggagacctcaggtgaacaacccgaaagaatggctccaggtggactttcagaagaccatgaaagtaacaggtgtcactactcagggagttaagtccttggatactagcatgtatgtgaaggagttccttatttcctcatcacaagatggccaccagtggaccctcttctttcagaatggtaaggtcaaagtgtttcagggcaatcaagacagcttcacacccgtggtgaacagtcttgatcctccactcttgacacgataccttcgaatccatccacagtcttgggagcaccagattgcattgcgcatggaagtacttggatgcgaggctcaggacctctac

SEQ ID NO: 2182 - protein, 1457 aa, synthetic construct
  REGION 1..1457: note = Variant of human B-domain deleted Factor VIII
MQIELSTCFFLCLLRFCFSATRRYYLGAVELSWDYMQSDLGELPVDARFPPRVPKSFPFNTSQVYKKTLFVEFTDHLFNIAKPRPPWMGLLGPTIQAEVYDTVVITLKNMASHPVSLHAVGVSYWKASEGAEYDDQTSQREKEDDKVFPGGSHTYVWQVLKENGPMASDPPCLTYSYLSHVDLVKDLNSGLIGALLVCREGSLAKEKTQTLAKFILLFAVFDEGKSWHSETKNSLMQDRDAASARAWPKMHTVNGYVNRTLPGLIGCHRKSVYWHVIGMGTTPEVHSIFLEGHTFLVRNHRQASLGISPITFLTAQTLLRDLGQFLLFCHIPSHQHDGMEAYVKVDSCPEEPQLRMKNNEEAEDYDDDLTDSEMDVVRFDDDNSPSIIQARSGAKKHPKTWVHYIAAEEEDWDYAPLVLAPDDRSYKSQYLNNGPQRIGRKYKKVRFMAYTDETFKTREAIQHESGILGPLLYGEVGDTLLIIFKNQASRPYNIYPHGITDVRPLYSRRLPKGVKHLKDFPILPGEIFKYKWTITVEDGPTKPDPRCLTRYYSSFVNWERDLASGLIGPLLICYKESVDQRGNQIMSDKRNVILFSVFDENRSWYLTENIQRFLPNPAGVQLEDPEFQASNIMHSINGYVFDSLQLSVCLHEVAYWYILSIGAQTDFLSVFFSGYTFKHKGVYEDTLTLFPFSGETVFMSMENPGLWILGCHNSDFRNRGMTALLKVSSCDWNTGDYEEDSYEDISAYFDSKNNAIEPRSFSQNPPVLKRHQREGTRTTLQSDQEEIDYDDTISVEMKKEDFDIYDEDENQSPRSFQKKTRHYFIAAVERLWDYGMSSSPHVLRNRAQSGSVPQFKKVVFQEFTDGSFTQPLYRGELNEHLGLLGPYIRAEVEDNIMVTFRNQASRPYSFYSSLISYEEDQRQGAEPRKNFVKPNETKTYFWKVQHHMAPTKDEFDCKAWAYFSDVDLEKDVHSGLIGPLLVCHTNTLNPAHGRQVTVQEFALFFTIFDETKSWYFTENMERNCRAPCNIQMEDPTFKENYRFHAINGYIMDTLPGLVMAQDQRIRWYLLSMGSNENIHSIHFSGHVFTVRKAEEYKMALYNLYPGVFETVEMLPSKAGIWRVECLIGEHLHAGMSTLFLVYSNKCQNPLGMASGHIRDFQITASGQYGQWAPKLARLHYSGSINAWSTKEPFSWIKVDLLAPMIIHGIKTQGARQKFSSLYISQFIIMYSLDGKKWQTYRGNSTGTDMVFFGNVDSSGIKHNIFNPPIIARYIRLHPTHYSIRSTLRMELMGCDLNSCSMPLGMESKAISDAQITASSYFTNMFATWSPSKARLHLQGRSNAWRPQVNNPKEWLQVDFQKTMKVTGVTTQGVKSLDTSMYVKEFLISSSQDGHQWTLFFQNGKVKVFQGNQDSFTPVVNSLDPPLLTRYLRIHPQSWEHQIALRMEVLGCEAQDLY

SEQ ID NO: 2183 - DNA, 4371 bp, synthetic construct
  misc_feature 1..4371: note = Variant of human B-domain deleted Factor VIII
  source 1..4371: mol_type = other DNA
atgcagattgaactgtctacctgcttcttcctctgtttgctgaggttctgctttagcgccactagacggtactaccttggcgctgtggagctgtcctgggactatatgcagagtgatttgggagagcttcccgtcgacgcacgatttcctcctcgcgttccaaagtcatttccctttaacacaagccaggtgtacaagaagacgctcttcgtcgaattcaccgatcacctgttcaatatcgccaaacccagaccaccatggatgggtcttttggggcctaccatacaagcggaggtgtatgacacagttgttatcactctcaagaacatggcttctcatccggtaagtcttcacgcagtgggcgtgtcctactggaaagcttcagaaggagccgagtatgatgatcagacatcccagagggagaaagaagacgacaaggtatttccaggtgggtctcatacctatgtgtggcaagtgctcaaagagaatggccctatggcaagcgatccgccgtgtttgacttacagctacctttcacacgttgacctcgtcaaggacctcaactccgggttgattggagccttgttggtatgcagggaaggatctcttgccaaagagaagacacagaccctggccaagtttatccttctctttgctgtgttcgatgagggcaaaagttggcatagcgaaacgaagaattccctcatgcaggatcgcgacgcagccagcgccagagcttggcccaagatgcacactgtgaacggatatgtcaataggacgcttcctggcttgattgggtgtcatcggaaaagtgtctactggcacgtgatcggaatggggacaacaccagaggtccactccatatttctcgaaggccataccttccttgttcgaaaccacagacaggcatccttggggatctctcccattacctttctcactgcccaaacgctgcttcgtgacttgggtcagttccttctcttttgccatatcccgtcacaccagcatgatggtatggaagcttatgtgaaagtcgacagttgtcctgaggagccacagttgcgcatgaagaataatgaagaagccgaggattacgacgacgatctcaccgattctgagatggacgtggtgaggtttgatgacgacaactctccctccatcattcaagctcggagcggggcgaagaaacaccccaagacttgggtccactatatagcggcggaagaggaggattgggattacgctcctcttgtattggcaccagatgaccgctcatacaaaagccagtacctcaacaacggaccgcagagaattggccggaagtataagaaagtgcgatttatggcctatacagacgaaacctttaagacaagggaggccatccagcatgagagtgggattttgggacctcttctttacggcgaagttggtgataccctcctcatcatcttcaagaatcaagcttctcgcccctataacatttacccacacgggatcactgacgttaggcctttgtatagcagaagacttcccaaaggcgtgaagcatctcaaagacttccccattttgccaggcgagatctttaagtacaaatggaccattacagtggaagatggaccgactaaatcagaccctcgatgccttacgcggtactattcctccttcgtgaattgggagagagatttggcaagcggactcataggaccactcctcatctgttacaaggaatctgtagaccagaggggtaaccagattatgagtgataaacgcaatgtgatcctttttagcgtcttcgacgagaaccggtcctggtacttgaccgagaatatacaaaggttccttcccaaccccgcaggcgttcagttggaagaccctgagtttcaggccagcaatattatgcactcaatcaacggctatgtgtttgatagtctccagctttctgtttgcctccatgaagtagcctattggtacatcttgtcaattggtgctcaaacagacttcctctccgtcttcttctccggctacacctttaagcacaagggcgtgtatgaggacactctcacactctttccattttctggagaaaccgtgttcatggaaatggagaatccaggcctttggatcttgggttgccacaacagtgattttcgcaatcggggaatgactgctctcctcaaagtcagcagctgtgattggaacacaggcgactattatgaggattcttacgaggacataagtgcctactttgactccaagaataacgccattgagcccagatcattctcccagaatcctcccgtgcttaaaaggcatcagcgcgaaggtaccagaactactcttcagtctgatcaagaggagattgactatgacgacaccattagcgtggaaatgaagaaggaggatttcgatatctatgacgaagatgagaaccagtctccgcggagctttcagaagaagacgcgacactacttcattgcagcagtcgaaaggctttgggactacggtatgtcatcatcccctcatgtgttgcgcaatagagctcagagtggaagtgttccacagttcaagaaagtcgtctttcaagagtttacagatggcagcttcacacagcctctctatcggggcgagcttaacgaacatttgggactccttggtccctatatccgagccgaagtggaggacaacattatggttacctttaggaatcaagcctctcgcccctacagcttctactcctccctcatcagttatgaggaggatcagagacaaggcgctgaaccacggaagaactttgtgaaaccgaatgagacgaagacctacttctggaaagtacagcaccacatggcccccacaaaagacgaattcgattgcaaagcatgggcgtatttttcagacgttgacttggagaaagatgtacattcaggacttattggtcctttgttggtgtgtcacactaacactctcaatccagcccatggcaggcaggtgacagtccaggaattcgctcttttctttaccatctttgatgagaccaagtcctggtacttcacggaaaacatggagcgcaattgcagagccccctgtaacatacagatggaggaccctacctttaaggaaaattatcggttccacgcaatcaacggatacattatggatacactccctggccttgtgatggctcaggaccaacgaatcaggtggtacctcctcagcatgggttctaatgagaacatacactccattcacttttcaggacatgtgttcactgtccggaaggcggaagagtataagatggccctctacaatttgtatccaggcgtgtttgagaccgttgaaatgcttccctctaaagctggcatctggagagtagagtgcttgatcggagaacatcttcacgcaggtatgagcaccttgttcctcgtgtacagcaacaaatgtcagaatccacttggcatggccagtggacacattcgcgactttcagatcacagcatctggccagtatggacaatgggccccaaagttggctcgcctccattactccggtagcataaatgcgtggtccactaaagaacctttcagctggattaaggtcgatcttcttgcccccatgatcatccacggcattaagacacagggagcgaggcagaaattctcctccctctacatctcacagttcattattatgtatagtttggacggcaagaagtggcaaacttatagaggtaacagtactggaacagacatggtgttcttcggcaacgttgatagctctggcatcaaacacaacatctttaatcctcccataatagctcggtacatcagattgcatccgacccactacagcattaggagtacactccgaatggagcttatgggttgcgacttgaattcctgttcaatgccactcggaatggagtctaaagccatctctgatgcacagataaccgccagtagctactttacgaacatgtttgctacgtggtcaccctctaaggcaaggcttcatttgcaaggccggtctaatgcctggagacctcaggtgaacaacccgaaagaatggctccaggtggactttcagaagaccatgaaagtaacaggtgtcactactcagggagttaagtccttggatactagcatgtatgtgaaggagttccttatttcctcatcacaagatggccaccagtggaccctcttctttcagaatggtaaggtcaaagtgtttcagggcaatcaagacaacttcacacccgtggtgaacagtcttgatcctccactcttgacacgataccttcgaatccatccacagtcttgggagcaccagattgcattgcgcatggaagtacttggatgcgaggctcaggacctctac

SEQ ID NO: 2184 - protein, 1457 aa, synthetic construct
  REGION 1..1457: note = Variant of human B-domain deleted Factor VIII
MQIELSTCFFLCLLRFCFSATRRYYLGAVELSWDYMQSDLGELPVDARFPPRVPKSFPFNTSQVYKKTLFVEFTDHLFNIAKPRPPWMGLLGPTIQAEVYDTVVITLKNMASHPVSLHAVGVSYWKASEGAEYDDQTSQREKEDDKVFPGGSHTYVWQVLKENGPMASDPPCLTYSYLSHVDLVKDLNSGLIGALLVCREGSLAKEKTQTLAKFILLFAVFDEGKSWHSETKNSLMQDRDAASARAWPKMHTVNGYVNRTLPGLIGCHRKSVYWHVIGMGTTPEVHSIFLEGHTFLVRNHRQASLGISPITFLTAQTLLRDLGQFLLFCHIPSHQHDGMEAYVKVDSCPEEPQLRMKNNEEAEDYDDDLTDSEMDVVRFDDDNSPSIIQARSGAKKHPKTWVHYIAAEEEDWDYAPLVLAPDDRSYKSQYLNNGPQRIGRKYKKVRFMAYTDETFKTREAIQHESGILGPLLYGEVGDTLLIIFKNQASRPYNIYPHGITDVRPLYSRRLPKGVKHLKDFPILPGEIFKYKWTITVEDGPTKSDPRCLTRYYSSFVNWERDLASGLIGPLLICYKESVDQRGNQIMSDKRNVILFSVFDENRSWYLTENIQRFLPNPAGVQLEDPEFQASNIMHSINGYVFDSLQLSVCLHEVAYWYILSIGAQTDFLSVFFSGYTFKHKGVYEDTLTLFPFSGETVFMEMENPGLWILGCHNSDFRNRGMTALLKVSSCDWNTGDYYEDSYEDISAYFDSKNNAIEPRSFSQNPPVLKRHQREGTRTTLQSDQEEIDYDDTISVEMKKEDFDIYDEDENQSPRSFQKKTRHYFIAAVERLWDYGMSSSPHVLRNRAQSGSVPQFKKVVFQEFTDGSFTQPLYRGELNEHLGLLGPYIRAEVEDNIMVTFRNQASRPYSFYSSLISYEEDQRQGAEPRKNFVKPNETKTYFWKVQHHMAPTKDEFDCKAWAYFSDVDLEKDVHSGLIGPLLVCHTNTLNPAHGRQVTVQEFALFFTIFDETKSWYFTENMERNCRAPCNIQMEDPTFKENYRFHAINGYIMDTLPGLVMAQDQRIRWYLLSMGSNENIHSIHFSGHVFTVRKAEEYKMALYNLYPGVFETVEMLPSKAGIWRVECLIGEHLHAGMSTLFLVYSNKCQNPLGMASGHIRDFQITASGQYGQWAPKLARLHYSGSINAWSTKEPFSWIKVDLLAPMIIHGIKTQGARQKFSSLYISQFIIMYSLDGKKWQTYRGNSTGTDMVFFGNVDSSGIKHNIFNPPIIARYIRLHPTHYSIRSTLRMELMGCDLNSCSMPLGMESKAISDAQITASSYFTNMFATWSPSKARLHLQGRSNAWRPQVNNPKEWLQVDFQKTMKVTGVTTQGVKSLDTSMYVKEFLISSSQDGHQWTLFFQNGKVKVFQGNQDNFTPVVNSLDPPLLTRYLRIHPQSWEHQIALRMEVLGCEAQDLY

SEQ ID NO: 2185 - DNA, 4371 bp, synthetic construct
  misc_feature 1..4371: note = Variant of human B-domain deleted Factor VIII
  source 1..4371: mol_type = other DNA
atgcagattgaactgtctacctgcttcttcctctgtttgctgaggttctgctttagcgccactagacggtactaccttggcgctgtggagctgtcctgggactatatgcagagtgatttgggagagcttcccgtcgacgcacgatttcctcctcgcgttccaaagtcatttccctttaacacaagccaggtgtacaagaagacgctcttcgtcgaattcaccgatcacctgttcaatatcgccaaacccagaccaccatggatgggtcttttggggcctaccatacaagcggaggtgtatgacacagttgttatcactctcaagaacatggcttctcatccggtaagtcttcacgcagtgggcgtgtcctactggaaagcttcagaaggagccgagtatgatgatcagacatcccagagggagaaagaagacgacaaggtatttccaggtgggtctcatacctatgtgtggcaagtgctcaaagagaatggccctatggcaagcgatccgccgtgtttgacttacagctacctttcacacgttgacctcgtcaaggacctcaactccgggttgattggagccttgttggtatgcagggaaggatctcttgccaaagagaagacacagaccctggccaagtttatccttctctttgctgtgttcgatgagggcaaaagttggcatagcgaaacgaagaattccctcatgcaggatcgcgacgcagccagcgccagagcttggcccaagatgcacactgtgaacggatatgtcaataggacgcttcctggcttgattgggtgtcatcggaaaagtgtctactggcacgtgatcggaatggggacaacaccagaggtccactccatatttctcgaaggccataccttccttgttcgaaaccacagacaggcatccttggggatctctcccattacctttctcactgcccaaacgggtcttcgtgacttgggtcagttccttctcttttgccatatcccgtcacaccagcatgatggtatggaagcttatgtgaaagtcgacagttgtcctgaggagccacagttgcgcatgaagaataatgaagaagccgaggattacgacgacgatctcaccgattctgagatggacgtggtgaggtttgatgacgacaactctccctccatcattcaagctcggagcggggcgaagaaacaccccaagacttgggtccactatatagcggcggaagaggaggattgggattacgctcctcttgtattggcaccagatgaccgctcatacaaaagccagtacctcaacaacggaccgcagagaattggccggaagtataagaaagtgcgatttatggcctatacagacgaaacctttaagacaagggaggccatccagcatgagagtgggattttgggacctcttctttacggcgaagttggtgataccctcctcatcatcttcaagaatcaagcttctcgcccctataacatttacccacacgggatcactgacgttaggcctttgtatagcagaagacttcccaaaggcgtgaagcatctcaaagacttccccattttgccaggcgagatctttaagtacaaatggaccattacagtggaagatggaccgactaaatcggaccctcgatgccttacgcggtactattcctccttcgtgaattgggagagagatttggcaagcggactcataggaccactcctcatctgttacaaggaatctgtagaccagaggggtaaccagattatgagtgataaacgcaatgtgatcctttttagcgtcttcgacgagaaccggtcctggtacttgaccgagaatatacaaaggttccttcccaaccccgcaggcgttcagttggaagaccctgagtttcaggccagcaatattatgcactcaatcaacggctatgtgtttgatagtctccagctttctgtttgcctccatgaagtagcctattggtacatcttgtcaattggtgctcaaacagacttcctctccgtcttcttctccggctacacctttaagcacaagaacgtgtatgaggacactctcacactctttccattttctggagaaaccgtgttcatgagcatggagaatccaggcctttggatcttgggttgccacaacagtgattttcgcaatcggggaatgactgctctcctcaaagtcagcagctgtgattggaacacaggcgactatgaggaagattcttacgaggacataagtgcctactttgactccaagaataacgccattgagcccagatcattctcccagaatcctcccgtgcttaaaaggcatcagcgcgaaggtaccagaactactcttcagtctgatcaagaggagattgactatgacgacaccattagcgtggaaatgaagaaggaggatttcgatatctatgacgaagatgagaaccagtctccgcggagctttcagaagaagacgcgacactacttcattgcagcagtcgaaaggctttgggactacggtatgtcatcatcccctcatgtgttgcgcaatagagctcagagtggaagtgttccacagttcaagaaagtcgtctttcaagagtttacagatggcagcttcacacagcctctctatcggggcgagcttaacgaacatttgggactccttggtccctatatccgagccgaagtggaggacaacattatggttacctttaggaatcaagcctctcgcccctacagcttctactcctccctcatcagttatgaggaggatcagagacaaggcgctgaaccacggaagaactttgtgaaaccgaatgagacgaagacctacttctggaaagtacagcaccacatggcccccacaaaagacgaattcgattgcaaagcatgggcgtatttttcagacgttgacttggagaaagatgtacattcaggacttattggtcctttgttggtgtgtcacactaacactctcaatccagcccatggcaggcaggtgacagtccaggaattcgctcttttctttaccatctttgatgagaccaagtcctggtacttcacggaaaacatggagcgcaattgcagagccccctgtaacatacagatggaggaccctacctttaaggaaaattatcggttccacgcaatcaacggatacattatggatacactccctggccttgtgatggctcaggaccaacgaatcaggtggtacctcctcagcatgggttctaatgagaacatacactccattcacttttcaggacatgtgttcactgtccggaagaaagaagagtataagatggccctctacaatttgtatccaggcgtgtttgagaccgttgaaatgcttccctctaaagctggcatctggagagtagagtgcttgatcggagaacatcttcacgcaggtatgagcaccttgttcctcgtgtacagcaacaaatgtcagaatccacttggcatggccagtggacacattcgcgactttcagatcacagcatctggccagtatggacaatgggccccaaagttggctcgcctccattactccggtagcataaatgcgtggtccactaaagaacctttcagctggattaaggtcgatcttcttgcccccatgatcatccacggcattaagacacagggagcgaggcagaaattctcctccctctacatctcacagttcattattatgtatagtttggacggcaagaagtggcaaacttatagaggtaacagtactggaacagacatggtgttcttcggcaacgttgatagctctggcatcaaacacaacatctttaatcctcccataatagctcggtacatcagattgcatccgacccactacagcattaggagtacactccgaatggagcttatgggttgcgacttgaattcctgttcaatgccactcggaatggagtctaaagccatctctgatgcacagataaccgccagtagctactttacgaacatgtttgctacgtggtcaccctctaaggcaaggcttcatttgcaaggccggtctaatgcctggagacctcaggtgaacaacccgaaagaatggctccaggtggactttcagaagaccatgaaagtaacaggtgtcactactcagggagttaagtccttggatactagcatgtatgtgaaggagttccttatttcctcatcacaagatggccaccagtggaccctcttctttcagaatggtaaggtcaaagtgtttcagggcaatcaagacagcttcacacccgtggtgaacagtcttgatcctccactcttgacacgataccttcgaatccatccacagtcttgggagcaccagattgcattgcgcatggaagtacttggatgcgaggctcaggacctctac

SEQ ID NO: 2186 - protein, 1457 aa, synthetic construct
  REGION 1..1457: note = Variant of human B-domain deleted Factor VIII
MQIELSTCFFLCLLRFCFSATRRYYLGAVELSWDYMQSDLGELPVDARFPPRVPKSFPFNTSQVYKKTLFVEFTDHLFNIAKPRPPWMGLLGPTIQAEVYDTVVITLKNMASHPVSLHAVGVSYWKASEGAEYDDQTSQREKEDDKVFPGGSHTYVWQVLKENGPMASDPPCLTYSYLSHVDLVKDLNSGLIGALLVCREGSLAKEKTQTLAKFILLFAVFDEGKSWHSETKNSLMQDRDAASARAWPKMHTVNGYVNRTLPGLIGCHRKSVYWHVIGMGTTPEVHSIFLEGHTFLVRNHRQASLGISPITFLTAQTGLRDLGQFLLFCHIPSHQHDGMEAYVKVDSCPEEPQLRMKNNEEAEDYDDDLTDSEMDVVRFDDDNSPSIIQARSGAKKHPKTWVHYIAAEEEDWDYAPLVLAPDDRSYKSQYLNNGPQRIGRKYKKVRFMAYTDETFKTREAIQHESGILGPLLYGEVGDTLLIIFKNQASRPYNIYPHGITDVRPLYSRRLPKGVKHLKDFPILPGEIFKYKWTITVEDGPTKSDPRCLTRYYSSFVNWERDLASGLIGPLLICYKESVDQRGNQIMSDKRNVILFSVFDENRSWYLTENIQRFLPNPAGVQLEDPEFQASNIMHSINGYVFDSLQLSVCLHEVAYWYILSIGAQTDFLSVFFSGYTFKHKNVYEDTLTLFPFSGETVFMSMENPGLWILGCHNSDFRNRGMTALLKVSSCDWNTGDYEEDSYEDISAYFDSKNNAIEPRSFSQNPPVLKRHQREGTRTTLQSDQEEIDYDDTISVEMKKEDFDIYDEDENQSPRSFQKKTRHYFIAAVERLWDYGMSSSPHVLRNRAQSGSVPQFKKVVFQEFTDGSFTQPLYRGELNEHLGLLGPYIRAEVEDNIMVTFRNQASRPYSFYSSLISYEEDQRQGAEPRKNFVKPNETKTYFWKVQHHMAPTKDEFDCKAWAYFSDVDLEKDVHSGLIGPLLVCHTNTLNPAHGRQVTVQEFALFFTIFDETKSWYFTENMERNCRAPCNIQMEDPTFKENYRFHAINGYIMDTLPGLVMAQDQRIRWYLLSMGSNENIHSIHFSGHVFTVRKKEEYKMALYNLYPGVFETVEMLPSKAGIWRVECLIGEHLHAGMSTLFLVYSNKCQNPLGMASGHIRDFQITASGQYGQWAPKLARLHYSGSINAWSTKEPFSWIKVDLLAPMIIHGIKTQGARQKFSSLYISQFIIMYSLDGKKWQTYRGNSTGTDMVFFGNVDSSGIKHNIFNPPIIARYIRLHPTHYSIRSTLRMELMGCDLNSCSMPLGMESKAISDAQITASSYFTNMFATWSPSKARLHLQGRSNAWRPQVNNPKEWLQVDFQKTMKVTGVTTQGVKSLDTSMYVKEFLISSSQDGHQWTLFFQNGKVKVFQGNQDSFTPVVNSLDPPLLTRYLRIHPQSWEHQIALRMEVLGCEAQDLY

SEQ ID NO: 2187 - DNA, 4371 bp, synthetic construct
  misc_feature 1..4371: note = Variant of human B-domain deleted Factor VIII
  source 1..4371: mol_type = other DNA
atgcagattgaactgtctacctgcttcttcctctgtttgctgaggttctgctttagcgccactagacggtactaccttggcgctgtggagctgtcctgggactatatgcagagtgatttgggagagcttcccgtcgacgcacgatttcctcctcgcgttccaaagtcatttccctttaacacaagccaggtgtacaagaagacgctcttcgtcgaattcaccgatcacctgttcaatatcgccaaacccagaccaccatggatgggtcttttggggcctaccatacaagcggaggtgtatgacacagttgttatcactctcaagaacatggcttctcatccggtaagtcttcacgcagtgggcgtgtcctactggaaagcttcagaaggagccgagtatgatgatcagacatcccagagggagaaagaagacgacaaggtatttccaggtgggtctcatacctatgtgtggcaagtgctcaaagagaatggccctatggcaagcgatccgccgtgtttgacttacagctacctttcacacgttgacctcgtcaaggacctcaactccgggttgattggagccttgttggtatgcagggaaggatctcttgccaaagagaagacacagaccctggccaagtttatccttctctttgctgtgttcgatgagggcaaaagttggcatagcgaaacgaagaattccctcatgcaggatcgcgacgcagccagcgccagagcttggcccaagatgcacactgtgaacggatatgtcaataggacgcttcctggcttgattgggtgtcatcggaaaagtgtctactggcacgtgatcggaatggggacaacaccagaggtccactccatatttctcgaaggccataccttccttgttcgaaaccacagacaggcatccttggggatctctcccattacctttctcactgcccaaacgggtcttcgtgacttgggtcagttccttctcttttgccatatcccgtcacaccagcatgatggtatggaagcttatgtgaaagtcgacagttgtcctgaggagccacagttgcgcatgaagaataatgaagaagccgaggattacgacgacgatctcaccgattctgagatggacgtggtgaggtttgatgacgacaactctccctccatcattcaagctcggagcggggcgaagaaacaccccaagacttgggtccactatatagcggcggaagaggaggattgggattacgctcctcttgtattggcaccagatgaccgctcatacaaaagccagtacctcaacaacggaccgcagagaattggccggaagtataagaaagtgcgatttatggcctatacagacgaaacctttaagacaagggaggccatccagcatgagagtgggattttgggacctcttctttacggcgaagttggtgataccctcctcatcatcttcaagaatcaagcttctcgcccctataacatttacccacacgggatcactgacgttaggcctttgtatagcagaagacttcccaaaggcgtgaagcatctcaaagacttccccattttgccaggcgagatctttaagtacaaatggaccattacagtggaagatggaccgactaaatcggaccctcgatgccttacgcggtactattcctccttcgtgaattgggagagagatttggcaagcggactcataggaccactcctcatctgttacaaggaatctgtagaccagaggggtaaccagattatgagtgataaacgcaatgtgatcctttttagcgtcttcgacgagaaccggtcctggtacttgaccgagaatatacaaaggttccttcccaaccccgcaggcgttcagttggaagaccctgagtttcaggccagcaatattatgcactcaatcaacggctatgtgtttgatagtctccagctttctgtttgcctccatgaagtagcctattggtacatcttgtcaattggtgctcaaacagacttcctctccgtcttcttctccggctacacctttaagcacaagaacgtgtatgaggacactctcacactctttccattttctggagaaaccgtgttcatgagcatggagaatccaggcctttggatcttgggttgccacaacagtgattttcgcaatcggggaatgactgctctcctcaaagtcagcagctgtgattggaacacaggcgactattacgaggattcttacgaggacataagtgcctactttgactccaagaataacgccattgagcccagatcattctcccagaatcctcccgtgcttaaaaggcatcagcgcgaaggtaccagaactactcttcagtctgatcaagaggagattgactatgacgacaccattagcgtggaaatgaagaaggaggatttcgatatctatgacgaagatgagaaccagtctccgcggagctttcagaagaagacgcgacactacttcattgcagcagtcgaaaggctttgggactacggtatgtcatcatcccctcatgtgttgcgcaatagagctcagagtggaagtgttccacagttcaagaaagtcgtctttcaagagtttacagatggcagcttcacacagcctctctatcggggcgagcttaacgaacatttgggactccttggtccctatatccgagccgaagtggaggacaacattatggttacctttaggaatcaagcctctcgcccctacagcttctactcctccctcatcagttatgaggaggatcagagacaaggcgctgaaccacggaagaactttgtgaaaccgaatgagacgaagacctacttctggaaagtacagcaccacatggcccccacaaaagacgaattcgattgcaaagcatgggcgtatttttcagacgttgacttggagaaagatgtacattcaggacttattggtcctttgttggtgtgtcacactaacactctcaatccagcccatggcaggcaggtgacagtccaggaattcgctcttttctttaccatctttgatgagaccaagtcctggtacttcacggaaaacatggagcgcaattgcagagccccctgtaacatacagatggaggaccctacctttaaggaaaattatcggttccacgcaatcaacggatacattatggatacactccctggccttgtgatggctcaggaccaacgaatcaggtggtacctcctcagcatgggttctaatgagaacatacactccattcacttttcaggacatgtgttcactgtccggaagaaagaagagtataagatggccctctacaatttgtatccaggcgtgtttgagaccgttgaaatgcttccctctaaagctggcatctggagagtagagtgcttgatcggagaacatcttcacgcaggtatgagcaccttgttcctcgtgtacagcaacaaatgtcagaatccacttggcatggccagtggacacattcgcgactttcagatcacagcatctggccagtatggacaatgggccccaaagttggctcgcctccattactccggtagcataaatgcgtggtccactaaagaacctttcagctggattaaggtcgatcttcttgcccccatgatcatccacggcattaagacacagggagcgaggcagaaattctcctccctctacatctcacagttcattattatgtatagtttggacggcaagaagtggcaaacttatagaggtaacagtactggaacagacatggtgttcttcggcaacgttgatagctctggcatcaaacacaacatctttaatcctcccataatagctcggtacatcagattgcatccgacccactacagcattaggagtacactccgaatggagcttatgggttgcgacttgaattcctgttcaatgccactcggaatggagtctaaagccatctctgatgcacagataaccgccagtagctactttacgaacatgtttgctacgtggtcaccctctaaggcaaggcttcatttgcaaggccggtctaatgcctggagacctcaggtgaacaacccgaaagaatggctccaggtggactttcagaagaccatgaaagtaacaggtgtcactactcagggagttaagtccttggatactagcatgtatgtgaaggagttccttatttcctcatcacaagatggccaccagtggaccctcttctttcagaatggtaaggtcaaagtgtttcagggcaatcaagacagcttcacacccgtggtgaacagtcttgatcctccactcttgacacgataccttcgaatccatccacagtcttgggagcaccagattgcattgcgcatggaagtacttggatgcgaggctcaggacctctac

SEQ ID NO: 2188 - protein, 1457 aa, synthetic construct
  REGION 1..1457: note = Variant of human B-domain deleted Factor VIII
MQIELSTCFFLCLLRFCFSATRRYYLGAVELSWDYMQSDLGELPVDARFPPRVPKSFPFNTSQVYKKTLFVEFTDHLFNIAKPRPPWMGLLGPTIQAEVYDTVVITLKNMASHPVSLHAVGVSYWKASEGAEYDDQTSQREKEDDKVFPGGSHTYVWQVLKENGPMASDPPCLTYSYLSHVDLVKDLNSGLIGALLVCREGSLAKEKTQTLAKFILLFAVFDEGKSWHSETKNSLMQDRDAASARAWPKMHTVNGYVNRTLPGLIGCHRKSVYWHVIGMGTTPEVHSIFLEGHTFLVRNHRQASLGISPITFLTAQTGLRDLGQFLLFCHIPSHQHDGMEAYVKVDSCPEEPQLRMKNNEEAEDYDDDLTDSEMDVVRFDDDNSPSIIQARSGAKKHPKTWVHYIAAEEEDWDYAPLVLAPDDRSYKSQYLNNGPQRIGRKYKKVRFMAYTDETFKTREAIQHESGILGPLLYGEVGDTLLIIFKNQASRPYNIYPHGITDVRPLYSRRLPKGVKHLKDFPILPGEIFKYKWTITVEDGPTKSDPRCLTRYYSSFVNWERDLASGLIGPLLICYKESVDQRGNQIMSDKRNVILFSVFDENRSWYLTENIQRFLPNPAGVQLEDPEFQASNIMHSINGYVFDSLQLSVCLHEVAYWYILSIGAQTDFLSVFFSGYTFKHKNVYEDTLTLFPFSGETVFMSMENPGLWILGCHNSDFRNRGMTALLKVSSCDWNTGDYYEDSYEDISAYFDSKNNAIEPRSFSQNPPVLKRHQREGTRTTLQSDQEEIDYDDTISVEMKKEDFDIYDEDENQSPRSFQKKTRHYFIAAVERLWDYGMSSSPHVLRNRAQSGSVPQFKKVVFQEFTDGSFTQPLYRGELNEHLGLLGPYIRAEVEDNIMVTFRNQASRPYSFYSSLISYEEDQRQGAEPRKNFVKPNETKTYFWKVQHHMAPTKDEFDCKAWAYFSDVDLEKDVHSGLIGPLLVCHTNTLNPAHGRQVTVQEFALFFTIFDETKSWYFTENMERNCRAPCNIQMEDPTFKENYRFHAINGYIMDTLPGLVMAQDQRIRWYLLSMGSNENIHSIHFSGHVFTVRKKEEYKMALYNLYPGVFETVEMLPSKAGIWRVECLIGEHLHAGMSTLFLVYSNKCQNPLGMASGHIRDFQITASGQYGQWAPKLARLHYSGSINAWSTKEPFSWIKVDLLAPMIIHGIKTQGARQKFSSLYISQFIIMYSLDGKKWQTYRGNSTGTDMVFFGNVDSSGIKHNIFNPPIIARYIRLHPTHYSIRSTLRMELMGCDLNSCSMPLGMESKAISDAQITASSYFTNMFATWSPSKARLHLQGRSNAWRPQVNNPKEWLQVDFQKTMKVTGVTTQGVKSLDTSMYVKEFLISSSQDGHQWTLFFQNGKVKVFQGNQDSFTPVVNSLDPPLLTRYLRIHPQSWEHQIALRMEVLGCEAQDLY

SEQ ID NO: 2189 - DNA, 4371 bp, synthetic construct
  misc_feature 1..4371: note = Variant of human B-domain deleted Factor VIII
  source 1..4371: mol_type = other DNA
atgcagattgaactgtctacctgcttcttcctctgtttgctgaggttctgctttagcgccactagacggtactaccttggcgctgtggagctgtcctgggactatatgcagagtgatttgggagagcttcccgtcgacgcacgatttcctcctcgcgttccaaagtcatttccctttaacacaagccaggtgtacaagaagacgctcttcgtcgaattcaccgatcacctgttcaatatcgccaaacccagaccaccatggatgggtcttttggggcctaccatacaagcggaggtgtatgacacagttgttatcactctcaagaacatggcttctcatccggtaagtcttcacgcagtgggcgtgtcctactggaaagcttcagaaggagccgagtatgatgatcagacatcccagagggagaaagaagacgacaaggtatttccaggtgggtctcatacctatgtgtggcaagtgctcaaagagaatggccctatggcaagcgatccgccgtgtttgacttacagctacctttcacacgttgacctcgtcaaggacctcaactccgggttgattggagccttgttggtatgcagggaaggatctcttgccaaagagaagacacagaccctggccaagtttatccttctctttgctgtgttcgatgagggcaaaagttggcatagcgaaacgaagaattccctcatgcaggatcgcgacgcagccagcgccagagcttggcccaagatgcacactgtgaacggatatgtcaataggacgcttcctggcttgattgggtgtcatcggaaaagtgtctactggcacgtgatcggaatggggacaacaccagaggtccactccatatttctcgaaggccataccttccttgttcgaaaccacagacaggcatccttggggatctctcccattacctttctcactgcccaaacgggtcttcgtgacttgggtcagttccttctcttttgccatatcccgtcacaccagcatgatggtatggaagcttatgtgaaagtcgacagttgtcctgaggagccacagttgcgcatgaagaataatgaagaagccgaggattacgacgacgatctcaccgattctgagatggacgtggtgaggtttgatgacgacaactctccctccatcattcaagctcggagcggggcgaagaaacaccccaagacttgggtccactatatagcggcggaagaggaggattgggattacgctcctcttgtattggcaccagatgaccgctcatacaaaagccagtacctcaacaacggaccgcagagaattggccggaagtataagaaagtgcgatttatggcctatacagacgaaacctttaagacaagggaggccatccagcatgagagtgggattttgggacctcttctttacggcgaagttggtgataccctcctcatcatcttcaagaatcaagcttctcgcccctataacatttacccacacgggatcactgacgttaggcctttgtatagcagaagacttcccaaaggcgtgaagcatctcaaagacttccccattttgccaggcgagatctttaagtacaaatggaccattacagtggaagatggaccgactaaatcagaccctcgatgccttacgcggtactattcctccttcgtgaattgggagagagatttggcaagcggactcataggaccactcctcatctgttacaaggaatctgtagaccagaggggtaaccagattatgagtgataaacgcaatgtgatcctttttagcgtcttcgacgagaaccggtcctggtacttgaccgagaatatacaaaggttccttcccaaccccgcaggcgttcagttggaagaccctgagtttcaggccagcaatattatgcactcaatcaacggctatgtgtttgatagtctccagctttctgtttgcctccatgaagtagcctattggtacatcttgtcaattggtgctcaaacagacttcctctccgtcttcttctccggctacacctttaagcacaagaacgtgtatgaggacactctcacactctttccattttctggagaaaccgtgttcatgagcatggagaatccaggcctttggatcttgggttgccacaacagtgattttcgcaatcggggaatgactgctctcctcaaagtcagcagctgtgattggaacacaggcgactattacggggattcttacgaggacataagtgcctactttgactccaagaataacgccattgagcccagatcattctcccagaatcctcccgtgcttaaaaggcatcagcgcgaaggtaccagaactactcttcagtctgatcaagaggagattgactatgacgacaccattagcgtggaaatgaagaaggaggatttcgatatctatgacgaagatgagaaccagtctccgcggagctttcagaagaagacgcgacactacttcattgcagcagtcgaaaggctttgggactacggtatgtcatcatcccctcatgtgttgcgcaatagagctcagagtggaagtgttccacagttcaagaaagtcgtctttcaagagtttacagatggcagcttcacacagcctctctatcggggcgagcttaacgaacatttgggactccttggtccctatatccgagccgaagtggaggacaacattatggttacctttaggaatcaagcctctcgcccctacagcttctactcctccctcatcagttatgaggaggatcagagacaaggcgctgaaccacggaagaactttgtgaaaccgaatgagacgaagacctacttctggaaagtacagcaccacatggcccccacaaaagacgaattcgattgcaaagcatgggcgtatttttcagacgttgacttggagaaagatgtacattcaggacttattggtcctttgttggtgtgtcacactaacactctcaatccagcccatggcaggcaggtgacagtccaggaattcgctcttttctttaccatctttgatgagaccaagtcctggtacttcacggaaaacatggagcgcaattgcagagccccctgtaacatacagatggaggaccctacctttaaggaaaattatcggttccacgcaatcaacggatacattatggatacactccctggccttgtgatggctcaggaccaacgaatcaggtggtacctcctcagcatgggttctaatgagaacatacactccattcacttttcaggacatgtgttcactgtccggaagggtgaagagtataagatggccctctacaatttgtatccaggcgtgtttgagaccgttgaaatgcttccctctaaagctggcatctggagagtagagtgcttgatcggagaacatcttcacgcaggtatgagcaccttgttcctcgtgtacagcaacaaatgtcagaatccacttggcatggccagtggacacattcgcgactttcagatcacagcatctggccagtatggacaatgggccccaaagttggctcgcctccattactccggtagcataaatgcgtggtccactaaagaacctttcagctggattaaggtcgatcttcttgcccccatgatcatccacggcattaagacacagggagcgaggcagaaattctcctccctctacatctcacagttcattattatgtatagtttggacggcaagaagtggcaaacttatagaggtaacagtactggaacagacatggtgttcttcggcaacgttgatagctctggcatcaaacacaacatctttaatcctcccataatagctcggtacatcagattgcatccgacccactacagcattaggagtacactccgaatggagcttatgggttgcgacttgaattcctgttcaatgccactcggaatggagtctaaagccatctctgatgcacagataaccgccagtagctactttacgaacatgtttgctacgtggtcaccctctaaggcaaggcttcatttgcaaggccggtctaatgcctggagacctcaggtgaacaacccgaaagaatggctccaggtggactttcagaagaccatgaaagtaacaggtgtcactactcagggagttaagtccttggatactagcatgtatgtgaaggagttccttatttcctcatcacaagatggccaccagtggaccctcttctttcagaatggtaaggtcaaagtgtttcagggcaatcaagacagcttcacacccgtggtgaacagtcttgatcctccactcttgacacgataccttcgaatccatccacagtcttgggagcaccagattgcattgcgcatggaagtacttggatgcgaggctcaggacctctac

SEQ ID NO: 2190 - protein, 1457 aa, synthetic construct
  REGION 1..1457: note = Variant of human B-domain deleted Factor VIII
MQIELSTCFFLCLLRFCFSATRRYYLGAVELSWDYMQSDLGELPVDARFPPRVPKSFPFNTSQVYKKTLFVEFTDHLFNIAKPRPPWMGLLGPTIQAEVYDTVVITLKNMASHPVSLHAVGVSYWKASEGAEYDDQTSQREKEDDKVFPGGSHTYVWQVLKENGPMASDPPCLTYSYLSHVDLVKDLNSGLIGALLVCREGSLAKEKTQTLAKFILLFAVFDEGKSWHSETKNSLMQDRDAASARAWPKMHTVNGYVNRTLPGLIGCHRKSVYWHVIGMGTTPEVHSIFLEGHTFLVRNHRQASLGISPITFLTAQTGLRDLGQFLLFCHIPSHQHDGMEAYVKVDSCPEEPQLRMKNNEEAEDYDDDLTDSEMDVVRFDDDNSPSIIQARSGAKKHPKTWVHYIAAEEEDWDYAPLVLAPDDRSYKSQYLNNGPQRIGRKYKKVRFMAYTDETFKTREAIQHESGILGPLLYGEVGDTLLIIFKNQASRPYNIYPHGITDVRPLYSRRLPKGVKHLKDFPILPGEIFKYKWTITVEDGPTKSDPRCLTRYYSSFVNWERDLASGLIGPLLICYKESVDQRGNQIMSDKRNVILFSVFDENRSWYLTENIQRFLPNPAGVQLEDPEFQASNIMHSINGYVFDSLQLSVCLHEVAYWYILSIGAQTDFLSVFFSGYTFKHKNVYEDTLTLFPFSGETVFMSMENPGLWILGCHNSDFRNRGMTALLKVSSCDWNTGDYYGDSYEDISAYFDSKNNAIEPRSFSQNPPVLKRHQREGTRTTLQSDQEEIDYDDTISVEMKKEDFDIYDEDENQSPRSFQKKTRHYFIAAVERLWDYGMSSSPHVLRNRAQSGSVPQFKKVVFQEFTDGSFTQPLYRGELNEHLGLLGPYIRAEVEDNIMVTFRNQASRPYSFYSSLISYEEDQRQGAEPRKNFVKPNETKTYFWKVQHHMAPTKDEFDCKAWAYFSDVDLEKDVHSGLIGPLLVCHTNTLNPAHGRQVTVQEFALFFTIFDETKSWYFTENMERNCRAPCNIQMEDPTFKENYRFHAINGYIMDTLPGLVMAQDQRIRWYLLSMGSNENIHSIHFSGHVFTVRKGEEYKMALYNLYPGVFETVEMLPSKAGIWRVECLIGEHLHAGMSTLFLVYSNKCQNPLGMASGHIRDFQITASGQYGQWAPKLARLHYSGSINAWSTKEPFSWIKVDLLAPMIIHGIKTQGARQKFSSLYISQFIIMYSLDGKKWQTYRGNSTGTDMVFFGNVDSSGIKHNIFNPPIIARYIRLHPTHYSIRSTLRMELMGCDLNSCSMPLGMESKAISDAQITASSYFTNMFATWSPSKARLHLQGRSNAWRPQVNNPKEWLQVDFQKTMKVTGVTTQGVKSLDTSMYVKEFLISSSQDGHQWTLFFQNGKVKVFQGNQDSFTPVVNSLDPPLLTRYLRIHPQSWEHQIALRMEVLGCEAQDLY

SEQ ID NO: 2191 - DNA, 4371 bp, synthetic construct
  misc_feature 1..4371: note = Variant of human B-domain deleted Factor VIII
  source 1..4371: mol_type = other DNA
atgcagattgaactgtctacctgcttcttcctctgtttgctgaggttctgctttagcgccactagacggtactaccttggcgctgtggagctgtcctgggactatatgcagagtgatttgggagagcttcccgtcgacgcacgatttcctcctcgcgttccaaagtcatttccctttaacacaagccaggtgtacaagaagacgctcttcgtcgaattcaccgatcacctgttcaatatcgccaaacccagaccaccatggatgggtcttttggggcctaccatacaagcggaggtgtatgacacagttgttatcactctcaagaacatggcttctcatccggtaagtcttcacgcagtgggcgtgtcctactggaaagcttcagaaggagccgagtatgatgatcagacatcccagagggagaaagaagacgacaaggtatttccaggtgggtctcatacctatgtgtggcaagtgctcaaagagaatggccctatggcaagcgatccgccgtgtttgacttacagctacctttcacacgttgacctcgtcaaggacctcaactccgggttgattggagccttgttggtatgcagggaaggatctcttgccaaagagaagacacagaccctggccaagtttatccttctctttgctgtgttcgatgagggcaaaagttggcatagcgaaacgaagaattccctcatgcaggatcgcgacgcagccagcgccagagcttggcccaagatgcacactgtgaacggatatgtcaataggacgcttcctggcttgattgggtgtcatcggaaaagtgtctactggcacgtgatcggaatggggacaacaccagaggtccactccatatttctcgaaggccataccttccttgttcgaaaccacagacaggcatccttggggatctctcccattacctttctcactgcccaaacgggtcttcgtgacttgggtcagttccttctcttttgccatatcccgtcacaccagcatgatggtatggaagcttatgtgaaagtcgacagttgtcctgaggagccacagttgcgcatgaagaataatgaagaagccgaggattacgacgacgatctcaccgattctgagatggacgtggtgaggtttgatgacgacaactctccctccatcattcaagctcggagcggggcgaagaaacaccccaagacttgggtccactatatagcggcggaagaggaggattgggattacgctcctcttgtattggcaccagatgaccgctcatacaaaagccagtacctcaacaacggaccgcagagaattggccggaagtataagaaagtgcgatttatggcctatacagacgaaacctttaagacaagggaggccatccagcatgagagtgggattttgggacctcttctttacggcgaagttggtgataccctcctcatcatcttcaagaatcaagcttctcgcccctataacatttacccacacgggatcactgacgttaggcctttgtatagcagaagacttcccaaaggcgtgaagcatctcaaagacttccccattttgccaggcgagatctttaagtacaaatggaccattacagtggaagatggaccgactaaatcggaccctcgatgccttacgcggtactattcctccttcgtgaattgggagagagatttggcaagcggactcataggaccactcctcatctgttacaaggaatctgtagaccagaggggtaaccagattatgagtgataaacgcaatgtgatcctttttagcgtcttcgacgagaaccggtcctggtacttgaccgagaatatacaaaggttccttcccaaccccgcaggcgttcagttggaagaccctgagtttcaggccagcaatattatgcactcaatcaacggctatgtgtttgatagtctccagctttctgtttgcctccatgaagtagcctattggtacatcttgtcaattggtgctcaaacagacttcctctccgtcttcttctccggctacacctttaagcacaagaacgtgtatgaggacactctcacactctttccattttctggagaaaccgtgttcatgagcatggagaatccaggcctttggatcttgggttgccacaacagtgattttcgcaatcggggaatgactgctctcctcaaagtcagcagctgtgattggaacacaggcgactattacggggattcttacgaggacataagtgcctactttgactccgaaaataacgccattgagcccagatcattctcccagaatcctcccgtgcttaaaaggcatcagcgcgaaggtaccagaactactcttcagtctgatcaagaggagattgactatgacgacaccattagcgtggaaatgaagagtgtggatttcgatatctatgacgaggatgggaaccagtctccgcggagctttcagaagaagacgcgacactacttcattgcagcagtcgaaaggctttgggactacggtatgtcatcatcccctcatgtgttgcgcaatagagctcagagtggaagtgttccacagttcaagaaagtcgtctttcaagagtttacagatggcagcttcacacagcctctctatcggggcgagcttaacgaacatttgggactccttggtccctatatccgagccgaagtggaggacaacattatggttacctttaggaatcaagcctctcgcccctacagcttctactcctccctcatcagttatgaggaggatcagagacaaggcgctgaaccacggaagaactttgtgaaaccgaatgagacgaagacctacttctggaaagtacagcaccacatggcccccacaaaagacgaattcgattgcaaagcatgggcgtatttttcagacgttgacttggagaaagatgtacattcaggacttattggtcctttgttggtgtgtcacactaacactctcaatccagcccatggcaggcaggtgacagtccaggaattcgctcttttctttaccatctttgatgagaccaagtcctggtacttcacggaaaacatggagcgcaattgcagagccccctgtaacatacagatggaggaccctacctttaaggaaaattatcggttccacgcaatcaacggatacattatggatacactccctggccttgtgatggctcaggaccaacgaatcaggtggtacctcctcagcatgggttctaatgagaacatacactccattcacttttcaggacatgtgttcactgtccggaagaaagaagagtataagatggccctctacaatttgtatccaggcgtgtttgagaccgttgaaatgcttcccatcaaagctggcatctggagagtagagtgcttgatcggagaacatcttcacgcaggtatgagcaccttgttcctcgtgtacagcaacaaatgtcagaatccacttggcatggccagtggacacattcgcgactttcagatcacagcatctggccagtatggacaatgggccccaaagttggctcgcctccattactccggtagcataaatgcgtggtccactaaagaacctttcagctggattaaggtcgatcttcttgcccccatgatcatccacggcattaagacacagggagcgaggcagaaattctcctccctctacatctcacagttcattattatgtatagtttggacggcaagaagtggcaaacttatagaggtaacagtactggaacagacatggtgttcttcggcaacgttgatagctctggcatcaaacacaacatctttaatcctcccataatagctcggtacatcagattgcatccgacccactacagcattaggagtacactccgaatggagcttatgggttgcgacttgaattcctgttcaatgccactcggaatggagtctaaagccatctctgatgcacagataaccgccagtagctactttacgaacatgtttgctacgtggtcaccctctaaggcaaggcttcatttgcaatgccggtctaatgcctggagacctcaggtgaacaacccgaaagaatggctccaggtggactttcagaagaccatgaaagtaacaggtgtcactactcagggagttaagtccttggatactagcatgtatgtgaaggagttccttatttcctcatcacaagatggccaccagtggaccctcttctttcagaatggtaaggtcaaagtgtttcagggcaatcaagacagcttcacacccgtggtgaacagtcttgatcctccactcttgacacgataccttcgaatccatccacagtcttgggagcaccagattgcattgcgcatggaagtacttggatgcgaggctcaggacctctac

SEQ ID NO: 2192 - protein, 1457 aa, synthetic construct
  REGION 1..1457: note = Variant of human B-domain deleted Factor VIII
MQIELSTCFFLCLLRFCFSATRRYYLGAVELSWDYMQSDLGELPVDARFPPRVPKSFPFNTSQVYKKTLFVEFTDHLFNIAKPRPPWMGLLGPTIQAEVYDTVVITLKNMASHPVSLHAVGVSYWKASEGAEYDDQTSQREKEDDKVFPGGSHTYVWQVLKENGPMASDPPCLTYSYLSHVDLVKDLNSGLIGALLVCREGSLAKEKTQTLAKFILLFAVFDEGKSWHSETKNSLMQDRDAASARAWPKMHTVNGYVNRTLPGLIGCHRKSVYWHVIGMGTTPEVHSIFLEGHTFLVRNHRQASLGISPITFLTAQTGLRDLGQFLLFCHIPSHQHDGMEAYVKVDSCPEEPQLRMKNNEEAEDYDDDLTDSEMDVVRFDDDNSPSIIQARSGAKKHPKTWVHYIAAEEEDWDYAPLVLAPDDRSYKSQYLNNGPQRIGRKYKKVRFMAYTDETFKTREAIQHESGILGPLLYGEVGDTLLIIFKNQASRPYNIYPHGITDVRPLYSRRLPKGVKHLKDFPILPGEIFKYKWTITVEDGPTKSDPRCLTRYYSSFVNWERDLASGLIGPLLICYKESVDQRGNQIMSDKRNVILFSVFDENRSWYLTENIQRFLPNPAGVQLEDPEFQASNIMHSINGYVFDSLQLSVCLHEVAYWYILSIGAQTDFLSVFFSGYTFKHKNVYEDTLTLFPFSGETVFMSMENPGLWILGCHNSDFRNRGMTALLKVSSCDWNTGDYYGDSYEDISAYFDSENNAIEPRSFSQNPPVLKRHQREGTRTTLQSDQEEIDYDDTISVEMKSVDFDIYDEDGNQSPRSFQKKTRHYFIAAVERLWDYGMSSSPHVLRNRAQSGSVPQFKKVVFQEFTDGSFTQPLYRGELNEHLGLLGPYIRAEVEDNIMVTFRNQASRPYSFYSSLISYEEDQRQGAEPRKNFVKPNETKTYFWKVQHHMAPTKDEFDCKAWAYFSDVDLEKDVHSGLIGPLLVCHTNTLNPAHGRQVTVQEFALFFTIFDETKSWYFTENMERNCRAPCNIQMEDPTFKENYRFHAINGYIMDTLPGLVMAQDQRIRWYLLSMGSNENIHSIHFSGHVFTVRKKEEYKMALYNLYPGVFETVEMLPIKAGIWRVECLIGEHLHAGMSTLFLVYSNKCQNPLGMASGHIRDFQITASGQYGQWAPKLARLHYSGSINAWSTKEPFSWIKVDLLAPMIIHGIKTQGARQKFSSLYISQFIIMYSLDGKKWQTYRGNSTGTDMVFFGNVDSSGIKHNIFNPPIIARYIRLHPTHYSIRSTLRMELMGCDLNSCSMPLGMESKAISDAQITASSYFTNMFATWSPSKARLHLQCRSNAWRPQVNNPKEWLQVDFQKTMKVTGVTTQGVKSLDTSMYVKEFLISSSQDGHQWTLFFQNGKVKVFQGNQDSFTPVVNSLDPPLLTRYLRIHPQSWEHQIALRMEVLGCEAQDLY

SEQ ID NO: 2193 - DNA, 4371 bp, synthetic construct
  misc_feature 1..4371: note = Variant of human B-domain deleted Factor VIII
  source 1..4371: mol_type = other DNA
atgcagattgaactgtctacctgcttcttcctctgtttgctgaggttctgctttagcgccactagacggtactaccttggcgctgtggagctgtcctgggactatatgcagagtgatttgggagagcttcccgtcgacgcacgatttcctcctcgcgttccaaagtcatttccctttaacacaagccaggtgtacaagaagacgctcttcgtcgaattcaccgatcacctgttcaatatcgccaaacccagaccaccatggatgggtcttttggggcctaccatacaagcggaggtgtatgacacagttgttatcactctcaagaacatggcttctcatccggtaagtcttcacgcagtgggcgtgtcctactggaaagcttcagaaggagccgagtatgatgatcagacatcccagagggagaaagaagacgacaaggtatttccaggtgggtctcatacctatgtgtggcaagtgctcaaagagaatggccctatggcaagcgatccgccgtgtttgacttacagctacctttcacacgttgacctcgtcaaggacctcaactccgggttgattggagccttgttggtatgcagggaaggatctcttgccaaagagaagacacagaccctggccaagtttatccttctctttgctgtgttcgatgagggcaaaagttggcatagcgaaacgaagaattccctcatgcaggatcgcgacgcagccagcgccagagcttggcccaagatgcacactgtgaacggatatgtcaataggacgcttcctggcttgattgggtgtcatcggaaaagtgtctactggcacgtgatcggaatggggacaacaccagaggtccactccatatttctcgaaggccataccttccttgttcgaaaccacagacaggcatccttggggatctctcccattacctttctcactgcccaaacgggtcttcgtgacttgggtcagttccttctcttttgccatatcccgtcacaccagcatgatggtatggaagcttatgtgaaagtcgacagttgtcctgaggagccacagttgcgcatgaagaataatgaagaagccgaggattacgacgacgatctcaccgattctgagatggacgtggtgaggtttgatgacgacaactctccctccatcattcaagctcggagcggggcgaagaaacaccccaagacttgggtccactatatagcggcggaagaggaggattgggattacgctcctcttgtattggcaccagatgaccgctcatacaaaagccagtacctcaacaacggaccgcagagaattggccggaagtataagaaagtgcgatttatggcctatacagacgaaacctttaagacaagggaggccatccagcatgagagtgggattttgggacctcttctttacggcgaagttggtgataccctcctcatcatcttcaagaatcaagcttctcgcccctataacatttacccacacgggatcactgacgttaggcctttgtatagcagaagacttcccaaaggcgtgaagcatctcaaagacttccccattttgccaggcgagatctttaagtacaaatggaccattacagtggaagatggaccgactaaatcggaccctcgatgccttacgcggtactattcctccttcgtgaattgggagagagatttggcaagcggactcataggaccactcctcatctgttacaaggaatctgtagaccagaggggtaaccagattatgagtgataaacgcaatgtgatcctttttagcgtcttcgacgagaaccggtcctggtacttgaccgagaatatacaaaggttccttcccaaccccgcaggcgttcagttggaagaccctgagtttcaggccagcaatattatgcactcaatcaacggctatgtgtttgatagtctccagctttctgtttgcctccatgaagtagcctattggtacatcttgtcaattggtgctcaaacagacttcctctccgtcttcttctccggctacacctttaagcacaagaacgtgtatgaggacactctcacactctttccattttctggagaaaccgtgttcatgagcatggagaatccaggcctttggatcttgggttgccacaacagtgattttcgcaatcggggaatgactgctctcctcaaagtcagcagctgtgattggaacacaggcgactattacggggattcttacgaggacataagtgcctactttgactccaagaataacgccattgagcccagatcattctcccagaatcctcccgtgcttaaaaggcatcagcgcgaaggtaccagaactactcttcagtctgatcaagaggagattgactatgacgacaccattagcgtggaaatgaagaaggaggatttcgatatctatgacgaagatgagaaccagtctccgcggagctttcagaagaagacgcgacactacttcattgcagcagtcgaaaggctttgggactacggtatgtcatcatcccctcatgtgttgcgcaatagagctcagagtggaagtgttccacagttcaagaaagtcgtctttcaagagtttacagatggcagcttcacacagcctctctatcggggcgagcttaacgaacatttgggactccttggtccctatatccgagccgaagtggaggacaacattatggttacctttaggaatcaagcctctcgcccctacagcttctactcctccctcatcagttatgaggaggatcagagacaaggcgctgaaccacggaagaactttgtgaaaccgaatgagacgaagacctacttctggaaagtacagcaccacatggcccccacaaaagacgaattcgattgcaaagcatgggcgtatttttcagacgttgacttggagaaagatgtacattcaggacttattggtcctttgttggtgtgtcacactaacactctcaatccagcccatggcaggcaggtgacagtccaggaattcgctcttttctttaccatctttgatgagaccaagtcctggtacttcacggaaaacatggagcgcaattgcagagccccctgtaacatacagatggaggaccctacctttaaggaaaattatcggttccacgcaatcaacggatacattatggatacactccctggccttgtgatggctcaggaccaacgaatcaggtggtacctcctcagcatgggttctaatgagaacatacactccattcacttttcaggacatgtgttcactgtccggaagaaagaagagtataagatggccctctacaatttgtatccaggcgtgtttgagaccgttgaaatgcttcccatcaaagctggcatctggagagtagagtgcttgatcggagaacatcttcacgcaggtatgagcaccttgttcctcgtgtacagcaacaaatgtcagaatccacttggcatggccagtggacacattcgcgactttcagatcacagcatctggccagtatggacaatgggccccaaagttggctcgcctccattactccggtagcataaatgcgtggtccactaaagaacctttcagctggattaaggtcgatcttcttgcccccatgatcatccacggcattaagacacagggagcgaggcagaaattctcctccctctacatctcacagttcattattatgtatagtttggacggcaagaagtggcaaacttatagaggtaacagtactggaacagacatggtgttcttcggcaacgttgatagctctggcatcaaacacaacatctttaatcctcccataatagctcggtacatcagattgcatccgacccactacagcattaggagtacactccgaatggagcttatgggttgcgacttgaattcctgttcaatgccactcggaatggagtctaaagccatctctgatgcacagataaccgccagtagctactttacgaacatgtttgctacgtggtcaccctctaaggcaaggcttcatttgcaaggccggtctaatgcctggagacctcaggtgaacaacccgaaagaatggctccaggtggactttcagaagaccatgaaagtaacaggtgtcactactcagggagttaagtccttggatactagcatgtatgtgaaggagttccttatttcctcatcacaagatggccaccagtggaccctcttctttcagaatggtaaggtcaaagtgtttcagggcaatcaagacagcttcacacccgtggtgaacagtcttgatcctccactcttgacacgataccttcgaatccatccacagtcttgggagcaccagattgcattgcgcatggaagtacttggatgcgaggctcaggacctctac

SEQ ID NO: 2194 - protein, 1457 aa, synthetic construct
  REGION 1..1457: note = Variant of human B-domain deleted Factor VIII
MQIELSTCFFLCLLRFCFSATRRYYLGAVELSWDYMQSDLGELPVDARFPPRVPKSFPFNTSQVYKKTLFVEFTDHLFNIAKPRPPWMGLLGPTIQAEVYDTVVITLKNMASHPVSLHAVGVSYWKASEGAEYDDQTSQREKEDDKVFPGGSHTYVWQVLKENGPMASDPPCLTYSYLSHVDLVKDLNSGLIGALLVCREGSLAKEKTQTLAKFILLFAVFDEGKSWHSETKNSLMQDRDAASARAWPKMHTVNGYVNRTLPGLIGCHRKSVYWHVIGMGTTPEVHSIFLEGHTFLVRNHRQASLGISPITFLTAQTGLRDLGQFLLFCHIPSHQHDGMEAYVKVDSCPEEPQLRMKNNEEAEDYDDDLTDSEMDVVRFDDDNSPSIIQARSGAKKHPKTWVHYIAAEEEDWDYAPLVLAPDDRSYKSQYLNNGPQRIGRKYKKVRFMAYTDETFKTREAIQHESGILGPLLYGEVGDTLLIIFKNQASRPYNIYPHGITDVRPLYSRRLPKGVKHLKDFPILPGEIFKYKWTITVEDGPTKSDPRCLTRYYSSFVNWERDLASGLIGPLLICYKESVDQRGNQIMSDKRNVILFSVFDENRSWYLTENIQRFLPNPAGVQLEDPEFQASNIMHSINGYVFDSLQLSVCLHEVAYWYILSIGAQTDFLSVFFSGYTFKHKNVYEDTLTLFPFSGETVFMSMENPGLWILGCHNSDFRNRGMTALLKVSSCDWNTGDYYGDSYEDISAYFDSKNNAIEPRSFSQNPPVLKRHQREGTRTTLQSDQEEIDYDDTISVEMKKEDFDIYDEDENQSPRSFQKKTRHYFIAAVERLWDYGMSSSPHVLRNRAQSGSVPQFKKVVFQEFTDGSFTQPLYRGELNEHLGLLGPYIRAEVEDNIMVTFRNQASRPYSFYSSLISYEEDQRQGAEPRKNFVKPNETKTYFWKVQHHMAPTKDEFDCKAWAYFSDVDLEKDVHSGLIGPLLVCHTNTLNPAHGRQVTVQEFALFFTIFDETKSWYFTENMERNCRAPCNIQMEDPTFKENYRFHAINGYIMDTLPGLVMAQDQRIRWYLLSMGSNENIHSIHFSGHVFTVRKKEEYKMALYNLYPGVFETVEMLPIKAGIWRVECLIGEHLHAGMSTLFLVYSNKCQNPLGMASGHIRDFQITASGQYGQWAPKLARLHYSGSINAWSTKEPFSWIKVDLLAPMIIHGIKTQGARQKFSSLYISQFIIMYSLDGKKWQTYRGNSTGTDMVFFGNVDSSGIKHNIFNPPIIARYIRLHPTHYSIRSTLRMELMGCDLNSCSMPLGMESKAISDAQITASSYFTNMFATWSPSKARLHLQGRSNAWRPQVNNPKEWLQVDFQKTMKVTGVTTQGVKSLDTSMYVKEFLISSSQDGHQWTLFFQNGKVKVFQGNQDSFTPVVNSLDPPLLTRYLRIHPQSWEHQIALRMEVLGCEAQDLY

SEQ ID NO: 2195 - DNA, 4371 bp, synthetic construct
  misc_feature 1..4371: note = Variant of human B-domain deleted Factor VIII
  source 1..4371: mol_type = other DNA
atgcagattgaactgtctacctgcttcttcctctgtttgctgaggttctgctttagcgccactagacggtactaccttggcgctgtggagctgtcctgggactatatgcagagtgatttgggagagcttcccgtcgacgcacgatttcctcctcgcgttccaaagtcatttccctttaacacaagccaggtgtacaagaagacgctcttcgtcgaattcaccgatcacctgttcaatatcgccaaacccagaccaccatggatgggtcttttggggcctaccatacaagcggaggtgtatgacacagttgttatcactctcaagaacatggcttctcatccggtaagtcttcacgcagtgggcgtgtcctactggaaagcttcagaaggagccgagtatgatgatcagacatcccagagggagaaagaagacgacaaggtatttccaggtgggtctcatacctatgtgtggcaagtgctcaaagagaatggccctatggcaagcgatccgccgtgtttgacttacagctacctttcacacgttgacctcgtcaaggacctcaactccgggttgattggagccttgttggtatgcagggaaggatctcttgccaaagagaagacacagaccctggccaagtttatccttctctttgctgtgttcgatgagggcaaaagttggcatagcgaaacgaagaattccctcatgcaggatcgcgacgcagccagcgccagagcttggcccaagatgcacactgtgaacggatatgtcaataggacgcttcctggcttgattgggtgtcatcggaaaagtgtctactggcacgtgatcggaatggggacaacaccagaggtccactccatatttctcgaaggccataccttccttgttcgaaaccacagacaggcatccttggggatctctcccattacctttctcactgcccaaacgggtcttcgtgacttgggtcagttccttctcttttgccatatcccgtcacaccagcatgatggtatggaagcttatgtgaaagtcgacagttgtcctgaggagccacagttgcgcatgaagaataatgaagaagccgaggattacgacgacgatctcaccgattctgagatggacgtggtgaggtttgatgacgacaactctccctccatcattcaagctcggagcggggcgaagaaacaccccaagacttgggtccactatatagcggcggaagaggaggattgggattacgctcctcttgtattggcaccagatgaccgctcatacaaaagccagtacctcaacaacggaccgcagagaattggccggaagtataagaaagtgcgatttatggcctatacagacgaaacctttaagacaagggaggccatccagcatgagagtgggattttgggacctcttctttacggcgaagttggtgataccctcctcatcatcttcaagaatcaagcttctcgcccctataacatttacccacacgggatcactgacgttaggcctttgtatagcagaagacttcccaaaggcgtgaagcatctcaaagacttccccattttgccaggcgagatctttaagtacaaatggaccattacagtggaagatggaccgactaaatcggaccctcgatgccttacgcggtactattcctccttcgtgaattgggagagagatttggcaagcggactcataggaccactcctcatctgttacaaggaatctgtagaccagaggggtaaccagattatgagtgataaacgcaatgtgatcctttttagcgtcttcgacgagaaccggtcctggtacttgaccgagaatatacaaaggttccttcccaaccccgcaggcgttcagttggaagaccctgagtttcaggccagcaatattatgcactcaatcaacggctatgtgtttgatagtctccagctttctgtttgcctccatgaagtagcctattggtacatcttgtcaattggtgctcaaacagacttcctctccgtcttcttctccggctacacctttaagcacaagaacgtgtatgaggacactctcacactctttccattttctggagaaaccgtgttcatgagcatggagaatccaggcctttggatcttgggttgccacaacagtgattttcgcaatcggggaatgactgctctcctcaaagtcagcagctgtgattggaacacaggcgactattacgaggattcttacgaggacataagtgcctactttgactccaagaataacgccattgagcccagatcattctcccagaatcctcccgtgcttaaaaggcatcagcgcgaaggtaccagaactactcttcagtctgatcaagaggagattgactatgacgacaccattagcgtggaaatgaagaaggtggatttcgatatctatgacgaagatgagaaccagtctccgcggagctttcagaagaagacgcgacactacttcattgcagcagtcgaaaggctttgggactacggtatgtcatcatcccctcatgtgttgcgcaatagagctcagagtggaagtgttccacagttcaagaaagtcgtctttcaagagtttacagatggcagcttcacacagcctctctatcggggcgagcttaacgaacatttgggactccttggtccctatatccgagccgaagtggaggacaacattatggttacctttaggaatcaagcctctcgcccctacagcttctactcctccctcatcagttatgaggaggatcagagacaaggcgctgaaccacggaagaactttgtgaaaccgaatgagacgaagacctacttctggaaagtacagcaccacatggcccccacaaaagacgaattcgattgcaaagcatgggcgtatttttcagacgttgacttggagaaagatgtacattcaggacttattggtcctttgttggtgtgtcacactaacactctcaatccagcccatggcaggcaggtgacagtccaggaattcgctcttttctttaccatctttgatgagaccaagtcctggtacttcacggaaaacatggagcgcaattgcagagccccctgtaacatacagatggaggaccctacctttaaggaaaattatcggttccacgcaatcaacggatacattatggatacactccctggccttgtgatggctcaggaccaacgaatcaggtggtacctcctcagcatgggttctaatgagaacatacactccattcacttttcaggacatgtgttcactgtccggaagaaagaagagtataagatggccctctacaatttgtatccaggcgtgtttgagaccgttgaaatgcttccctctaaagctggcatctggagagtagagtgcttgatcggagaacatcttcacgcaggtatgagcaccttgttcctcgtgtacagcaacaaatgtcagaatccacttggcatggccagtggacacattcgcgactttcagatcacagcatctggccagtatggacaatgggccccaaagttggctcgcctccattactccggtagcataaatgcgtggtccactaaagaacctttcagctggattaaggtcgatcttcttgcccccatgatcatccacggcattaagacacagggagcgaggcagaaattctcctccctctacatctcacagttcattattatgtatagtttggacggcaagaagtggcaaacttatagaggtaacagtactggaacagacatggtgttcttcggcaacgttgatagctctggcatcaaacacaacatctttaatcctcccataatagctcggtacatcagattgcatccgacccactacagcattaggagtacactccgaatggagcttatgggttgcgacttgaattcctgttcaatgccactcggaatggagtctaaagccatctctgatgcacagataaccgccagtagctactttacgaacatgtttgctacgtggtcaccctctaaggcaaggcttcatttgcaaggccggtctaatgcctggagacctcaggtgaacaacccgaaagaatggctccaggtggactttcagaagaccatgaaagtaacaggtgtcactactcagggagttaagtccttggatactagcatgtatgtgaaggagttccttatttcctcatcacaagatggccaccagtggaccctcttctttcagaatggtaaggtcaaagtgtttcagggcaatcaagacagcttcacacccgtggtgaacagtcttgatcctccactcttgacacgataccttcgaatccatccacagtcttgggagcaccagattgcattgcgcatggaagtacttggatgcgaggctcaggacctctac

SEQ ID NO: 2196 - protein, 1457 aa, synthetic construct
  REGION 1..1457: note = Variant of human B-domain deleted Factor VIII
MQIELSTCFFLCLLRFCFSATRRYYLGAVELSWDYMQSDLGELPVDARFPPRVPKSFPFNTSQVYKKTLFVEFTDHLFNIAKPRPPWMGLLGPTIQAEVYDTVVITLKNMASHPVSLHAVGVSYWKASEGAEYDDQTSQREKEDDKVFPGGSHTYVWQVLKENGPMASDPPCLTYSYLSHVDLVKDLNSGLIGALLVCREGSLAKEKTQTLAKFILLFAVFDEGKSWHSETKNSLMQDRDAASARAWPKMHTVNGYVNRTLPGLIGCHRKSVYWHVIGMGTTPEVHSIFLEGHTFLVRNHRQASLGISPITFLTAQTGLRDLGQFLLFCHIPSHQHDGMEAYVKVDSCPEEPQLRMKNNEEAEDYDDDLTDSEMDVVRFDDDNSPSIIQARSGAKKHPKTWVHYIAAEEEDWDYAPLVLAPDDRSYKSQYLNNGPQRIGRKYKKVRFMAYTDETFKTREAIQHESGILGPLLYGEVGDTLLIIFKNQASRPYNIYPHGITDVRPLYSRRLPKGVKHLKDFPILPGEIFKYKWTITVEDGPTKSDPRCLTRYYSSFVNWERDLASGLIGPLLICYKESVDQRGNQIMSDKRNVILFSVFDENRSWYLTENIQRFLPNPAGVQLEDPEFQASNIMHSINGYVFDSLQLSVCLHEVAYWYILSIGAQTDFLSVFFSGYTFKHKNVYEDTLTLFPFSGETVFMSMENPGLWILGCHNSDFRNRGMTALLKVSSCDWNTGDYYEDSYEDISAYFDSKNNAIEPRSFSQNPPVLKRHQREGTRTTLQSDQEEIDYDDTISVEMKKVDFDIYDEDENQSPRSFQKKTRHYFIAAVERLWDYGMSSSPHVLRNRAQSGSVPQFKKVVFQEFTDGSFTQPLYRGELNEHLGLLGPYIRAEVEDNIMVTFRNQASRPYSFYSSLISYEEDQRQGAEPRKNFVKPNETKTYFWKVQHHMAPTKDEFDCKAWAYFSDVDLEKDVHSGLIGPLLVCHTNTLNPAHGRQVTVQEFALFFTIFDETKSWYFTENMERNCRAPCNIQMEDPTFKENYRFHAINGYIMDTLPGLVMAQDQRIRWYLLSMGSNENIHSIHFSGHVFTVRKKEEYKMALYNLYPGVFETVEMLPSKAGIWRVECLIGEHLHAGMSTLFLVYSNKCQNPLGMASGHIRDFQITASGQYGQWAPKLARLHYSGSINAWSTKEPFSWIKVDLLAPMIIHGIKTQGARQKFSSLYISQFIIMYSLDGKKWQTYRGNSTGTDMVFFGNVDSSGIKHNIFNPPIIARYIRLHPTHYSIRSTLRMELMGCDLNSCSMPLGMESKAISDAQITASSYFTNMFATWSPSKARLHLQGRSNAWRPQVNNPKEWLQVDFQKTMKVTGVTTQGVKSLDTSMYVKEFLISSSQDGHQWTLFFQNGKVKVFQGNQDSFTPVVNSLDPPLLTRYLRIHPQSWEHQIALRMEVLGCEAQDLY

SEQ ID NO: 2197 - DNA, 4371 bp, synthetic construct
  misc_feature 1..4371: note = Variant of human B-domain deleted Factor VIII
  source 1..4371: mol_type = other DNA
atgcagattgaactgtctacctgcttcttcctctgtttgctgaggttctgctttagcgccactagacggtactaccttggcgctgtggagctgtcctgggactatatgcagagtgatttgggagagcttcccgtcgacgcacgatttcctcctcgcgttccaaagtcatttccctttaacacaagccaggtgtacaagaagacgctcttcgtcgaattcaccgatcacctgttcaatatcgccaaacccagaccaccatggatgggtcttttggggcctaccatacaagcggaggtgtatgacacagttgttatcactctcaagaacatggcttctcatccggtaagtcttcacgcagtgggcgtgtcctactggaaagcttcagaaggagccgagtatgatgatcagacatcccagagggagaaagaagacgacaaggtatttccaggtgggtctcatacctatgtgtggcaagtgctcaaagagaatggccctatggcaagcgatccgccgtgtttgacttacagctacctttcacacgttgacctcgtcaaggacctcaactccgggttgattggagccttgttggtatgcagggaaggatctcttgccaaagagaagacacagaccctggccaagtttatccttctctttgctgtgttcgatgagggcaaaagttggcatagcgaaacgaagaattccctcatgcaggatcgcgacgcagccagcgccagagcttggcccaagatgcacactgtgaacggatatgtcaataggacgcttcctggcttgattgggtgtcatcggaaaagtgtctactggcacgtgatcggaatggggacaacaccagaggtccactccatatttctcgaaggccataccttccttgttcgaaaccacagacaggcatccttggggatctctcccattacctttctcactgcccaaacgggtcttcgtgacttgggtcagttccttctcttttgccatatcccgtcacaccagcatgatggtatggaagcttatgtgaaagtcgacagttgtcctgaggagccacagttgcgcatgaagaataatgaagaagccgaggattacgacgacgatctcaccgattctgagatggacgtggtgaggtttgatgacgacaactctccctccatcattcaagctcggagcggggcgaagaaacaccccaagacttgggtccactatatagcggcggaagaggaggattgggattacgctcctcttgtattggcaccagatgaccgctcatacaaaagccagtacctcaacaacggaccgcagagaattggccggaagtataagaaagtgcgatttatggcctatacagacgaaacctttaagacaagggaggccatccagcatgagagtgggattttgggacctcttctttacggcgaagttggtgataccctcctcatcatcttcaagaatcaagcttctcgcccctataacatttacccacacgggatcactgacgttaggcctttgtatagcagaagacttcccaaaggcgtgaagcatctcaaagacttccccattttgccaggcgagatctttaagtacaaatggaccattacagtggaagatggaccgactaaatcagaccctcgatgccttacgcggtactattcctccttcgtgaattgggagagagatttggcaagcggactcataggaccactcctcatctgttacaaggaatctgtagaccagaggggtaaccagattatgagtgataaacgcaatgtgatcctttttagcgtcttcgacgagaaccggtcctggtacttgaccgagaatatacaaaggttccttcccaaccccgcaggcgttcagttggaagaccctgagtttcaggccagcaatattatgcactcaatcaacggctatgtgtttgatagtctccagctttctgtttgcctccatgaagtagcctattggtacatcttgtcaattggtgctcaaacagacttcctctccgtcttcttctccggctacacctttaagcacaagaacgtgtatgaggacactctcacactctttccattttctggagaaaccgtgttcatgagtatggagaatccaggcctttggatcttgggttgccacaacagtgattttcgcaatcggggaatgactgctctcctcaaagtcagcagctgtgattggaacacaggcgactatgaggaagattcttacgaggacataagtgcctactttgactccaagaataacgccattgagcccagatcattctcccagaatcctcccgtgcttaaaaggcatcagcgcgaaggtaccagaactactcttcagtctgatcaagaggagattgactatgacgacaccattagcgtggaaatgaagaaggtagatttcgatatccaggacgaggacgggaaccagtctccgcggagctttcagaagaagacgcgacactacttcattgcagcagtcgaaaggctttgggactacggtatgtcatcatcccctcatgtgttgcgcaatagagctcagagtggaagtgttccacagttcaagaaagtcgtctttcaagagtttacagatggcagcttcacacagcctctctatcggggcgagcttaacgaacatttgggactccttggtccctatatccgagccgaagtggaggacaacattatggttacctttaggaatcaagcctctcgcccctacagcttctactcctccctcatcagttatgaggaggatcagagacaaggcgctgaaccacggaagaactttgtgaaaccgaatgagacgaagacctacttctggaaagtacagcaccacatggcccccacaaaagacgaattcgattgcaaagcatgggcgtatttttcagacgttgacttggagaaagatgtacattcaggacttattggtcctttgttggtgtgtcacactaacactctcaatccagcccatggcaggcaggtgacagtccaggaattcgctcttttctttaccatctttgatgagaccaagtcctggtacttcacggaaaacatggagcgcaattgcagagccccctgtaacatacagatggaggaccctacctttaaggaaaattatcggttccacgcaatcaacggatacattatggatacactccctggccttgtgatggctcaggaccaacgaatcaggtggtacctcctcagcatgggttctaatgagaacatacactccattcacttttcaggacatgtgttcactgtccggaagaaagaagagtataagatggccctctacaatttgtatccaggcgtgtttgagaccgttgaaatgcttccctctaaagctggcatctggagagtagagtgcttgatcggagaacatcttcacgcaggtatgagcaccttgttcctcgtgtacagcaacaaatgtcagaatccacttggcatggccagtggacacattcgcgactttcagatcacagcatctggccagtatggacaatgggccccaaagttggctcgcctccattactccggtagcataaatgcgtggtccactaaagaacctttcagctggattaaggtcgatcttcttgcccccatgatcatccacggcattaagacacagggagcgaggcagaaattctcctccctctacatctcacagttcattattatgtatagtttggacggcaagaagtggcaaacttatagaggtaacagtactggaacagacatggtgttcttcggcaacgttgatagctctggcatcaaacacaacatctttaatcctcccataatagctcggtacatcagattgcatccgacccactacagcattaggagtacactccgaatggagcttatgggttgcgacttgaattcctgttcaatgccactcggaatggagtctaaagccatctctgatgcacagataaccgccagtagctactttacgaacatgtttgctacgtggtcaccctctaaggcaaggcttcatttgcaaggccggtctaatgcctggagacctcaggtgaacaacccgaaagaatggctccaggtggactttcagaagaccatgaaagtaacaggtgtcactactcagggagttaagtccttggatactagcatgtatgtgaaggagttccttatttcctcatcacaagatggccaccagtggaccctcttctttcagaatggtaaggtcaaagtgtttcagggcaatcaagacagcttcacacccgtggtgaacagtcttgatcctccactcttgacacgataccttcgaatccatccacagtcttgggagcaccagattgcattgcgcatggaagtacttggatgcgaggctcaggacctctac

SEQ ID NO: 2198 - protein, 1457 aa, synthetic construct
  REGION 1..1457: note = Variant of human B-domain deleted Factor VIII
MQIELSTCFFLCLLRFCFSATRRYYLGAVELSWDYMQSDLGELPVDARFPPRVPKSFPFNTSQVYKKTLFVEFTDHLFNIAKPRPPWMGLLGPTIQAEVYDTVVITLKNMASHPVSLHAVGVSYWKASEGAEYDDQTSQREKEDDKVFPGGSHTYVWQVLKENGPMASDPPCLTYSYLSHVDLVKDLNSGLIGALLVCREGSLAKEKTQTLAKFILLFAVFDEGKSWHSETKNSLMQDRDAASARAWPKMHTVNGYVNRTLPGLIGCHRKSVYWHVIGMGTTPEVHSIFLEGHTFLVRNHRQASLGISPITFLTAQTGLRDLGQFLLFCHIPSHQHDGMEAYVKVDSCPEEPQLRMKNNEEAEDYDDDLTDSEMDVVRFDDDNSPSIIQARSGAKKHPKTWVHYIAAEEEDWDYAPLVLAPDDRSYKSQYLNNGPQRIGRKYKKVRFMAYTDETFKTREAIQHESGILGPLLYGEVGDTLLIIFKNQASRPYNIYPHGITDVRPLYSRRLPKGVKHLKDFPILPGEIFKYKWTITVEDGPTKSDPRCLTRYYSSFVNWERDLASGLIGPLLICYKESVDQRGNQIMSDKRNVILFSVFDENRSWYLTENIQRFLPNPAGVQLEDPEFQASNIMHSINGYVFDSLQLSVCLHEVAYWYILSIGAQTDFLSVFFSGYTFKHKNVYEDTLTLFPFSGETVFMSMENPGLWILGCHNSDFRNRGMTALLKVSSCDWNTGDYEEDSYEDISAYFDSKNNAIEPRSFSQNPPVLKRHQREGTRTTLQSDQEEIDYDDTISVEMKKVDFDIQDEDGNQSPRSFQKKTRHYFIAAVERLWDYGMSSSPHVLRNRAQSGSVPQFKKVVFQEFTDGSFTQPLYRGELNEHLGLLGPYIRAEVEDNIMVTFRNQASRPYSFYSSLISYEEDQRQGAEPRKNFVKPNETKTYFWKVQHHMAPTKDEFDCKAWAYFSDVDLEKDVHSGLIGPLLVCHTNTLNPAHGRQVTVQEFALFFTIFDETKSWYFTENMERNCRAPCNIQMEDPTFKENYRFHAINGYIMDTLPGLVMAQDQRIRWYLLSMGSNENIHSIHFSGHVFTVRKKEEYKMALYNLYPGVFETVEMLPSKAGIWRVECLIGEHLHAGMSTLFLVYSNKCQNPLGMASGHIRDFQITASGQYGQWAPKLARLHYSGSINAWSTKEPFSWIKVDLLAPMIIHGIKTQGARQKFSSLYISQFIIMYSLDGKKWQTYRGNSTGTDMVFFGNVDSSGIKHNIFNPPIIARYIRLHPTHYSIRSTLRMELMGCDLNSCSMPLGMESKAISDAQITASSYFTNMFATWSPSKARLHLQGRSNAWRPQVNNPKEWLQVDFQKTMKVTGVTTQGVKSLDTSMYVKEFLISSSQDGHQWTLFFQNGKVKVFQGNQDSFTPVVNSLDPPLLTRYLRIHPQSWEHQIALRMEVLGCEAQDLY

SEQ ID NO: 2199 - DNA, 4371 bp, synthetic construct
  misc_feature 1..4371: note = Variant of human B-domain deleted Factor VIII
  source 1..4371: mol_type = other DNA
atgcagattgaactgtctacctgcttcttcctctgtttgctgaggttctgctttagcgccactagacggtactaccttggcgctgtggagctgtcctgggactatatgcagagtgatttgggagagcttcccgtcgacgcacgatttcctcctcgcgttccaaagtcatttccctttaacacaagccaggtgtacaagaagacgctcttcgtcgaattcaccgatcacctgttcaatatcgccaaacccagaccaccatggatgggtcttttggggcctaccatacaagcggaggtgtatgacacagttgttatcactctcaagaacatggcttctcatccggtaagtcttcacgcagtgggcgtgtcctactggaaagcttcagaaggagccgagtatgatgatcagacatcccagagggagaaagaagacgacaaggtatttccaggtgggtctcatacctatgtgtggcaagtgctcaaagagaatggccctatggcaagcgatccgccgtgtttgacttacagctacctttcacacgttgacctcgtcaaggacctcaactccgggttgattggagccttgttggtatgcagggaaggatctcttgccaaagagaagacacagaccctggccaagtttatccttctctttgctgtgttcgatgagggcaaaagttggcatagcgaaacgaagaattccctcatgcaggatcgcgacgcagccagcgccagagcttggcccaagatgcacactgtgaacggatatgtcaataggacgcttcctggcttgattgggtgtcatcggaaaagtgtctactggcacgtgatcggaatggggacaacaccagaggtccactccatatttctcgaaggccataccttccttgttcgaaaccacagacaggcatccttggggatctctcccattacctttctcactgcccaaacgggtcttcgtgacttgggtcagttccttctcttttgccatatcccgtcacaccagcatgatggtatggaagcttatgtgaaagtcgacagttgtcctgaggagccacagttgcgcatgaagaataatgaagaagccgaggattacgacgacgatctcaccgattctgagatggacgtggtgaggtttgatgacgacaactctccctccatcattcaagctcggagcggggcgaagaaacaccccaagacttgggtccactatatagcggcggaagaggaggattgggattacgctcctcttgtattggcaccagatgaccgctcatacaaaagccagtacctcaacaacggaccgcagagaattggccggaagtataagaaagtgcgatttatggcctatacagacgaaacctttaagacaagggaggccatccagcatgagagtgggattttgggacctcttctttacggcgaagttggtgataccctcctcatcatcttcaagaatcaagcttctcgcccctataacatttacccacacgggatcactgacgttaggcctttgtatagcagaagacttcccaaaggcgtgaagcatctcaaagacttccccattttgccaggcgagatctttaagtacaaatggaccattacagtggaagatggaccgactaaatcggaccctcgatgccttacgcggtactattcctccttcgtgaattgggagagagatttggcaagcggactcataggaccactcctcatctgttacaaggaatctgtagaccagaggggtaaccagattatgagtgataaacgcaatgtgatcctttttagcgtcttcgacgagaaccggtcctggtacttgaccgagaatatacaaaggttccttcccaaccccgcaggcgttcagttggaagaccctgagtttcaggccagcaatattatgcactcaatcaacggctatgtgtttgatagtctccagctttctgtttgcctccatgaagtagcctattggtacatcttgtcaattggtgctcaaacagacttcctctccgtcttcttctccggctacacctttaagcacaagaacgtgtatgaggacactctcacactctttccattttctggagaaaccgtgttcatgagcatggagaatccaggcctttggatcttgggttgccacaacagtgattttcgcaatcggggaatgactgctctcctcaaagtcagcagctgtgattggaacacaggcgactatgaggaagattcttacgaggacataagtgcctactttgactccaaaaataacgccattgagcccagatcattctcccagaatcctcccgtgcttaaaaggcatcagcgcgaaggtaccagaactactcttcagtctgatcaagaggagattgactatgacgacaccattagcgtggaaatgaagaaggaggatttcgatatctatgacgaagatgggaaccagtctccgcggagctttcagaagaagacgcgacactacttcattgcagcagtcgaaaggctttgggactacggtatgtcatcatcccctcatgtgttgcgcaatagagctcagagtggaagtgttccacagttcaagaaagtcgtctttcaagagtttacagatggcagcttcacacagcctctctatcggggcgagcttaacgaacatttgggactccttggtccctatatccgagccgaagtggaggacaacattatggttacctttaggaatcaagcctctcgcccctacagcttctactcctccctcatcagttatgaggaggatcagagacaaggcgctgaaccacggaagaactttgtgaaaccgaatgagacgaagacctacttctggaaagtacagcaccacatggcccccacaaaagacgaattcgattgcaaagcatgggcgtatttttcagacgttgacttggagaaagatgtacattcaggacttattggtcctttgttggtgtgtcacactaacactctcaatccagcccatggcaggcaggtgacagtccaggaattcgctcttttctttaccatctttgatgagaccaagtcctggtacttcacggaaaacatggagcgcaattgcagagccccctgtaacatacagatggaggaccctacctttaaggaaaattatcggttccacgcaatcaacggatacattatggatacactccctggccttgtgatggctcaggaccaacgaatcaggtggtacctcctcagcatgggttctaatgagaacatacactccattcacttttcaggacatgtgttcactgtccggaagggtgaagagtataagatggccctctacaatttgtatccaggcgtgtttgagaccgttgaaatgcttccctctaaagctggcatctggagagtagagtgcttgatcggagaacatcttcacgcaggtatgagcaccttgttcctcgtgtacagcaacaaatgtcagaatccacttggcatggccagtggacacattcgcgactttcagatcacagcatctggccagtatggacaatgggccccaaagttggctcgcctccattactccggtagcataaatgcgtggtccactaaagaacctttcagctggattaaggtcgatcttcttgcccccatgatcatccacggcattaagacacagggagcgaggcagaaattctcctccctctacatctcacagttcattattatgtatagtttggacggcaagaagtggcaaacttatagaggtaacagtactggaacagacatggtgttcttcggcaacgttgatagctctggcatcaaacacaacatctttaatcctcccataatagctcggtacatcagattgcatccgacccactacagcattaggagtacactccgaatggagcttatgggttgcgacttgaattcctgttcaatgccactcggaatggagtctaaagccatctctgatgcacagataaccgccagtagctactttacgaacatgtttgctacgtggtcaccctctaaggcaaggcttcatttgcaaggccggtctaatgcctggagacctcaggtgaacaacccgaaagaatggctccaggtggactttcagaagaccatgaaagtaacaggtgtcactactcagggagttaagtccttggatactagcatgtatgtgaaggagttccttatttcctcatcacaagatggccaccagtggaccctcttctttcagaatggtaaggtcaaagtgtttcagggcaatcaagacagcttcacacccgtggtgaacagtcttgatcctccactcttgacacgataccttcgaatccatccacagtcttgggagcaccagattgcattgcgcatggaagtacttggatgcgaggctcaggacctctac

SEQ ID NO: 2200 - protein, 1457 aa, synthetic construct
  REGION 1..1457: note = Variant of human B-domain deleted Factor VIII
MQIELSTCFFLCLLRFCFSATRRYYLGAVELSWDYMQSDLGELPVDARFPPRVPKSFPFNTSQVYKKTLFVEFTDHLFNIAKPRPPWMGLLGPTIQAEVYDTVVITLKNMASHPVSLHAVGVSYWKASEGAEYDDQTSQREKEDDKVFPGGSHTYVWQVLKENGPMASDPPCLTYSYLSHVDLVKDLNSGLIGALLVCREGSLAKEKTQTLAKFILLFAVFDEGKSWHSETKNSLMQDRDAASARAWPKMHTVNGYVNRTLPGLIGCHRKSVYWHVIGMGTTPEVHSIFLEGHTFLVRNHRQASLGISPITFLTAQTGLRDLGQFLLFCHIPSHQHDGMEAYVKVDSCPEEPQLRMKNNEEAEDYDDDLTDSEMDVVRFDDDNSPSIIQARSGAKKHPKTWVHYIAAEEEDWDYAPLVLAPDDRSYKSQYLNNGPQRIGRKYKKVRFMAYTDETFKTREAIQHESGILGPLLYGEVGDTLLIIFKNQASRPYNIYPHGITDVRPLYSRRLPKGVKHLKDFPILPGEIFKYKWTITVEDGPTKSDPRCLTRYYSSFVNWERDLASGLIGPLLICYKESVDQRGNQIMSDKRNVILFSVFDENRSWYLTENIQRFLPNPAGVQLEDPEFQASNIMHSINGYVFDSLQLSVCLHEVAYWYILSIGAQTDFLSVFFSGYTFKHKNVYEDTLTLFPFSGETVFMSMENPGLWILGCHNSDFRNRGMTALLKVSSCDWNTGDYEEDSYEDISAYFDSKNNAIEPRSFSQNPPVLKRHQREGTRTTLQSDQEEIDYDDTISVEMKKEDFDIYDEDGNQSPRSFQKKTRHYFIAAVERLWDYGMSSSPHVLRNRAQSGSVPQFKKVVFQEFTDGSFTQPLYRGELNEHLGLLGPYIRAEVEDNIMVTFRNQASRPYSFYSSLISYEEDQRQGAEPRKNFVKPNETKTYFWKVQHHMAPTKDEFDCKAWAYFSDVDLEKDVHSGLIGPLLVCHTNTLNPAHGRQVTVQEFALFFTIFDETKSWYFTENMERNCRAPCNIQMEDPTFKENYRFHAINGYIMDTLPGLVMAQDQRIRWYLLSMGSNENIHSIHFSGHVFTVRKGEEYKMALYNLYPGVFETVEMLPSKAGIWRVECLIGEHLHAGMSTLFLVYSNKCQNPLGMASGHIRDFQITASGQYGQWAPKLARLHYSGSINAWSTKEPFSWIKVDLLAPMIIHGIKTQGARQKFSSLYISQFIIMYSLDGKKWQTYRGNSTGTDMVFFGNVDSSGIKHNIFNPPIIARYIRLHPTHYSIRSTLRMELMGCDLNSCSMPLGMESKAISDAQITASSYFTNMFATWSPSKARLHLQGRSNAWRPQVNNPKEWLQVDFQKTMKVTGVTTQGVKSLDTSMYVKEFLISSSQDGHQWTLFFQNGKVKVFQGNQDSFTPVVNSLDPPLLTRYLRIHPQSWEHQIALRMEVLGCEAQDLY

SEQ ID NO: 2201 - DNA, 4371 bp, synthetic construct
  misc_feature 1..4371: note = Variant of human B-domain deleted Factor VIII
  source 1..4371: mol_type = other DNA
atgcagattgaactgtctacctgcttcttcctctgtttgctgaggttctgctttagcgccactagacggtactaccttggcgctgtggagctgtcctgggactatatgcagagtgatttgggagagcttcccgtcgacgcacgatttcctcctcgcgttccaaagtcatttccctttaacacaagccaggtgtacaagaagacgctcttcgtcgaattcaccgatcacctgttcaatatcgccaaacccagaccaccatggatgggtcttttggggcctaccatacaagcggaggtgtatgacacagttgttatcactctcaagaacatggcttctcatccggtaagtcttcacgcagtgggcgtgtcctactggaaagcttcagaaggagccgagtatgatgatcagacatcccagagggagaaagaagacgacaaggtatttccaggtgggtctcatacctatgtgtggcaagtgctcaaagagaatggccctatggcaagcgatccgccgtgtttgacttacagctacctttcacacgttgacctcgtcaaggacctcaactccgggttgattggagccttgttggtatgcagggaaggatctcttgccaaagagaagacacagaccctggccaagtttatccttctctttgctgtgttcgatgagggcaaaagttggcatagcgaaacgaagaattccctcatgcaggatcgcgacgcagccagcgccagagcttggcccaagatgcacactgtgaacggatatgtcaataggacgcttcctggcttgattgggtgtcatcggaaaagtgtctactggcacgtgatcggaatggggacaacaccagaggtccactccatatttctcgaaggccataccttccttgttcgaaaccacagacaggcatccttggggatctctcccattacctttctcactgcccaaacgggtcttcgtgacttgggtcagttccttctcttttgccatatcccgtcacaccagcatgatggtatggaagcttatgtgaaagtcgacagttgtcctgaggagccacagttgcgcatgaagaataatgaagaagccgaggattacgacgacgatctcaccgattctgagatggacgtggtgaggtttgatgacgacaactctccctccatcattcaagctcggagcggggcgaagaaacaccccaagacttgggtccactatatagcggcggaagaggaggattgggattacgctcctcttgtattggcaccagatgaccgctcatacaaaagccagtacctcaacaacggaccgcagagaattggccggaagtataagaaagtgcgatttatggcctatacagacgaaacctttaagacaagggaggccatccagcatgagagtgggattttgggacctcttctttacggcgaagttggtgataccctcctcatcatcttcaagaatcaagcttctcgcccctataacatttacccacacgggatcactgacgttaggcctttgtatagcagaagacttcccaaaggcgtgaagcatctcaaagacttccccattttgccaggcgagatctttaagtacaaatggaccattacagtggaagatggaccgactaaatcagaccctcgatgccttacgcggtactattcctccttcgtgaattgggagagagatttggcaagcggactcataggaccactcctcatctgttacaaggaatctgtagaccagaggggtaaccagattatgagtgataaacgcaatgtgatcctttttagcgtcttcgacgagaaccggtcctggtacttgaccgagaatatacaaaggttccttcccaaccccgcaggcgttcagttggaagaccctgagtttcaggccagcaatattatgcactcaatcaacggctatgtgtttgatagtctccagctttctgtttgcctccatgaagtagcctattggtacatcttgtcaattggtgctcaaacagacttcctctccgtcttcttctccggctacacctttaagcacaagaacgtgtatgaggacactctcacactctttccattttctggagaaaccgtgttcatgagcatggagaatccaggcctttggatcttgggttgccacaacagtgattttcgcaatcggggaatgactgctctcctcaaagtcagcagctgtgattggaacacaggcgactatgaggaagattcttacgaggacataagtgcctactttgactccgagaataacgccattgagcccagatcattctcccagaatcctcccgtgcttaaaaggcatcagcgcgaaggtaccagaactactcttcagtctgatcaagaggagattgactatgacgacaccattagcgtggaaatgaagaaggaggatttcgatatctatgacgaagatgagaaccagtctccgcggagctttcagaagaagacgcgacactacttcattgcagcagtcgaaaggctttgggactacggtatgtcatcatcccctcatgtgttgcgcaatagagctcagagtggaagtgttccacagttcaagaaagtcgtctttcaagagtttacagatggcagcttcacacagcctctctatcggggcgagcttaacgaacatttgggactccttggtccctatatccgagccgaagtggaggacaacattatggttacctttaggaatcaagcctctcgcccctacagcttctactcctccctcatcagttatgaggaggatcagagacaaggcgctgaaccacggaagaactttgtgaaaccgaatgagacgaagacctacttctggaaagtacagcaccacatggcccccacaaaagacgaattcgattgcaaagcatgggcgtatttttcagacgttgacttggagaaagatgtacattcaggacttattggtcctttgttggtgtgtcacactaacactctcaatccagcccatggcaggcaggtgacagtccaggaattcgctcttttctttaccatctttgatgagaccaagtcctggtacttcacggaaaacatggagcgcaattgcagagccccctgtaacatacagatggaggaccctacctttaaggaaaattatcggttccacgcaatcaacggatacattatggatacactccctggccttgtgatggctcaggaccaacgaatcaggtggtacctcctcagcatgggttctaatgaaaacatacactccattcacttttcaggacatgtgttcactgtccggaaggcggaagagtataagatggccctctacaatttgtatccaggcgtgtttgagaccgttgaaatgcttccctctaaagctggcatctggagagtagagtgcttgatcggagaacatcttcacgcaggtatgagcaccttgttcctcgtgtacagcaacaaatgtcagaatccacttggcatggccagtggacacattcgcgactttcagatcacagcatctggccagtatggacaatgggccccaaagttggctcgcctccattactccggtagcataaatgcgtggtccactaaagaacctttcagctggattaaggtcgatcttcttgcccccatgatcatccacggcattaagacacagggagcgaggcagaaattctcctccctctacatctcacagttcattattatgtatagtttggacggcaagaagtggcaaacttatagaggtaacagtactggaacagacatggtgttcttcggcaacgttgatagctctggcatcaaacacaacatctttaatcctcccataatagctcggtacatcagattgcatccgacccactacagcattaggagtacactccgaatggagcttatgggttgcgacttgaattcctgttcaatgccactcggaatggagtctaaagccatctctgatgcacagataaccgccagtagctactttacgaacatgtttgctacgtggtcaccctctaaggcaaggcttcatttgcaaggccggtctaatgcctggagacctcaggtgaacaacccgaaagaatggctccaggtggactttcagaagaccatgaaagtaacaggtgtcactactcagggagttaagtccttggatactagcatgtatgtgaaggagttccttatttcctcatcacaagatggccaccagtggaccctcttctttcagaatggtaaggtcaaagtgtttcagggcaatcaagacagcttcacacccgtggtgaacagtcttgatcctccactcttgacacgataccttcgaatccatccacagtcttgggagcaccagattgcattgcgcatggaagtacttggatgcgaggctcaggacctctac

SEQ ID NO: 2202 - protein, 1457 aa, synthetic construct
  REGION 1..1457: note = Variant of human B-domain deleted Factor VIII
MQIELSTCFFLCLLRFCFSATRRYYLGAVELSWDYMQSDLGELPVDARFPPRVPKSFPFNTSQVYKKTLFVEFTDHLFNIAKPRPPWMGLLGPTIQAEVYDTVVITLKNMASHPVSLHAVGVSYWKASEGAEYDDQTSQREKEDDKVFPGGSHTYVWQVLKENGPMASDPPCLTYSYLSHVDLVKDLNSGLIGALLVCREGSLAKEKTQTLAKFILLFAVFDEGKSWHSETKNSLMQDRDAASARAWPKMHTVNGYVNRTLPGLIGCHRKSVYWHVIGMGTTPEVHSIFLEGHTFLVRNHRQASLGISPITFLTAQTGLRDLGQFLLFCHIPSHQHDGMEAYVKVDSCPEEPQLRMKNNEEAEDYDDDLTDSEMDVVRFDDDNSPSIIQARSGAKKHPKTWVHYIAAEEEDWDYAPLVLAPDDRSYKSQYLNNGPQRIGRKYKKVRFMAYTDETFKTREAIQHESGILGPLLYGEVGDTLLIIFKNQASRPYNIYPHGITDVRPLYSRRLPKGVKHLKDFPILPGEIFKYKWTITVEDGPTKSDPRCLTRYYSSFVNWERDLASGLIGPLLICYKESVDQRGNQIMSDKRNVILFSVFDENRSWYLTENIQRFLPNPAGVQLEDPEFQASNIMHSINGYVFDSLQLSVCLHEVAYWYILSIGAQTDFLSVFFSGYTFKHKNVYEDTLTLFPFSGETVFMSMENPGLWILGCHNSDFRNRGMTALLKVSSCDWNTGDYEEDSYEDISAYFDSENNAIEPRSFSQNPPVLKRHQREGTRTTLQSDQEEIDYDDTISVEMKKEDFDIYDEDENQSPRSFQKKTRHYFIAAVERLWDYGMSSSPHVLRNRAQSGSVPQFKKVVFQEFTDGSFTQPLYRGELNEHLGLLGPYIRAEVEDNIMVTFRNQASRPYSFYSSLISYEEDQRQGAEPRKNFVKPNETKTYFWKVQHHMAPTKDEFDCKAWAYFSDVDLEKDVHSGLIGPLLVCHTNTLNPAHGRQVTVQEFALFFTIFDETKSWYFTENMERNCRAPCNIQMEDPTFKENYRFHAINGYIMDTLPGLVMAQDQRIRWYLLSMGSNENIHSIHFSGHVFTVRKAEEYKMALYNLYPGVFETVEMLPSKAGIWRVECLIGEHLHAGMSTLFLVYSNKCQNPLGMASGHIRDFQITASGQYGQWAPKLARLHYSGSINAWSTKEPFSWIKVDLLAPMIIHGIKTQGARQKFSSLYISQFIIMYSLDGKKWQTYRGNSTGTDMVFFGNVDSSGIKHNIFNPPIIARYIRLHPTHYSIRSTLRMELMGCDLNSCSMPLGMESKAISDAQITASSYFTNMFATWSPSKARLHLQGRSNAWRPQVNNPKEWLQVDFQKTMKVTGVTTQGVKSLDTSMYVKEFLISSSQDGHQWTLFFQNGKVKVFQGNQDSFTPVVNSLDPPLLTRYLRIHPQSWEHQIALRMEVLGCEAQDLY

SEQ ID NO: 2203 - DNA, 4371 bp, synthetic construct
  misc_feature 1..4371: note = Variant of human B-domain deleted Factor VIII
  source 1..4371: mol_type = other DNA
atgcagattgaactgtctacctgcttcttcctctgtttgctgaggttctgctttagcgccactagacggtactaccttggcgctgtggagctgtcctgggactatatgcagagtgatttgggagagcttcccgtcgacgcacgatttcctcctcgcgttccaaagtcatttccctttaacacaagccaggtgtacaagaagacgctcttcgtcgaattcaccgatcacctgttcaatatcgccaaacccagaccaccatggatgggtcttttggggcctaccatacaagcggaggtgtatgacacagttgttatcactctcaagaacatggcttctcatccggtaagtcttcacgcagtgggcgtgtcctactggaaagcttcagaaggagccgagtatgatgatcagacatcccagagggagaaagaagacgacaaggtatttccaggtgggtctcatacctatgtgtggcaagtgctcaaagagaatggccctatggcaagcgatccgccgtgtttgacttacagctacctttcacacgttgacctcgtcaaggacctcaactccgggttgattggagccttgttggtatgcagggaaggatctcttgccaaagagaagacacagaccctggccaagtttatccttctctttgctgtgttcgatgagggcaaaagttggcatagcgaaacgaagaattccctcatgcaggatcgcgacgcagccagcgccagagcttggcccaagatgcacactgtgaacggatatgtcaataggacgcttcctggcttgattgggtgtcatcggaaaagtgtctactggcacgtgatcggaatggggacaacaccagaggtccactccatatttctcgaaggccataccttccttgttcgaaaccacagacaggcatccttggggatctctcccattacctttctcactgcccaaacgggtcttcgtgacttgggtcagttccttctcttttgccatatcccgtcacaccagcatgatggtatggaagcttatgtgaaagtcgacagttgtcctgaggagccacagttgcgcatgaagaataatgaagaagccgaggattacgacgacgatctcaccgattctgagatggacgtggtgaggtttgatgacgacaactctccctccatcattcaagctcggagcggggcgaagaaacaccccaagacttgggtccactatatagcggcggaagaggaggattgggattacgctcctcttgtattggcaccagatgaccgctcatacaaaagccagtacctcaacaacggaccgcagagaattggccggaagtataagaaagtgcgatttatggcctatacagacgaaacctttaagacaagggaggccatccagcatgagagtgggattttgggacctcttctttacggcgaagttggtgataccctcctcatcatcttcaagaatcaagcttctcgcccctataacatttacccacacgggatcactgacgttaggcctttgtatagcagaagacttcccaaaggcgtgaagcatctcaaagacttccccattttgccaggcgagatctttaagtacaaatggaccattacagtggaagatggaccgactaaatcggaccctcgatgccttacgcggtactattcctccttcgtgaattgggagagagatttggcaagcggactcataggaccactcctcatctgttacaaggaatctgtagaccagaggggtaaccagattatgagtgataaacgcaatgtgatcctttttagcgtcttcgacgagaaccggtcctggtacttgaccgagaatatacaaaggttccttcccaaccccgcaggcgttcagttggaagaccctgagtttcaggccagcaatattatgcactcaatcaacggctatgtgtttgatagtctccagctttctgtttgcctccatgaagtagcctattggtacatcttgtcaattggtgctcaaacagacttcctctccgtcttcttctccggctacacctttaagcacaagaacgtgtatgaggacactctcacactctttccattttctggagaaaccgtgttcatgagcatggagaatccaggcctttggatcttgggttgccacaacagtgattttcgcaatcggggaatgactgctctcctcaaagtcagcagctgtgattggaacacaggcgactatgaggaagattcttacgaggacataagtgcctactttgactccgaaaataacgccattgagcccagatcattctcccagaatcctcccgtgcttaaaaggcatcagcgcgaaggtaccagaactactcttcagtctgatcaagaggagattgactatgacgacaccattagcgtggaaatgaagaaggaggatttcgatatctatgacgaagatgagaaccagtctccgcggagctttcagaagaagacgcgacactacttcattgcagcagtcgaaaggctttgggactacggtatgtcatcatcccctcatgtgttgcgcaatagagctcagagtggaagtgttccacagttcaagaaagtcgtctttcaagagtttacagatggcagcttcacacagcctctctatcggggcgagcttaacgaacatttgggactccttggtccctatatccgagccgaagtggaggacaacattatggttacctttaggaatcaagcctctcgcccctacagcttctactcctccctcatcagttatgaggaggatcagagacaaggcgctgaaccacggaagaactttgtgaaaccgaatgagacgaagacctacttctggaaagtacagcaccacatggcccccacaaaagacgaattcgattgcaaagcatgggcgtatttttcagacgttgacttggagaaagatgtacattcaggacttattggtcctttgttggtgtgtcacactaacactctcaatccagcccatggcaggcaggtgacagtccaggaattcgctcttttctttaccatctttgatgagaccaagtcctggtacttcacggaaaacatggagcgcaattgcagagccccctgtaacatacagatggaggaccctacctttaaggaaaattatcggttccacgcaatcaacggatacattatggatacactccctggccttgtgatggctcaggaccaacgaatcaggtggtacctcctcagcatgggttctaatgagaacatacactccattcacttttcaggacatgtgttcactgtccggaagggtgaagagtataagatggccctctacaatttgtatccaggcgtgtttgagaccgttgaaatgcttccctctaaagctggcatctggagagtagagtgcttgatcggagaacatcttcacgcaggtatgagcaccttgttcctcgtgtacagcaacaaatgtcagaatccacttggcatggccagtggacacattcgcgactttcagatcacagcatctggccagtatggacaatgggccccaaagttggctcgcctccattactccggtagcataaatgcgtggtccactaaagaacctttcagctggattaaggtcgatcttcttgcccccatgatcatccacggcattaagacacagggagcgaggcagaaattctcctccctctacatctcacagttcattattatgtatagtttggacggcaagaagtggcaaacttatagaggtaacagtactggaacagacatggtgttcttcggcaacgttgatagctctggcatcaaacacaacatctttaatcctcccataatagctcggtacatcagattgcatccgacccactacagcattaggagtacactccgaatggagcttatgggttgcgacttgaattcctgttcaatgccactcggaatggagtctaaagccatctctgatgcacagataaccgccagtagctactttacgaacatgtttgctacgtggtcaccctctaaggcaaggcttcatttgcaaggccggtctaatgcctggagacctcaggtgaacaacccgaaagaatggctccaggtggactttcagaagaccatgaaagtaacaggtgtcactactcagggagttaagtccttggatactagcatgtatgtgaaggagttccttatttcctcatcacaagatggccaccagtggaccctcttctttcagaatggtaaggtcaaagtgtttcagggcaatcaagacagcttcacacccgtggtgaacagtcttgatcctccactcttgacacgataccttcgaatccatccacagtcttgggagcaccagattgcattgcgcatggaagtacttggatgcgaggctcaggacctctac

SEQ ID NO: 2204 - protein, 1457 aa, synthetic construct
  REGION 1..1457: note = Variant of human B-domain deleted Factor VIII
MQIELSTCFFLCLLRFCFSATRRYYLGAVELSWDYMQSDLGELPVDARFPPRVPKSFPFNTSQVYKKTLFVEFTDHLFNIAKPRPPWMGLLGPTIQAEVYDTVVITLKNMASHPVSLHAVGVSYWKASEGAEYDDQTSQREKEDDKVFPGGSHTYVWQVLKENGPMASDPPCLTYSYLSHVDLVKDLNSGLIGALLVCREGSLAKEKTQTLAKFILLFAVFDEGKSWHSETKNSLMQDRDAASARAWPKMHTVNGYVNRTLPGLIGCHRKSVYWHVIGMGTTPEVHSIFLEGHTFLVRNHRQASLGISPITFLTAQTGLRDLGQFLLFCHIPSHQHDGMEAYVKVDSCPEEPQLRMKNNEEAEDYDDDLTDSEMDVVRFDDDNSPSIIQARSGAKKHPKTWVHYIAAEEEDWDYAPLVLAPDDRSYKSQYLNNGPQRIGRKYKKVRFMAYTDETFKTREAIQHESGILGPLLYGEVGDTLLIIFKNQASRPYNIYPHGITDVRPLYSRRLPKGVKHLKDFPILPGEIFKYKWTITVEDGPTKSDPRCLTRYYSSFVNWERDLASGLIGPLLICYKESVDQRGNQIMSDKRNVILFSVFDENRSWYLTENIQRFLPNPAGVQLEDPEFQASNIMHSINGYVFDSLQLSVCLHEVAYWYILSIGAQTDFLSVFFSGYTFKHKNVYEDTLTLFPFSGETVFMSMENPGLWILGCHNSDFRNRGMTALLKVSSCDWNTGDYEEDSYEDISAYFDSENNAIEPRSFSQNPPVLKRHQREGTRTTLQSDQEEIDYDDTISVEMKKEDFDIYDEDENQSPRSFQKKTRHYFIAAVERLWDYGMSSSPHVLRNRAQSGSVPQFKKVVFQEFTDGSFTQPLYRGELNEHLGLLGPYIRAEVEDNIMVTFRNQASRPYSFYSSLISYEEDQRQGAEPRKNFVKPNETKTYFWKVQHHMAPTKDEFDCKAWAYFSDVDLEKDVHSGLIGPLLVCHTNTLNPAHGRQVTVQEFALFFTIFDETKSWYFTENMERNCRAPCNIQMEDPTFKENYRFHAINGYIMDTLPGLVMAQDQRIRWYLLSMGSNENIHSIHFSGHVFTVRKGEEYKMALYNLYPGVFETVEMLPSKAGIWRVECLIGEHLHAGMSTLFLVYSNKCQNPLGMASGHIRDFQITASGQYGQWAPKLARLHYSGSINAWSTKEPFSWIKVDLLAPMIIHGIKTQGARQKFSSLYISQFIIMYSLDGKKWQTYRGNSTGTDMVFFGNVDSSGIKHNIFNPPIIARYIRLHPTHYSIRSTLRMELMGCDLNSCSMPLGMESKAISDAQITASSYFTNMFATWSPSKARLHLQGRSNAWRPQVNNPKEWLQVDFQKTMKVTGVTTQGVKSLDTSMYVKEFLISSSQDGHQWTLFFQNGKVKVFQGNQDSFTPVVNSLDPPLLTRYLRIHPQSWEHQIALRMEVLGCEAQDLY

SEQ ID NO: 2205 - DNA, 4371 bp, synthetic construct
  misc_feature 1..4371: note = Variant of human B-domain deleted Factor VIII
  source 1..4371: mol_type = other DNA
atgcagattgaactgtctacctgcttcttcctctgtttgctgaggttctgctttagcgccactagacggtactaccttggcgctgtggagctgtcctgggactatatgcagagtgatttgggagagcttcccgtcgacgcacgatttcctcctcgcgttccaaagtcatttccctttaacacaagccaggtgtacaagaagacgctcttcgtcgaattcaccgatcacctgttcaatatcgccaaacccagaccaccatggatgggtcttttggggcctaccatacaagcggaggtgtatgacacagttgttatcactctcaagaacatggcttctcatccggtaagtcttcacgcagtgggcgtgtcctactggaaagcttcagaaggagccgagtatgatgatcagacatcccagagggagaaagaagacgacaaggtatttccaggtgggtctcatacctatgtgtggcaagtgctcaaagagaatggccctatggcaagcgatccgccgtgtttgacttacagctacctttcacacgttgacctcgtcaaggacctcaactccgggttgattggagccttgttggtatgcagggaaggatctcttgccaaagagaagacacagaccctggccaagtttatccttctctttgctgtgttcgatgagggcaaaagttggcatagcgaaacgaagaattccctcatgcaggatcgcgacgcagccagcgccagagcttggcccaagatgcacactgtgaacggatatgtcaataggacgcttcctggcttgattgggtgtcatcggaaaagtgtctactggcacgtgatcggaatggggacaacaccagaggtccactccatatttctcgaaggccataccttccttgttcgaaaccacagacaggcatccttggggatctctcccattacctttctcactgcccaaacgggtcttcgtgacttgggtcagttccttctcttttgccatatcccgtcacaccagcatgatggtatggaagcttatgtgaaagtcgacagttgtcctgaggagccacagttgcgcatgaagaataatgaagaagccgaggattacgacgacgatctcaccgattctgagatggacgtggtgaggtttgatgacgacaactctccctccatcattcaagctcggagcggggcgaagaaacaccccaagacttgggtccactatatagcggcggaagaggaggattgggattacgctcctcttgtattggcaccagatgaccgctcatacaaaagccagtacctcaacaacggaccgcagagaattggccggaagtataagaaagtgcgatttatggcctatacagacgaaacctttaagacaagggaggccatccagcatgagagtgggattttgggacctcttctttacggcgaagttggtgataccctcctcatcatcttcaagaatcaagcttctcgcccctataacatttacccacacgggatcactgacgttaggcctttgtatagcagaagacttcccaaaggcgtgaagcatctcaaagacttccccattttgccaggcgagatctttaagtacaaatggaccattacagtggaagatggaccgactaaatcggaccctcgatgccttacgcggtactattcctccttcgtgaattgggagagagatttggcaagcggactcataggaccactcctcatctgttacaaggaatctgtagaccagaggggtaaccagattatgagtgataaacgcaatgtgatcctttttagcgtcttcgacgagaaccggtcctggtacttgaccgagaatatacaaaggttccttcccaaccccgcaggcgttcagttggaagaccctgagtttcaggccagcaatattatgcactcaatcaacggctatgtgtttgatagtctccagctttctgtttgcctccatgaagtagcctattggtacatcttgtcaattggtgctcaaacagacttcctctccgtcttcttctccggctacacctttaagcacaagaacgtgtatgaggacactctcacactctttccattttctggagaaaccgtgttcatggagatggagaatccaggcctttggatcttgggttgccacaacagtgattttcgcaatcggggaatgactgctctcctcaaagtcagcagctgtgattggaacacaggcgactatgaggaagattcttacgaggacataagtgcctactttgactccaagaataacgccattgagcccagatcattctcccagaatcctcccgtgcttaaaaggcatcagcgcgaaggtaccagaactactcttcagtctgatcaagaggagattgactatgacgacaccattagcgtggaaatgaagaaggaggatttcgatatctatgacgaagatgagaaccagtctccgcggagctttcagaagaagacgcgacactacttcattgcagcagtcgaaaggctttgggactacggtatgtcatcatcccctcatgtgttgcgcaatagagctcagagtggaagtgttccacagttcaagaaagtcgtctttcaagagtttacagatggcagcttcacacagcctctctatcggggcgagcttaacgaacatttgggactccttggtccctatatccgagccgaagtggaggacaacattatggttacctttaggaatcaagcctctcgcccctacagcttctactcctccctcatcagttatgaggaggatcagagacaaggcgctgaaccacggaagaactttgtgaaaccgaatgagacgaagacctacttctggaaagtacagcaccacatggcccccacaaaagacgaattcgattgcaaagcatgggcgtatttttcagacgttgacttggagaaagatgtacattcaggacttattggtcctttgttggtgtgtcacactaacactctcaatccagcccatggcaggcaggtgacagtccaggaattcgctcttttctttaccatctttgatgagaccaagtcctggtacttcacggaaaacatggagcgcaattgcagagccccctgtaacatacagatggaggaccctacctttaaggaaaattatcggttccacgcaatcaacggatacattatggatacactccctggccttgtgatggctcaggaccaacgaatcaggtggtacctcctcagcatgggttctaatgagaacatacactccattcacttttcaggacatgtgttcactgtccggaagaaagaagagtataagatggccctctacaatttgtatccaggcgtgtttgagaccgttgaaatgcttccctctaaagctggcatctggagagtagagtgcttgatcggagaacatcttcacgcaggtatgagcaccttgttcctcgtgtacagcaacaaatgtcagaatccacttggcatggccagtggacacattcgcgactttcagatcacagcatctggccagtatggacaatgggccccaaagttggctcgcctccattactccggtagcataaatgcgtggtccactaaagaacctttcagctggattaaggtcgatcttcttgcccccatgatcatccacggcattaagacacagggagcgaggcagaaattctcctccctctacatctcacagttcattattatgtatagtttggacggcaagaagtggcaaacttatagaggtaacagtactggaacagacatggtgttcttcggcaacgttgatagctctggcatcaaacacaacatctttaatcctcccataatagctcggtacatcagattgcatccgacccactacagcattaggagtacactccgaatggagcttatgggttgcgacttgaattcctgttcaatgccactcggaatggagtctaaagccatctctgatgcacagataaccgccagtagctactttacgaacatgtttgctacgtggtcaccctctaaggcaaggcttcatttgcaaggccggtctaatgcctggagacctcaggtgaacaacccgaaagaatggctccaggtggactttcagaagaccatgaaagtaacaggtgtcactactcagggagttaagtccttggatactagcatgtatgtgaaggagttccttatttcctcatcacaagatggccaccagtggaccctcttctttcagaatggtaaggtcaaagtgtttcagggcaatcaagacagcttcacacccgtggtgaacagtcttgatcctccactcttgacacgataccttcgaatccatccacagtcttgggagcaccagattgcattgcgcatggaagtacttggatgcgaggctcaggacctctac

SEQ ID NO: 2206 - protein, 1457 aa, synthetic construct
  REGION 1..1457: note = Variant of human B-domain deleted Factor VIII
MQIELSTCFFLCLLRFCFSATRRYYLGAVELSWDYMQSDLGELPVDARFPPRVPKSFPFNTSQVYKKTLFVEFTDHLFNIAKPRPPWMGLLGPTIQAEVYDTVVITLKNMASHPVSLHAVGVSYWKASEGAEYDDQTSQREKEDDKVFPGGSHTYVWQVLKENGPMASDPPCLTYSYLSHVDLVKDLNSGLIGALLVCREGSLAKEKTQTLAKFILLFAVFDEGKSWHSETKNSLMQDRDAASARAWPKMHTVNGYVNRTLPGLIGCHRKSVYWHVIGMGTTPEVHSIFLEGHTFLVRNHRQASLGISPITFLTAQTGLRDLGQFLLFCHIPSHQHDGMEAYVKVDSCPEEPQLRMKNNEEAEDYDDDLTDSEMDVVRFDDDNSPSIIQARSGAKKHPKTWVHYIAAEEEDWDYAPLVLAPDDRSYKSQYLNNGPQRIGRKYKKVRFMAYTDETFKTREAIQHESGILGPLLYGEVGDTLLIIFKNQASRPYNIYPHGITDVRPLYSRRLPKGVKHLKDFPILPGEIFKYKWTITVEDGPTKSDPRCLTRYYSSFVNWERDLASGLIGPLLICYKESVDQRGNQIMSDKRNVILFSVFDENRSWYLTENIQRFLPNPAGVQLEDPEFQASNIMHSINGYVFDSLQLSVCLHEVAYWYILSIGAQTDFLSVFFSGYTFKHKNVYEDTLTLFPFSGETVFMEMENPGLWILGCHNSDFRNRGMTALLKVSSCDWNTGDYEEDSYEDISAYFDSKNNAIEPRSFSQNPPVLKRHQREGTRTTLQSDQEEIDYDDTISVEMKKEDFDIYDEDENQSPRSFQKKTRHYFIAAVERLWDYGMSSSPHVLRNRAQSGSVPQFKKVVFQEFTDGSFTQPLYRGELNEHLGLLGPYIRAEVEDNIMVTFRNQASRPYSFYSSLISYEEDQRQGAEPRKNFVKPNETKTYFWKVQHHMAPTKDEFDCKAWAYFSDVDLEKDVHSGLIGPLLVCHTNTLNPAHGRQVTVQEFALFFTIFDETKSWYFTENMERNCRAPCNIQMEDPTFKENYRFHAINGYIMDTLPGLVMAQDQRIRWYLLSMGSNENIHSIHFSGHVFTVRKKEEYKMALYNLYPGVFETVEMLPSKAGIWRVECLIGEHLHAGMSTLFLVYSNKCQNPLGMASGHIRDFQITASGQYGQWAPKLARLHYSGSINAWSTKEPFSWIKVDLLAPMIIHGIKTQGARQKFSSLYISQFIIMYSLDGKKWQTYRGNSTGTDMVFFGNVDSSGIKHNIFNPPIIARYIRLHPTHYSIRSTLRMELMGCDLNSCSMPLGMESKAISDAQITASSYFTNMFATWSPSKARLHLQGRSNAWRPQVNNPKEWLQVDFQKTMKVTGVTTQGVKSLDTSMYVKEFLISSSQDGHQWTLFFQNGKVKVFQGNQDSFTPVVNSLDPPLLTRYLRIHPQSWEHQIALRMEVLGCEAQDLY

SEQ ID NO: 2207 - DNA, 4371 bp, synthetic construct
  misc_feature 1..4371: note = Variant of human B-domain deleted Factor VIII
  source 1..4371: mol_type = other DNA
atgcagattgaactgtctacctgcttcttcctctgtttgctgaggttctgctttagcgccactagacggtactaccttggcgctgtggagctgtcctgggactatatgcagagtgatttgggagagcttcccgtcgacgcacgatttcctcctcgcgttccaaagtcatttccctttaacacaagccaggtgtacaagaagacgctcttcgtcgaattcaccgatcacctgttcaatatcgccaaacccagaccaccatggatgggtcttttggggcctaccatacaagcggaggtgtatgacacagttgttatcactctcaagaacatggcttctcatccggtaagtcttcacgcagtgggcgtgtcctactggaaagcttcagaaggagccgagtatgatgatcagacatcccagagggagaaagaagacgacaaggtatttccaggtgggtctcatacctatgtgtggcaagtgctcaaagagaatggccctatggcaagcgatccgccgtgtttgacttacagctacctttcacacgttgacctcgtcaaggacctcaactccgggttgattggagccttgttggtatgcagggaaggatctcttgccaaagagaagacacagaccctggccaagtttatccttctctttgctgtgttcgatgagggcaaaagttggcatagcgaaacgaagaattccctcatgcaggatcgcgacgcagccagcgccagagcttggcccaagatgcacactgtgaacggatatgtcaataggacgcttcctggcttgattgggtgtcatcggaaaagtgtctactggcacgtgatcggaatggggacaacaccagaggtccactccatatttctcgaaggccataccttccttgttcgaaaccacagacaggcatccttggggatctctcccattacctttctcactgcccaaacgggtcttcgtgacttgggtcagttccttctcttttgccatatcccgtcacaccagcatgatggtatggaagcttatgtgaaagtcgacagttgtcctgaggagccacagttgcgcatgaagaataatgaagaagccgaggattacgacgacgatctcaccgattctgagatggacgtggtgaggtttgatgacgacaactctccctccatcattcaagctcggagcggggcgaagaaacaccccaagacttgggtccactatatagcggcggaagaggaggattgggattacgctcctcttgtattggcaccagatgaccgctcatacaaaagccagtacctcaacaacggaccgcagagaattggccggaagtataagaaagtgcgatttatggcctatacagacgaaacctttaagacaagggaggccatccagcatgagagtgggattttgggacctcttctttacggcgaagttggtgataccctcctcatcatcttcaagaatcaagcttctcgcccctataacatttacccacacgggatcactgacgttaggcctttgtatagcagaagacttcccaaaggcgtgaagcatctcaaagacttccccattttgccaggcgagatctttaagtacaaatggaccattacagtggaagatggaccgactaaatcggaccctcgatgccttacgcggtactattcctccttcgtgaattgggagagagatttggcaagcggactcataggaccactcctcatctgttacaaggaatctgtagaccagaggggtaaccagattatgagtgataaacgcaatgtgatcctttttagcgtcttcgacgagaaccggtcctggtacttgaccgagaatatacaaaggttccttcccaaccccgcaggcgttcagttggaagaccctgagtttcaggccagcaatattatgcactcaatcaacggctatgtgtttgatagtctccagctttctgtttgcctccatgaagtagcctattggtacatcttgtcaattggtgctcaaacagacttcctctccgtcttcttctccggctacacctttaagcacaagaacgtgtatgaggacactctcacactctttccattttctggagaaaccgtgttcatggagatggagaatccaggcctttggatcttgggttgccacaacagtgattttcgcaatcggggaatgactgctctcctcaaagtcagcagctgtgattggaacacaggcgactattacggggattcttacgaggacataagtgcctactttgactccaaaaataacgccattgagcccagatcattctcccagaatcctcccgtgcttaaaaggcatcagcgcgaaggtaccagaactactcttcagtctgatcaagaggagattgactatgacgacaccattagcgtggaaatgaagaaggaggatttcgatatctatgacgaagatgagaaccagtctccgcggagctttcagaagaagacgcgacactacttcattgcagcagtcgaaaggctttgggactacggtatgtcatcatcccctcatgtgttgcgcaatagagctcagagtggaagtgttccacagttcaagaaagtcgtctttcaagagtttacagatggcagcttcacacagcctctctatcggggcgagcttaacgaacatttgggactccttggtccctatatccgagccgaagtggaggacaacattatggttacctttaggaatcaagcctctcgcccctacagcttctactcctccctcatcagttatgaggaggatcagagacaaggcgctgaaccacggaagaactttgtgaaaccgaatgagacgaagacctacttctggaaagtacagcaccacatggcccccacaaaagacgaattcgattgcaaagcatgggcgtatttttcagacgttgacttggagaaagatgtacattcaggacttattggtcctttgttggtgtgtcacactaacactctcaatccagcccatggcaggcaggtgacagtccaggaattcgctcttttctttaccatctttgatgagaccaagtcctggtacttcacggaaaacatggagcgcaattgcagagccccctgtaacatacagatggaggaccctacctttaaggaaaattatcggttccacgcaatcaacggatacattatggatacactccctggccttgtgatggctcaggaccaacgaatcaggtggtacctcctcagcatgggttctaatgagaacatacactccattcacttttcaggacatgtgttcactgtccggaagggtgaagagtataagatggccctctacaatttgtatccaggcgtgtttgagaccgttgaaatgcttcccatcaaagctggcatctggagagtagagtgcttgatcggagaacatcttcacgcaggtatgagcaccttgttcctcgtgtacagcaacaaatgtcagaatccacttggcatggccagtggacacattcgcgactttcagatcacagcatctggccagtatggacaatgggccccaaagttggctcgcctccattactccggtagcataaatgcgtggtccactaaagaacctttcagctggattaaggtcgatcttcttgcccccatgatcatccacggcattaagacacagggagcgaggcagaaattctcctccctctacatctcacagttcattattatgtatagtttggacggcaagaagtggcaaacttatagaggtaacagtactggaacagacatggtgttcttcggcaacgttgatagctctggcatcaaacacaacatctttaatcctcccataatagctcggtacatcagattgcatccgacccactacagcattaggagtacactccgaatggagcttatgggttgcgacttgaattcctgttcaatgccactcggaatggagtctaaagccatctctgatgcacagataaccgccagtagctactttacgaacatgtttgctacgtggtcaccctctaaggcaaggcttcatttgcaaggccggtctaatgcctggagacctcaggtgaacaacccgaaagaatggctccaggtggactttcagaagaccatgaaagtaacaggtgtcactactcagggagttaagtccttggatactagcatgtatgtgaaggagttccttatttcctcatcacaagatggccaccagtggaccctcttctttcagaatggtaaggtcaaagtgtttcagggcaatcaagacagcttcacacccgtggtgaacagtcttgatcctccactcttgacacgataccttcgaatccatccacagtcttgggagcaccagattgcattgcgcatggaagtacttggatgcgaggctcaggacctctac

SEQ ID NO: 2208 - protein, 1457 aa, synthetic construct
  REGION 1..1457: note = Variant of human B-domain deleted Factor VIII
MQIELSTCFFLCLLRFCFSATRRYYLGAVELSWDYMQSDLGELPVDARFPPRVPKSFPFNTSQVYKKTLFVEFTDHLFNIAKPRPPWMGLLGPTIQAEVYDTVVITLKNMASHPVSLHAVGVSYWKASEGAEYDDQTSQREKEDDKVFPGGSHTYVWQVLKENGPMASDPPCLTYSYLSHVDLVKDLNSGLIGALLVCREGSLAKEKTQTLAKFILLFAVFDEGKSWHSETKNSLMQDRDAASARAWPKMHTVNGYVNRTLPGLIGCHRKSVYWHVIGMGTTPEVHSIFLEGHTFLVRNHRQASLGISPITFLTAQTGLRDLGQFLLFCHIPSHQHDGMEAYVKVDSCPEEPQLRMKNNEEAEDYDDDLTDSEMDVVRFDDDNSPSIIQARSGAKKHPKTWVHYIAAEEEDWDYAPLVLAPDDRSYKSQYLNNGPQRIGRKYKKVRFMAYTDETFKTREAIQHESGILGPLLYGEVGDTLLIIFKNQASRPYNIYPHGITDVRPLYSRRLPKGVKHLKDFPILPGEIFKYKWTITVEDGPTKSDPRCLTRYYSSFVNWERDLASGLIGPLLICYKESVDQRGNQIMSDKRNVILFSVFDENRSWYLTENIQRFLPNPAGVQLEDPEFQASNIMHSINGYVFDSLQLSVCLHEVAYWYILSIGAQTDFLSVFFSGYTFKHKNVYEDTLTLFPFSGETVFMEMENPGLWILGCHNSDFRNRGMTALLKVSSCDWNTGDYYGDSYEDISAYFDSKNNAIEPRSFSQNPPVLKRHQREGTRTTLQSDQEEIDYDDTISVEMKKEDFDIYDEDENQSPRSFQKKTRHYFIAAVERLWDYGMSSSPHVLRNRAQSGSVPQFKKVVFQEFTDGSFTQPLYRGELNEHLGLLGPYIRAEVEDNIMVTFRNQASRPYSFYSSLISYEEDQRQGAEPRKNFVKPNETKTYFWKVQHHMAPTKDEFDCKAWAYFSDVDLEKDVHSGLIGPLLVCHTNTLNPAHGRQVTVQEFALFFTIFDETKSWYFTENMERNCRAPCNIQMEDPTFKENYRFHAINGYIMDTLPGLVMAQDQRIRWYLLSMGSNENIHSIHFSGHVFTVRKGEEYKMALYNLYPGVFETVEMLPIKAGIWRVECLIGEHLHAGMSTLFLVYSNKCQNPLGMASGHIRDFQITASGQYGQWAPKLARLHYSGSINAWSTKEPFSWIKVDLLAPMIIHGIKTQGARQKFSSLYISQFIIMYSLDGKKWQTYRGNSTGTDMVFFGNVDSSGIKHNIFNPPIIARYIRLHPTHYSIRSTLRMELMGCDLNSCSMPLGMESKAISDAQITASSYFTNMFATWSPSKARLHLQGRSNAWRPQVNNPKEWLQVDFQKTMKVTGVTTQGVKSLDTSMYVKEFLISSSQDGHQWTLFFQNGKVKVFQGNQDSFTPVVNSLDPPLLTRYLRIHPQSWEHQIALRMEVLGCEAQDLY

SEQ ID NO: 2209 - DNA, 4371 bp, synthetic construct
  misc_feature 1..4371: note = Variant of human B-domain deleted Factor VIII
  source 1..4371: mol_type = other DNA
atgcagattgaactgtctacctgcttcttcctctgtttgctgaggttctgctttagcgccactagacggtactaccttggcgctgtggagctgtcctgggactatatgcagagtgatttgggagagcttcccgtcgacgcacgatttcctcctcgcgttccaaagtcatttccctttaacacaagccaggtgtacaagaagacgctcttcgtcgaattcaccgatcacctgttcaatatcgccaaacccagaccaccatggatgggtcttttggggcctaccatacaagcggaggtgtatgacacagttgttatcactctcaagaacatggcttctcatccggtaagtcttcacgcagtgggcgtgtcctactggaaagcttcagaaggagccgagtatgatgatcagacatcccagagggagaaagaagacgacaaggtatttccaggtgggtctcatacctatgtgtggcaagtgctcaaagagaatggccctatggcaagcgatccgccgtgtttgacttacagctacctttcacacgttgacctcgtcaaggacctcaactccgggttgattggagccttgttggtatgcagggaaggatctcttgccaaagagaagacacagaccctggccaagtttatccttctctttgctgtgttcgatgagggcaaaagttggcatagcgaaacgaagaattccctcatgcaggatcgcgacgcagccagcgccagagcttggcccaagatgcacactgtgaacggatatgtcaataggacgcttcctggcttgattgggtgtcatcggaaaagtgtctactggcacgtgatcggaatggggacaacaccagaggtccactccatatttctcgaaggccataccttccttgttcgaaaccacagacaggcatccttggggatctctcccattacctttctcactgcccaaacgggtcttcgtgacttgggtcagttccttctcttttgccatatcccgtcacaccagcatgatggtatggaagcttatgtgaaagtcgacagttgtcctgaggagccacagttgcgcatgaagaataatgaagaagccgaggattacgacgacgatctcaccgattctgagatggacgtggtgaggtttgatgacgacaactctccctccatcattcaagctcggagcggggcgaagaaacaccccaagacttgggtccactatatagcggcggaagaggaggattgggattacgctcctcttgtattggcaccagatgaccgctcatacaaaagccagtacctcaacaacggaccgcagagaattggccggaagtataagaaagtgcgatttatggcctatacagacgaaacctttaagacaagggaggccatccagcatgagagtgggattttgggacctcttctttacggcgaagttggtgataccctcctcatcatcttcaagaatcaagcttctcgcccctataacatttacccacacgggatcactgacgttaggcctttgtatagcagaagacttcccaaaggcgtgaagcatctcaaagacttccccattttgccaggcgagatctttaagtacaaatggaccattacagtggaagatggaccgactaaatcggaccctcgatgccttacgcggtactattcctccttcgtgaattgggagagagatttggcaagcggactcataggaccactcctcatctgttacaaggaatctgtagaccagaggggtaaccagattatgagtgataaacgcaatgtgatcctttttagcgtcttcgacgagaaccggtcctggtacttgaccgagaatatacaaaggttccttcccaaccccgcaggcgttcagttggaagaccctgagtttcaggccagcaatattatgcactcaatcaacggctatgtgtttgatagtctccagctttctgtttgcctccatgaagtagcctattggtacatcttgtcaattggtgctcaaacagacttcctctccgtcttcttctccggctacacctttaagcacaagaacgtgtatgaggacactctcacactctttccattttctggagaaaccgtgttcatggagatggagaatccaggcctttggatcttgggttgccacaacagtgattttcgcaatcggggaatgactgctctcctcaaagtcagcagctgtgattggaacacaggcgactatgaggaagattcttacgaggacataagtgcctactttgactccaaaaataacgccattgagcccagatcattctcccagaatcctcccgtgcttaaaaggcatcagcgcgaaggtaccagaactactcttcagtctgatcaagaggagattgactatgacgacaccattagcgtggaaatgaagaaggaggatttcgatatctatgacgaagatgggaaccagtctccgcggagctttcagaagaagacgcgacactacttcattgcagcagtcgaaaggctttgggactacggtatgtcatcatcccctcatgtgttgcgcaatagagctcagagtggaagtgttccacagttcaagaaagtcgtctttcaagagtttacagatggcagcttcacacagcctctctatcggggcgagcttaacgaacatttgggactccttggtccctatatccgagccgaagtggaggacaacattatggttacctttaggaatcaagcctctcgcccctacagcttctactcctccctcatcagttatgaggaggatcagagacaaggcgctgaaccacggaagaactttgtgaaaccgaatgagacgaagacctacttctggaaagtacagcaccacatggcccccacaaaagacgaattcgattgcaaagcatgggcgtatttttcagacgttgacttggagaaagatgtacattcaggacttattggtcctttgttggtgtgtcacactaacactctcaatccagcccatggcaggcaggtgacagtccaggaattcgctcttttctttaccatctttgatgagaccaagtcctggtacttcacggaaaacatggagcgcaattgcagagccccctgtaacatacagatggaggaccctacctttaaggaaaattatcggttccacgcaatcaacggatacattatggatacactccctggccttgtgatggctcaggaccaacgaatcaggtggtacctcctcagcatgggttctaatgagaacatacactccattcacttttcaggacatgtgttcactgtccggaagaaagaagagtataagatggccctctacaatttgtatccaggcgtgtttgagaccgttgaaatgcttccctctaaagctggcatctggagagtagagtgcttgatcggagaacatcttcacgcaggtatgagcaccttgttcctcgtgtacagcaacaaatgtcagaatccacttggcatggccagtggacacattcgcgactttcagatcacagcatctggccagtatggacaatgggccccaaagttggctcgcctccattactccggtagcataaatgcgtggtccactaaagaacctttcagctggattaaggtcgatcttcttgcccccatgatcatccacggcattaagacacagggagcgaggcagaaattctcctccctctacatctcacagttcattattatgtatagtttggacggcaagaagtggcaaacttatagaggtaacagtactggaacagacatggtgttcttcggcaacgttgatagctctggcatcaaacacaacatctttaatcctcccataatagctcggtacatcagattgcatccgacccactacagcattaggagtacactccgaatggagcttatgggttgcgacttgaattcctgttcaatgccactcggaatggagtctaaagccatctctgatgcacagataaccgccagtagctactttacgaacatgtttgctacgtggtcaccctctaaggcaaggcttcatttgcaaggccggtctaatgcctggagacctcaggtgaacaacccgaaagaatggctccaggtggactttcagaagaccatgaaagtaacaggtgtcactactcagggagttaagtccttggatactagcatgtatgtgaaggagttccttatttcctcatcacaagatggccaccagtggaccctcttctttcagaatggtaaggtcaaagtgtttcagggcaatcaagacagcttcacacccgtggtgaacagtcttgatcctccactcttgacacgataccttcgaatccatccacagtcttgggagcaccagattgcattgcgcatggaagtacttggatgcgaggctcaggacctctac

SEQ ID NO: 2210 - protein, 1457 aa, synthetic construct
  REGION 1..1457: note = Variant of human B-domain deleted Factor VIII
MQIELSTCFFLCLLRFCFSATRRYYLGAVELSWDYMQSDLGELPVDARFPPRVPKSFPFNTSQVYKKTLFVEFTDHLFNIAKPRPPWMGLLGPTIQAEVYDTVVITLKNMASHPVSLHAVGVSYWKASEGAEYDDQTSQREKEDDKVFPGGSHTYVWQVLKENGPMASDPPCLTYSYLSHVDLVKDLNSGLIGALLVCREGSLAKEKTQTLAKFILLFAVFDEGKSWHSETKNSLMQDRDAASARAWPKMHTVNGYVNRTLPGLIGCHRKSVYWHVIGMGTTPEVHSIFLEGHTFLVRNHRQASLGISPITFLTAQTGLRDLGQFLLFCHIPSHQHDGMEAYVKVDSCPEEPQLRMKNNEEAEDYDDDLTDSEMDVVRFDDDNSPSIIQARSGAKKHPKTWVHYIAAEEEDWDYAPLVLAPDDRSYKSQYLNNGPQRIGRKYKKVRFMAYTDETFKTREAIQHESGILGPLLYGEVGDTLLIIFKNQASRPYNIYPHGITDVRPLYSRRLPKGVKHLKDFPILPGEIFKYKWTITVEDGPTKSDPRCLTRYYSSFVNWERDLASGLIGPLLICYKESVDQRGNQIMSDKRNVILFSVFDENRSWYLTENIQRFLPNPAGVQLEDPEFQASNIMHSINGYVFDSLQLSVCLHEVAYWYILSIGAQTDFLSVFFSGYTFKHKNVYEDTLTLFPFSGETVFMEMENPGLWILGCHNSDFRNRGMTALLKVSSCDWNTGDYEEDSYEDISAYFDSKNNAIEPRSFSQNPPVLKRHQREGTRTTLQSDQEEIDYDDTISVEMKKEDFDIYDEDGNQSPRSFQKKTRHYFIAAVERLWDYGMSSSPHVLRNRAQSGSVPQFKKVVFQEFTDGSFTQPLYRGELNEHLGLLGPYIRAEVEDNIMVTFRNQASRPYSFYSSLISYEEDQRQGAEPRKNFVKPNETKTYFWKVQHHMAPTKDEFDCKAWAYFSDVDLEKDVHSGLIGPLLVCHTNTLNPAHGRQVTVQEFALFFTIFDETKSWYFTENMERNCRAPCNIQMEDPTFKENYRFHAINGYIMDTLPGLVMAQDQRIRWYLLSMGSNENIHSIHFSGHVFTVRKKEEYKMALYNLYPGVFETVEMLPSKAGIWRVECLIGEHLHAGMSTLFLVYSNKCQNPLGMASGHIRDFQITASGQYGQWAPKLARLHYSGSINAWSTKEPFSWIKVDLLAPMIIHGIKTQGARQKFSSLYISQFIIMYSLDGKKWQTYRGNSTGTDMVFFGNVDSSGIKHNIFNPPIIARYIRLHPTHYSIRSTLRMELMGCDLNSCSMPLGMESKAISDAQITASSYFTNMFATWSPSKARLHLQGRSNAWRPQVNNPKEWLQVDFQKTMKVTGVTTQGVKSLDTSMYVKEFLISSSQDGHQWTLFFQNGKVKVFQGNQDSFTPVVNSLDPPLLTRYLRIHPQSWEHQIALRMEVLGCEAQDLY

SEQ ID NO: 2211 - DNA, 4371 bp, synthetic construct
  misc_feature 1..4371: note = Variant of human B-domain deleted Factor VIII
  source 1..4371: mol_type = other DNA
atgcagattgaactgtctacctgcttcttcctctgtttgctgaggttctgctttagcgccactagacggtactaccttggcgctgtggagctgtcctgggactatatgcagagtgatttgggagagcttcccgtcgacgcacgatttcctcctcgcgttccaaagtcatttccctttaacacaagccaggtgtacaagaagacgctcttcgtcgaattcaccgatcacctgttcaatatcgccaaacccagaccaccatggatgggtcttttggggcctaccatacaagcggaggtgtatgacacagttgttatcactctcaagaacatggcttctcatccggtaagtcttcacgcagtgggcgtgtcctactggaaagcttcagaaggagccgagtatgatgatcagacatcccagagggagaaagaagacgacaaggtatttccaggtgggtctcatacctatgtgtggcaagtgctcaaagagaatggccctatggcaagcgatccgccgtgtttgacttacagctacctttcacacgttgacctcgtcaaggacctcaactccgggttgattggagccttgttggtatgcagggaaggatctcttgccaaagagaagacacagaccctggccaagtttatccttctctttgctgtgttcgatgagggcaaaagttggcatagcgaaacgaagaattccctcatgcaggatcgcgacgcagccagcgccagagcttggcccaagatgcacactgtgaacggatatgtcaataggacgcttcctggcttgattgggtgtcatcggaaaagtgtctactggcacgtgatcggaatggggacaacaccagaggtccactccatatttctcgaaggccataccttccttgttcgaaaccacagacaggcatccttggggatctctcccattacctttctcactgcccaaacgggtcttcgtgacttgggtcagttccttctcttttgccatatcccgtcacaccagcatgatggtatggaagcttatgtgaaagtcgacagttgtcctgaggagccacagttgcgcatgaagaataatgaagaagccgaggattacgacgacgatctcaccgattctgagatggacgtggtgaggtttgatgacgacaactctccctccatcattcaagctcggagcggggcgaagaaacaccccaagacttgggtccactatatagcggcggaagaggaggattgggattacgctcctcttgtattggcaccagatgaccgctcatacaaaagccagtacctcaacaacggaccgcagagaattggccggaagtataagaaagtgcgatttatggcctatacagacgaaacctttaagacaagggaggccatccagcatgagagtgggattttgggacctcttctttacggcgaagttggtgataccctcctcatcatcttcaagaatcaagcttctcgcccctataacatttacccacacgggatcactgacgttaggcctttgtatagcagaagacttcccaaaggcgtgaagcatctcaaagacttccccattttgccaggcgagatctttaagtacaaatggaccattacagtggaagatggaccgactaaatcggaccctcgatgccttacgcggtactattcctccttcgtgaattgggagagagatttggcaagcggactcataggaccactcctcatctgttacaaggaatctgtagaccagaggggtaaccagattatgagtgataaacgcaatgtgatcctttttagcgtcttcgacgagaaccggtcctggtacttgaccgagaatatacaaaggttccttcccaaccccgcaggcgttcagttggaagaccctgagtttcaggccagcaatattatgcactcaatcaacggctatgtgtttgatagtctccagctttctgtttgcctccatgaagtagcctattggtacatcttgtcaattggtgctcaaacagacttcctctccgtcttcttctccggctacacctttaagcacaagaacgtgtatgaggacactctcacactctttccattttctggagaaaccgtgttcatggagatggagaatccaggcctttggatcttgggttgccacaacagtgattttcgcaatcggggaatgactgctctcctcaaagtcagcagctgtgattggaacacaggcgactatgaggaagattcttacgaggacataagtgcctactttgactccaagaataacgccattgagcccagatcattctcccagaatcctcccgtgcttaaaaggcatcagcgcgaaggtaccagaactactcttcagtctgatcaagaggagattgactatgacgacaccattagcgtggaaatgaagaaggaggatttcgatatctatgacgaagatgagaaccagtctccgcggagctttcagaagaagacgcgacactacttcattgcagcagtcgaaaggctttgggactacggtatgtcatcatcccctcatgtgttgcgcaatagagctcagagtggaagtgttccacagttcaagaaagtcgtctttcaagagtttacagatggcagcttcacacagcctctctatcggggcgagcttaacgaacatttgggactccttggtccctatatccgagccgaagtggaggacaacattatggttacctttaggaatcaagcctctcgcccctacagcttctactcctccctcatcagttatgaggaggatcagagacaaggcgctgaaccacggaagaactttgtgaaaccgaatgagacgaagacctacttctggaaagtacagcaccacatggcccccacaaaagacgaattcgattgcaaagcatgggcgtatttttcagacgttgacttggagaaagatgtacattcaggacttattggtcctttgttggtgtgtcacactaacactctcaatccagcccatggcaggcaggtgacagtccaggaattcgctcttttctttaccatctttgatgagaccaagtcctggtacttcacggaaaacatggagcgcaattgcagagccccctgtaacatacagatggaggaccctacctttaaggaaaattatcggttccacgcaatcaacggatacattatggatacactccctggccttgtgatggctcaggaccaacgaatcaggtggtacctcctcagcatgggttctaatgagaacatacactccattcacttttcaggacatgtgttcactgtccggaagggtgaagagtataagatggccctctacaatttgtatccaggcgtgtttgagaccgttgaaatgcttccctctaaagctggcatctggagagtagagtgcttgatcggagaacatcttcacgcaggtatgagcaccttgttcctcgtgtacagcaacaaatgtcagaatccacttggcatggccagtggacacattcgcgactttcagatcacagcatctggccagtatggacaatgggccccaaagttggctcgcctccattactccggtagcataaatgcgtggtccactaaagaacctttcagctggattaaggtcgatcttcttgcccccatgatcatccacggcattaagacacagggagcgaggcagaaattctcctccctctacatctcacagttcattattatgtatagtttggacggcaagaagtggcaaacttatagaggtaacagtactggaacagacatggtgttcttcggcaacgttgatagctctggcatcaaacacaacatctttaatcctcccataatagctcggtacatcagattgcatccgacccactacagcattaggagtacactccgaatggagcttatgggttgcgacttgaattcctgttcaatgccactcggaatggagtctaaagccatctctgatgcacagataaccgccagtagctactttacgaacatgtttgctacgtggtcaccctctaaggcaaggcttcatttgcaaggccggtctaatgcctggagacctcaggtgaacaacccgaaagaatggctccaggtggactttcagaagaccatgaaagtaacaggtgtcactactcagggagttaagtccttggatactagcatgtatgtgaaggagttccttatttcctcatcacaagatggccaccagtggaccctcttctttcagaatggtaaggtcaaagtgtttcagggcaatcaagacagcttcacacccgtggtgaacagtcttgatcctccactcttgacacgataccttcgaatccatccacagtcttgggagcaccagattgcattgcgcatggaagtacttggatgcgaggctcaggacctctac

SEQ ID NO: 2212 - protein, 1457 aa, synthetic construct
  REGION 1..1457: note = Variant of human B-domain deleted Factor VIII
MQIELSTCFFLCLLRFCFSATRRYYLGAVELSWDYMQSDLGELPVDARFPPRVPKSFPFNTSQVYKKTLFVEFTDHLFNIAKPRPPWMGLLGPTIQAEVYDTVVITLKNMASHPVSLHAVGVSYWKASEGAEYDDQTSQREKEDDKVFPGGSHTYVWQVLKENGPMASDPPCLTYSYLSHVDLVKDLNSGLIGALLVCREGSLAKEKTQTLAKFILLFAVFDEGKSWHSETKNSLMQDRDAASARAWPKMHTVNGYVNRTLPGLIGCHRKSVYWHVIGMGTTPEVHSIFLEGHTFLVRNHRQASLGISPITFLTAQTGLRDLGQFLLFCHIPSHQHDGMEAYVKVDSCPEEPQLRMKNNEEAEDYDDDLTDSEMDVVRFDDDNSPSIIQARSGAKKHPKTWVHYIAAEEEDWDYAPLVLAPDDRSYKSQYLNNGPQRIGRKYKKVRFMAYTDETFKTREAIQHESGILGPLLYGEVGDTLLIIFKNQASRPYNIYPHGITDVRPLYSRRLPKGVKHLKDFPILPGEIFKYKWTITVEDGPTKSDPRCLTRYYSSFVNWERDLASGLIGPLLICYKESVDQRGNQIMSDKRNVILFSVFDENRSWYLTENIQRFLPNPAGVQLEDPEFQASNIMHSINGYVFDSLQLSVCLHEVAYWYILSIGAQTDFLSVFFSGYTFKHKNVYEDTLTLFPFSGETVFMEMENPGLWILGCHNSDFRNRGMTALLKVSSCDWNTGDYEEDSYEDISAYFDSKNNAIEPRSFSQNPPVLKRHQREGTRTTLQSDQEEIDYDDTISVEMKKEDFDIYDEDENQSPRSFQKKTRHYFIAAVERLWDYGMSSSPHVLRNRAQSGSVPQFKKVVFQEFTDGSFTQPLYRGELNEHLGLLGPYIRAEVEDNIMVTFRNQASRPYSFYSSLISYEEDQRQGAEPRKNFVKPNETKTYFWKVQHHMAPTKDEFDCKAWAYFSDVDLEKDVHSGLIGPLLVCHTNTLNPAHGRQVTVQEFALFFTIFDETKSWYFTENMERNCRAPCNIQMEDPTFKENYRFHAINGYIMDTLPGLVMAQDQRIRWYLLSMGSNENIHSIHFSGHVFTVRKGEEYKMALYNLYPGVFETVEMLPSKAGIWRVECLIGEHLHAGMSTLFLVYSNKCQNPLGMASGHIRDFQITASGQYGQWAPKLARLHYSGSINAWSTKEPFSWIKVDLLAPMIIHGIKTQGARQKFSSLYISQFIIMYSLDGKKWQTYRGNSTGTDMVFFGNVDSSGIKHNIFNPPIIARYIRLHPTHYSIRSTLRMELMGCDLNSCSMPLGMESKAISDAQITASSYFTNMFATWSPSKARLHLQGRSNAWRPQVNNPKEWLQVDFQKTMKVTGVTTQGVKSLDTSMYVKEFLISSSQDGHQWTLFFQNGKVKVFQGNQDSFTPVVNSLDPPLLTRYLRIHPQSWEHQIALRMEVLGCEAQDLY

SEQ ID NO: 2213 - DNA, 4371 bp, synthetic construct
  misc_feature 1..4371: note = Variant of human B-domain deleted Factor VIII
  source 1..4371: mol_type = other DNA
atgcagattgaactgtctacctgcttcttcctctgtttgctgaggttctgctttagcgccactagacggtactaccttggcgctgtggagctgtcctgggactatatgcagagtgatttgggagagcttcccgtcgacgcacgatttcctcctcgcgttccaaagtcatttccctttaacacaagccaggtgtacaagaagacgctcttcgtcgaattcaccgatcacctgttcaatatcgccaaacccagaccaccatggatgggtcttttggggcctaccatacaagcggaggtgtatgacacagttgttatcactctcaagaacatggcttctcatccggtaagtcttcacgcagtgggcgtgtcctactggaaagcttcagaaggagccgagtatgatgatcagacatcccagagggagaaagaagacgacaaggtatttccaggtgggtctcatacctatgtgtggcaagtgctcaaagagaatggccctatggcaagcgatccgccgtgtttgacttacagctacctttcacacgttgacctcgtcaaggacctcaactccgggttgattggagccttgttggtatgcagggaaggatctcttgccaaagagaagacacagaccctggccaagtttatccttctctttgctgtgttcgatgagggcaaaagttggcatagcgaaacgaagaattccctcatgcaggatcgcgacgcagccagcgccagagcttggcccaagatgcacactgtgaacggatatgtcaataggacgcttcctggcttgattgggtgtcatcggaaaagtgtctactggcacgtgatcggaatggggacaacaccagaggtccactccatatttctcgaaggccataccttccttgttcgaaaccacagacaggcatccttggggatctctcccattacctttctcactgcccaaacgggtcttcgtgacttgggtcagttccttctcttttgccatatcccgtcacaccagcatgatggtatggaagcttatgtgaaagtcgacagttgtcctgaggagccacagttgcgcatgaagaataatgaagaagccgaggattacgacgacgatctcaccgattctgagatggacgtggtgaggtttgatgacgacaactctccctccatcattcaagctcggagcggggcgaagaaacaccccaagacttgggtccactatatagcggcggaagaggaggattgggattacgctcctcttgtattggcaccagatgaccgctcatacaaaagccagtacctcaacaacggaccgcagagaattggccggaagtataagaaagtgcgatttatggcctatacagacgaaacctttaagacaagggaggccatccagcatgagagtgggattttgggacctcttctttacggcgaagttggtgataccctcctcatcatcttcaagaatcaagcttctcgcccctataacatttacccacacgggatcactgacgttaggcctttgtatagcagaagacttcccaaaggcgtgaagcatctcaaagacttccccattttgccaggcgagatctttaagtacaaatggaccattacagtggaagatggaccgactaaatcggaccctcgatgccttacgcggtactattcctccttcgtgaattgggagagagatttggcaagcggactcataggaccactcctcatctgttacaaggaatctgtagaccagaggggtaaccagattatgagtgataaacgcaatgtgatcctttttagcgtcttcgacgagaaccggtcctggtacttgaccgagaatatacaaaggttccttcccaaccccgcaggcgttcagttggaagaccctgagtttcaggccagcaatattatgcactcaatcaacggctatgtgtttgatagtctccagctttctgtttgcctccatgaagtagcctattggtacatcttgtcaattggtgctcaaacagacttcctctccgtcttcttctccggctacacctttaagcacaagaacgtgtatgaggacactctcacactctttccattttctggagaaaccgtgttcatggagatggagaatccaggcctttggatcttgggttgccacaacagtgattttcgcaatcggggaatgactgctctcctcaaagtcagcagctgtgattggaacacaggcgactatgaggaagattcttacgaggacataagtgcctactttgactccgaaaataacgccattgagcccagatcattctcccagaatcctcccgtgcttaaaaggcatcagcgcgaaggtaccagaactactcttcagtctgatcaagaggagattgactatgacgacaccattagcgtggaaatgaagaaggaggatttcgatatctatgacgagagtgggaaccagtctccgcggagctttcagaagaagacgcgacactacttcattgcagcagtcgaaaggctttgggactacggtatgtcatcatcccctcatgtgttgcgcaatagagctcagagtggaagtgttccacagttcaagaaagtcgtctttcaagagtttacagatggcagcttcacacagcctctctatcggggcgagcttaacgaacatttgggactccttggtccctatatccgagccgaagtggaggacaacattatggttacctttaggaatcaagcctctcgcccctacagcttctactcctccctcatcagttatgaggaggatcagagacaaggcgctgaaccacggaagaactttgtgaaaccgaatgagacgaagacctacttctggaaagtacagcaccacatggcccccacaaaagacgaattcgattgcaaagcatgggcgtatttttcagacgttgacttggagaaagatgtacattcaggacttattggtcctttgttggtgtgtcacactaacactctcaatccagcccatggcaggcaggtgacagtccaggaattcgctcttttctttaccatctttgatgagaccaagtcctggtacttcacggaaaacatggagcgcaattgcagagccccctgtaacatacagatggaggaccctacctttaaggaaaattatcggttccacgcaatcaacggatacattatggatacactccctggccttgtgatggctcaggaccaacgaatcaggtggtacctcctcagcatgggttctaatgagaacatacactccattcacttttcaggacatgtgttcactgtccggaagggtgaagagtataagatggccctctacaatttgtatccaggcgtgtttgagaccgttgaaatgcttcccatcaaagctggcatctggagagtagagtgcttgatcggagaacatcttcacgcaggtatgagcaccttgttcctcgtgtacagcaacaaatgtcagaatccacttggcatggccagtggacacattcgcgactttcagatcacagcatctggccagtatggacaatgggccccaaagttggctcgcctccattactccggtagcataaatgcgtggtccactaaagaacctttcagctggattaaggtcgatcttcttgcccccatgatcatccacggcattaagacacagggagcgaggcagaaattctcctccctctacatctcacagttcattattatgtatagtttggacggcaagaagtggcaaacttatagaggtaacagtactggaacagacatggtgttcttcggcaacgttgatagctctggcatcaaacacaacatctttaatcctcccataatagctcggtacatcagattgcatccgacccactacagcattaggagtacactccgaatggagcttatgggttgcgacttgaattcctgttcaatgccactcggaatggagtctaaagccatctctgatgcacagataaccgccagtagctactttacgaacatgtttgctacgtggtcaccctctaaggcaaggcttcatttgcaaggccggtctaatgcctggagacctcaggtgaacaacccgaaagaatggctccaggtggactttcagaagaccatgaaagtaacaggtgtcactactcagggagttaagtccttggatactagcatgtatgtgaaggagttccttatttcctcatcacaagatggccaccagtggaccctcttctttcagaatggtaaggtcaaagtgtttcagggcaatcaagacagcttcacacccgtggtgaacagtcttgatcctccactcttgacacgataccttcgaatccatccacagtcttgggagcaccagattgcattgcgcatggaagtacttggatgcgaggctcaggacctctac

SEQ ID NO: 2214 - protein, 1457 aa, synthetic construct
  REGION 1..1457: note = Variant of human B-domain deleted Factor VIII
MQIELSTCFFLCLLRFCFSATRRYYLGAVELSWDYMQSDLGELPVDARFPPRVPKSFPFNTSQVYKKTLFVEFTDHLFNIAKPRPPWMGLLGPTIQAEVYDTVVITLKNMASHPVSLHAVGVSYWKASEGAEYDDQTSQREKEDDKVFPGGSHTYVWQVLKENGPMASDPPCLTYSYLSHVDLVKDLNSGLIGALLVCREGSLAKEKTQTLAKFILLFAVFDEGKSWHSETKNSLMQDRDAASARAWPKMHTVNGYVNRTLPGLIGCHRKSVYWHVIGMGTTPEVHSIFLEGHTFLVRNHRQASLGISPITFLTAQTGLRDLGQFLLFCHIPSHQHDGMEAYVKVDSCPEEPQLRMKNNEEAEDYDDDLTDSEMDVVRFDDDNSPSIIQARSGAKKHPKTWVHYIAAEEEDWDYAPLVLAPDDRSYKSQYLNNGPQRIGRKYKKVRFMAYTDETFKTREAIQHESGILGPLLYGEVGDTLLIIFKNQASRPYNIYPHGITDVRPLYSRRLPKGVKHLKDFPILPGEIFKYKWTITVEDGPTKSDPRCLTRYYSSFVNWERDLASGLIGPLLICYKESVDQRGNQIMSDKRNVILFSVFDENRSWYLTENIQRFLPNPAGVQLEDPEFQASNIMHSINGYVFDSLQLSVCLHEVAYWYILSIGAQTDFLSVFFSGYTFKHKNVYEDTLTLFPFSGETVFMEMENPGLWILGCHNSDFRNRGMTALLKVSSCDWNTGDYEEDSYEDISAYFDSENNAIEPRSFSQNPPVLKRHQREGTRTTLQSDQEEIDYDDTISVEMKKEDFDIYDESGNQSPRSFQKKTRHYFIAAVERLWDYGMSSSPHVLRNRAQSGSVPQFKKVVFQEFTDGSFTQPLYRGELNEHLGLLGPYIRAEVEDNIMVTFRNQASRPYSFYSSLISYEEDQRQGAEPRKNFVKPNETKTYFWKVQHHMAPTKDEFDCKAWAYFSDVDLEKDVHSGLIGPLLVCHTNTLNPAHGRQVTVQEFALFFTIFDETKSWYFTENMERNCRAPCNIQMEDPTFKENYRFHAINGYIMDTLPGLVMAQDQRIRWYLLSMGSNENIHSIHFSGHVFTVRKGEEYKMALYNLYPGVFETVEMLPIKAGIWRVECLIGEHLHAGMSTLFLVYSNKCQNPLGMASGHIRDFQITASGQYGQWAPKLARLHYSGSINAWSTKEPFSWIKVDLLAPMIIHGIKTQGARQKFSSLYISQFIIMYSLDGKKWQTYRGNSTGTDMVFFGNVDSSGIKHNIFNPPIIARYIRLHPTHYSIRSTLRMELMGCDLNSCSMPLGMESKAISDAQITASSYFTNMFATWSPSKARLHLQGRSNAWRPQVNNPKEWLQVDFQKTMKVTGVTTQGVKSLDTSMYVKEFLISSSQDGHQWTLFFQNGKVKVFQGNQDSFTPVVNSLDPPLLTRYLRIHPQSWEHQIALRMEVLGCEAQDLY

SEQ ID NO: 2215 - DNA, 4371 bp, synthetic construct
  misc_feature 1..4371: note = Variant of human B-domain deleted Factor VIII
  source 1..4371: mol_type = other DNA
atgcagattgaactgtctacctgcttcttcctctgtttgctgaggttctgctttagcgccactagacggtactaccttggcgctgtggagctgtcctgggactatatgcagagtgatttgggagagcttcccgtcgacgcacgatttcctcctcgcgttccaaagtcatttccctttaacacaagccaggtgtacaagaagacgctcttcgtcgaattcaccgatcacctgttcaatatcgccaaacccagaccaccatggatgggtcttttggggcctaccatacaagcggaggtgtatgacacagttgttatcactctcaagaacatggcttctcatccggtaagtcttcacgcagtgggcgtgtcctactggaaagcttcagaaggagccgagtatgatgatcagacatcccagagggagaaagaagacgacaaggtatttccaggtgggtctcatacctatgtgtggcaagtgctcaaagagaatggccctatggcaagcgatccgccgtgtttgacttacagctacctttcacacgttgacctcgtcaaggacctcaactccgggttgattggagccttgttggtatgcagggaaggatctcttgccaaagagaagacacagaccctggccaagtttatccttctctttgctgtgttcgatgagggcaaaagttggcatagcgaaacgaagaattccctcatgcaggatcgcgacgcagccagcgccagagcttggcccaagatgcacactgtgaacggatatgtcaataggacgcttcctggcttgattgggtgtcatcggaaaagtgtctactggcacgtgatcggaatggggacaacaccagaggtccactccatatttctcgaaggccataccttccttgttcgaaaccacagacaggcatccttggggatctctcccattacctttctcactgcccaaacgggtcttcgtgacttgggtcagttccttctcttttgccatatcccgtcacaccagcatgatggtatggaagcttatgtgaaagtcgacagttgtcctgaggagccacagttgcgcatgaagaataatgaagaagccgaggattacgacgacgatctcaccgattctgagatggacgtggtgaggtttgatgacgacaactctccctccatcattcaagctcggagcggggcgaagaaacaccccaagacttgggtccactatatagcggcggaagaggaggattgggattacgctcctcttgtattggcaccagatgaccgctcatacaaaagccagtacctcaacaacggaccgcagagaattggccggaagtataagaaagtgcgatttatggcctatacagacgaaacctttaagacaagggaggccatccagcatgagagtgggattttgggacctcttctttacggcgaagttggtgataccctcctcatcatcttcaagaatcaagcttctcgcccctataacatttacccacacgggatcactgacgttaggcctttgtatagcagaagacttcccaaaggcgtgaagcatctcaaagacttccccattttgccaggcgagatctttaagtacaaatggaccattacagtggaagatggaccgactaaatcggaccctcgatgccttacgcggtactattcctccttcgtgaattgggagagagatttggcaagcggactcataggaccactcctcatctgttacaaggaatctgtagaccagaggggtaaccagattatgagtgataaacgcaatgtgatcctttttagcgtcttcgacgagaaccggtcctggtacttgaccgagaatatacaaaggttccttcccaaccccgcaggcgttcagttggaagaccctgagtttcaggccagcaatattatgcactcaatcaacggctatgtgtttgatagtctccagctttctgtttgcctccatgaagtagcctattggtacatcttgtcaattggtgctcaaacagacttcctctccgtcttcttctccggctacacctttaagcacaagaacgtgtatgaggacactctcacactctttccattttctggagaaaccgtgttcatggagatggagaatccaggcctttggatcttgggttgccacaacagtgattttcgcaatcggggaatgactgctctcctcaaagtcagcagctgtgattggaacacaggcgactatgaggaagattcttacgaggacataagtgcctactttgactccgaaaataacgccattgagcccagatcattctcccagaatcctcccgtgcttaaaaggcatcagcgcgaaggtaccagaactactcttcagtctgatcaagaggagattgactatgacgacaccattagcgtggaaatgaagaaggaggatttcgatatctatgacgaagatgagaaccagtctccgcggagctttcagaagaagacgcgacactacttcattgcagcagtcgaaaggctttgggactacggtatgtcatcatcccctcatgtgttgcgcaatagagctcagagtggaagtgttccacagttcaagaaagtcgtctttcaagagtttacagatggcagcttcacacagcctctctatcggggcgagcttaacgaacatttgggactccttggtccctatatccgagccgaagtggaggacaacattatggttacctttaggaatcaagcctctcgcccctacagcttctactcctccctcatcagttatgaggaggatcagagacaaggcgctgaaccacggaagaactttgtgaaaccgaatgagacgaagacctacttctggaaagtacagcaccacatggcccccacaaaagacgaattcgattgcaaagcatgggcgtatttttcagacgttgacttggagaaagatgtacattcaggacttattggtcctttgttggtgtgtcacactaacactctcaatccagcccatggcaggcaggtgacagtccaggaattcgctcttttctttaccatctttgatgagaccaagtcctggtacttcacggaaaacatggagcgcaattgcagagccccctgtaacatacagatggaggaccctacctttaaggaaaattatcggttccacgcaatcaacggatacattatggatacactccctggccttgtgatggctcaggaccaacgaatcaggtggtacctcctcagcatgggttctaatgagaacatacactccattcacttttcaggacatgtgttcactgtccggaagggtgaagagtataagatggccctctacaatttgtatccaggcgtgtttgagaccgttgaaatgcttccctctaaagctggcatctggagagtagagtgcttgatcggagaacatcttcacgcaggtatgagcaccttgttcctcgtgtacagcaacaaatgtcagaatccacttggcatggccagtggacacattcgcgactttcagatcacagcatctggccagtatggacaatgggccccaaagttggctcgcctccattactccggtagcataaatgcgtggtccactaaagaacctttcagctggattaaggtcgatcttcttgcccccatgatcatccacggcattaagacacagggagcgaggcagaaattctcctccctctacatctcacagttcattattatgtatagtttggacggcaagaagtggcaaacttatagaggtaacagtactggaacagacatggtgttcttcggcaacgttgatagctctggcatcaaacacaacatctttaatcctcccataatagctcggtacatcagattgcatccgacccactacagcattaggagtacactccgaatggagcttatgggttgcgacttgaattcctgttcaatgccactcggaatggagtctaaagccatctctgatgcacagataaccgccagtagctactttacgaacatgtttgctacgtggtcaccctctaaggcaaggcttcatttgcaaggccggtctaatgcctggagacctcaggtgaacaacccgaaagaatggctccaggtggactttcagaagaccatgaaagtaacaggtgtcactactcagggagttaagtccttggatactagcatgtatgtgaaggagttccttatttcctcatcacaagatggccaccagtggaccctcttctttcagaatggtaaggtcaaagtgtttcagggcaatcaagacagcttcacacccgtggtgaacagtcttgatcctccactcttgacacgataccttcgaatccatccacagtcttgggagcaccagattgcattgcgcatggaagtacttggatgcgaggctcaggacctctac

SEQ ID NO: 2216 - protein, 1457 aa, synthetic construct
  REGION 1..1457: note = Variant of human B-domain deleted Factor VIII
MQIELSTCFFLCLLRFCFSATRRYYLGAVELSWDYMQSDLGELPVDARFPPRVPKSFPFNTSQVYKKTLFVEFTDHLFNIAKPRPPWMGLLGPTIQAEVYDTVVITLKNMASHPVSLHAVGVSYWKASEGAEYDDQTSQREKEDDKVFPGGSHTYVWQVLKENGPMASDPPCLTYSYLSHVDLVKDLNSGLIGALLVCREGSLAKEKTQTLAKFILLFAVFDEGKSWHSETKNSLMQDRDAASARAWPKMHTVNGYVNRTLPGLIGCHRKSVYWHVIGMGTTPEVHSIFLEGHTFLVRNHRQASLGISPITFLTAQTGLRDLGQFLLFCHIPSHQHDGMEAYVKVDSCPEEPQLRMKNNEEAEDYDDDLTDSEMDVVRFDDDNSPSIIQARSGAKKHPKTWVHYIAAEEEDWDYAPLVLAPDDRSYKSQYLNNGPQRIGRKYKKVRFMAYTDETFKTREAIQHESGILGPLLYGEVGDTLLIIFKNQASRPYNIYPHGITDVRPLYSRRLPKGVKHLKDFPILPGEIFKYKWTITVEDGPTKSDPRCLTRYYSSFVNWERDLASGLIGPLLICYKESVDQRGNQIMSDKRNVILFSVFDENRSWYLTENIQRFLPNPAGVQLEDPEFQASNIMHSINGYVFDSLQLSVCLHEVAYWYILSIGAQTDFLSVFFSGYTFKHKNVYEDTLTLFPFSGETVFMEMENPGLWILGCHNSDFRNRGMTALLKVSSCDWNTGDYEEDSYEDISAYFDSENNAIEPRSFSQNPPVLKRHQREGTRTTLQSDQEEIDYDDTISVEMKKEDFDIYDEDENQSPRSFQKKTRHYFIAAVERLWDYGMSSSPHVLRNRAQSGSVPQFKKVVFQEFTDGSFTQPLYRGELNEHLGLLGPYIRAEVEDNIMVTFRNQASRPYSFYSSLISYEEDQRQGAEPRKNFVKPNETKTYFWKVQHHMAPTKDEFDCKAWAYFSDVDLEKDVHSGLIGPLLVCHTNTLNPAHGRQVTVQEFALFFTIFDETKSWYFTENMERNCRAPCNIQMEDPTFKENYRFHAINGYIMDTLPGLVMAQDQRIRWYLLSMGSNENIHSIHFSGHVFTVRKGEEYKMALYNLYPGVFETVEMLPSKAGIWRVECLIGEHLHAGMSTLFLVYSNKCQNPLGMASGHIRDFQITASGQYGQWAPKLARLHYSGSINAWSTKEPFSWIKVDLLAPMIIHGIKTQGARQKFSSLYISQFIIMYSLDGKKWQTYRGNSTGTDMVFFGNVDSSGIKHNIFNPPIIARYIRLHPTHYSIRSTLRMELMGCDLNSCSMPLGMESKAISDAQITASSYFTNMFATWSPSKARLHLQGRSNAWRPQVNNPKEWLQVDFQKTMKVTGVTTQGVKSLDTSMYVKEFLISSSQDGHQWTLFFQNGKVKVFQGNQDSFTPVVNSLDPPLLTRYLRIHPQSWEHQIALRMEVLGCEAQDLY

SEQ ID NO: 2217 - DNA, 4371 bp, synthetic construct
  misc_feature 1..4371: note = Variant of human B-domain deleted Factor VIII
  source 1..4371: mol_type = other DNA
atgcagattgaactgtctacctgcttcttcctctgtttgctgaggttctgctttagcgccactagacggtactaccttggcgctgtggagctgtcctgggactatatgcagagtgatttgggagagcttcccgtcgacgcacgatttcctcctcgcgttccaaagtcatttccctttaacacaagccaggtgtacaagaagacgctcttcgtcgaattcaccgatcacctgttcaatatcgccaaacccagaccaccatggatgggtcttttggggcctaccatacaagcggaggtgtatgacacagttgttatcactctcaagaacatggcttctcatccggtaagtcttcacgcagtgggcgtgtcctactggaaagcttcagaaggagccgagtatgatgatcagacatcccagagggagaaagaagacgacaaggtatttccaggtgggtctcatacctatgtgtggcaagtgctcaaagagaatggccctatggcaagcgatccgccgtgtttgacttacagctacctttcacacgttgacctcgtcaaggacctcaactccgggttgattggagccttgttggtatgcagggaaggatctcttgccaaagagaagacacagaccctggccaagtttatccttctctttgctgtgttcgatgagggcaaaagttggcatagcgaaacgaagaattccctcatgcaggatcgcgacgcagccagcgccagagcttggcccaagatgcacactgtgaacggatatgtcaataggacgcttcctggcttgattgggtgtcatcggaaaagtgtctactggcacgtgatcggaatggggacaacaccagaggtccactccatatttctcgaaggccataccttccttgttcgaaaccacagacaggcatccttggggatctctcccattacctttctcactgcccaaacgggtcttcgtgacttgggtcagttccttctcttttgccatatcccgtcacaccagcatgatggtatggaagcttatgtgaaagtcgacagttgtcctgaggagccacagttgcgcatgaagaataatgaagaagccgaggattacgacgacgatctcaccgattctgagatggacgtggtgaggtttgatgacgacaactctccctccatcattcaagctcggagcggggcgaagaaacaccccaagacttgggtccactatatagcggcggaagaggaggattgggattacgctcctcttgtattggcaccagatgaccgctcatacaaaagccagtacctcaacaacggaccgcagagaattggccggaagtataagaaagtgcgatttatggcctatacagacgaaacctttaagacaagggaggccatccagcatgagagtgggattttgggacctcttctttacggcgaagttggtgataccctcctcatcatcttcaagaatcaagcttctcgcccctataacatttacccacacgggatcactgacgttaggcctttgtatagcagaagacttcccaaaggcgtgaagcatctcaaagacttccccattttgccaggcgagatctttaagtacaaatggaccattacagtggaagatggaccgactaaatcggaccctcgatgccttacgcggtactattcctccttcgtgaattgggagagagatttggcaagcggactcataggaccactcctcatctgttacaaggaatctgtagaccagaggggtaaccagattatgagtgataaacgcaatgtgatcctttttagcgtcttcgacgagaaccggtcctggtacttgaccgagaatatacaaaggttccttcccaaccccgcaggcgttcagttggaagaccctgagtttcaggccagcaatattatgcactcaatcaacggctatgtgtttgatagtctccagctttctgtttgcctccatgaagtagcctattggtacatcttgtcaattggtgctcaaacagacttcctctccgtcttcttctccggctacacctttaagcacaagaacgtgtatgaggacactctcacactctttccattttctggagaaaccgtgttcatggagatggagaatccaggcctttggatcttgggttgccacaacagtgattttcgcaatcggggaatgactgctctcctcaaagtcagcagctgtgattggaacacaggcgactatgaggaagattcttacgaggacataagtgcctactttgactccaagaataacgccattgagcccagatcattctcccagaatcctcccgtgcttaaaaggcatcagcgcgaaggtaccagaactactcttcagtctgatcaagaggagattgactatgacgacaccattagcgtggaaatgaagaaggaggatttcgatatctatgacgaagatgagaaccagtctccgcggagctttcagaagaagacgcgacactacttcattgcagcagtcgaaaggctttgggactacggtatgtcatcatcccctcatgtgttgcacaatagagctcagagtggaagtgttccacagttcaagaaagtcgtctttcaagagtttacagatggcagcttcacacagcctctctatcggggcgagcttaacgaacatttgggactccttggtccctatatccgagccgaagtggaggacaacattatggttacctttaggaatcaagcctctcgcccctacagcttctactcctccctcatcagttatgaggaggatcagagacaaggcgctgaaccacggaagaactttgtgaaaccgaatgagacgaagacctacttctggaaagtacagcaccacatggcccccacaaaagacgaattcgattgcaaagcatgggcgtatttttcagacgttgacttggagaaagatgtacattcaggacttattggtcctttgttggtgtgtcacactaacactctcaatccagcccatggcaggcaggtgacagtccaggaattcgctcttttctttaccatctttgatgagaccaagtcctggtacttcacggaaaacatggagcgcaattgcagagccccctgtaacatacagatggaggaccctacctttaaggaaaattatcggttccacgcaatcaacggatacattatggatacactccctggccttgtgatggctcaggaccaacgaatcaggtggtacctcctcagcatgggttctaatgagaacatacactccattcacttttcaggacatgtgttcactgtccggaagaaagaagagtataagatggccctctacaatttgtatccaggcgtgtttgagaccgttgaaatgcttcccagcaaagctggcatctggagagtagagtgcttgatcggagaacatcttcacgcaggtatgagcaccttgttcctcgtgtacagcaacaaatgtcagaatccacttggcatggccagtggacacattcgcgactttcagatcacagcatctggccagtatggacaatgggccccaaagttggctcgcctccattactccggtagcataaatgcgtggtccactaaagaacctttcagctggattaaggtcgatcttcttgcccccatgatcatccacggcattaagacacagggagcgaggcagaaattctcctccctctacatctcacagttcattattatgtatagtttggacggcaagaagtggcaaacttatagaggtaacagtactggaacagacatggtgttcttcggcaacgttgatagctctggcatcaaacacaacatctttaatcctcccataatagctcggtacatcagattgcatccgacccactacagcattaggagtacactccgaatggagcttatgggttgcgacttgaattcctgttcaatgccactcggaatggagtctaaagccatctctgatgcacagataaccgccagtagctactttacgaacatgtttgctacgtggtcaccctctaaggcaaggcttcatttgcaaggccggtctaatgcctggagacctcaggtgaacaacccgaaagaatggctccaggtggactttcagaagaccatgaaagtaacaggtgtcactactcagggagttaagtccttggatactagcatgtatgtgaaggagttccttatttcctcatcacaagatggccaccagtggaccctcttctttcagaatggtaaggtcaaagtgtttcagggcaatcaagacagcttcacacccgtggtgaacagtcttgatcctccactcttgacacgataccttcgaatccatccacagtcttgggagcaccagattgcattgcgcatggaagtacttggatgcgaggctcaggacctctac

SEQ ID NO: 2218 - protein, 1457 aa, synthetic construct
  REGION 1..1457: note = Variant of human B-domain deleted Factor VIII
MQIELSTCFFLCLLRFCFSATRRYYLGAVELSWDYMQSDLGELPVDARFPPRVPKSFPFNTSQVYKKTLFVEFTDHLFNIAKPRPPWMGLLGPTIQAEVYDTVVITLKNMASHPVSLHAVGVSYWKASEGAEYDDQTSQREKEDDKVFPGGSHTYVWQVLKENGPMASDPPCLTYSYLSHVDLVKDLNSGLIGALLVCREGSLAKEKTQTLAKFILLFAVFDEGKSWHSETKNSLMQDRDAASARAWPKMHTVNGYVNRTLPGLIGCHRKSVYWHVIGMGTTPEVHSIFLEGHTFLVRNHRQASLGISPITFLTAQTGLRDLGQFLLFCHIPSHQHDGMEAYVKVDSCPEEPQLRMKNNEEAEDYDDDLTDSEMDVVRFDDDNSPSIIQARSGAKKHPKTWVHYIAAEEEDWDYAPLVLAPDDRSYKSQYLNNGPQRIGRKYKKVRFMAYTDETFKTREAIQHESGILGPLLYGEVGDTLLIIFKNQASRPYNIYPHGITDVRPLYSRRLPKGVKHLKDFPILPGEIFKYKWTITVEDGPTKSDPRCLTRYYSSFVNWERDLASGLIGPLLICYKESVDQRGNQIMSDKRNVILFSVFDENRSWYLTENIQRFLPNPAGVQLEDPEFQASNIMHSINGYVFDSLQLSVCLHEVAYWYILSIGAQTDFLSVFFSGYTFKHKNVYEDTLTLFPFSGETVFMEMENPGLWILGCHNSDFRNRGMTALLKVSSCDWNTGDYEEDSYEDISAYFDSKNNAIEPRSFSQNPPVLKRHQREGTRTTLQSDQEEIDYDDTISVEMKKEDFDIYDEDENQSPRSFQKKTRHYFIAAVERLWDYGMSSSPHVLHNRAQSGSVPQFKKVVFQEFTDGSFTQPLYRGELNEHLGLLGPYIRAEVEDNIMVTFRNQASRPYSFYSSLISYEEDQRQGAEPRKNFVKPNETKTYFWKVQHHMAPTKDEFDCKAWAYFSDVDLEKDVHSGLIGPLLVCHTNTLNPAHGRQVTVQEFALFFTIFDETKSWYFTENMERNCRAPCNIQMEDPTFKENYRFHAINGYIMDTLPGLVMAQDQRIRWYLLSMGSNENIHSIHFSGHVFTVRKKEEYKMALYNLYPGVFETVEMLPSKAGIWRVECLIGEHLHAGMSTLFLVYSNKCQNPLGMASGHIRDFQITASGQYGQWAPKLARLHYSGSINAWSTKEPFSWIKVDLLAPMIIHGIKTQGARQKFSSLYISQFIIMYSLDGKKWQTYRGNSTGTDMVFFGNVDSSGIKHNIFNPPIIARYIRLHPTHYSIRSTLRMELMGCDLNSCSMPLGMESKAISDAQITASSYFTNMFATWSPSKARLHLQGRSNAWRPQVNNPKEWLQVDFQKTMKVTGVTTQGVKSLDTSMYVKEFLISSSQDGHQWTLFFQNGKVKVFQGNQDSFTPVVNSLDPPLLTRYLRIHPQSWEHQIALRMEVLGCEAQDLY

SEQ ID NO: 2219 - DNA, 4371 bp, synthetic construct
  misc_feature 1..4371: note = Variant of human B-domain deleted Factor VIII
  source 1..4371: mol_type = other DNA
atgcagattgaactgtctacctgcttcttcctctgtttgctgaggttctgctttagcgccactagacggtactaccttggcgctgtggagctgtcctgggactatatgcagagtgatttgggagagcttcccgtcgacgcacgatttcctcctcgcgttccaaagtcatttccctttaacacaagccaggtgtacaagaagacgctcttcgtcgaattcaccgatcacctgttcaatatcgccaaacccagaccaccatggatgggtcttttggggcctaccatacaagcggaggtgtatgacacagttgttatcactctcaagaacatggcttctcatccggtaagtcttcacgcagtgggcgtgtcctactggaaagcttcagaaggagccgagtatgatgatcagacatcccagagggagaaagaagacgacaaggtatttccaggtgggtctcatacctatgtgtggcaagtgctcaaagagaatggccctatggcaagcgatccgccgtgtttgacttacagctacctgtcacacgttgacctcgtcaaggacctcaactccgggttgattggagccttgttggtatgcagggaaggatctcttgccaaagagaagacacagaccctggccaagtttatccttctctttgctgtgttcgatgagggcaaaagttggcatagcgaaacgaagaattccctcatgcaggatcgcgacgcagccagcgccagagcttggcccaagatgcacactgtgaacggatatgtcaataggacgcttcctggcttgattgggtgtcatcggaaaagtgtctactggcacgtgatcggaatggggacaacaccagaggtccactccatatttctcgaaggccataccttccttgttcgaaaccacagacaggcatccttggggatctctcccattacctttctcactgcccaaacgggtcttcgtgacttgggtcagttccttctcttttgccatatcccgtcacaccagcatgatggtatggaagcttatgtgaaagtcgacagttgtcctgaggagccacagttgcgcatgaagaataatgaagaagccgaggattacgacgacgatctcaccgattctgagatggacgtggtgaggtttgatgacgacaactctccctccatcattcaagctcggagcggggcgaagaaacaccccaagacttgggtccactatatagcggcggaagaggaggattgggattacgctcctcttgtattggcaccagatgaccgctcatacaaaagccagtacctcaacaacggaccgcagagaattggccggaagtataagaaagtgcgatttatggcctatacagacgaaacctttaagacaagggaggccatccagcatgagagtgggattttgggacctcttctttacggcgaagttggtgataccctcctcatcatcttcaagaatcaagcttctcgcccctataacatttacccacacgggatcactgacgttaggcctttgtatagcagaagacttcccaaaggcgtgaagcatctcaaagacttccccattttgccaggcgagatctttaagtacaaatggaccattacagtggaagatggaccgactaaatcagaccctcgatgccttacgcggtactattcctccttcgtgaattgggagagagatttggcaagcggactcataggaccactcctcatctgttacaaggaatctgtagaccagaggggtaaccagattatgagtgataaacgcaatgtgatcctttttagcgtcttcgacgagaaccggtcctggtacttgaccgagaatatacaaaggttccttcccaaccccgcaggcgttcagttggaagaccctgagtttcaggccagcaatattatgcactcaatcaacggctatgtgtttgatagtctccagctttctgtttgcctccatgaagtagcctattggtacatcttgtcaattggtgctcaaacagacttcctctccgtcttcttctccggctacacctttaagcacaagaacgtgtatgaggacactctcacactctttccattttctggagaaaccgtgttcatggaaatggagaatccaggcctttggatcttgggttgccacaacagtgattttcgcaatcggggaatgactgctctcctcaaagtcagcagctgtgattggaacacaggcgactatgaggaagattcttacgaggacataagtgcctactttgactccaagaataacgccattgagcccagatcattctcccagaatcctcccgtgcttaaaaggcatcagcgcgaaggtaccagaactactcttcagtctgatcaagaggagattgactatgacgacaccattagcgtggaaatgaagaaggaagatttcgatatccaggacgaggacgggaaccagtctccgcggagctttcagaagaagacgcgacactacttcattgcagcagtcgaaaggctttgggactacggtatgtcatcatcccctcatgtgttgcgcaatagagctcagagtggaagtgttccacagttcaagaaagtcgtctttcaagagtttacagatggcagcttcacacagcctctctatcggggcgagcttaacgaacatttgggactccttggtccctatatccgagccgaagtggaggacaacattatggttacctttaggaatcaagcctctcgcccctacagcttctactcctccctcatcagttatgaggaggatcagagacaaggcgctgaaccacggaagaactttgtgaaaccgaatgagacgaagacctacttctggaaagtacagcaccacatggcccccacaaaagacgaattcgattgcaaagcatgggcgtatttttcagacgttgacttggagaaagatgtacattcaggacttattggtcctttgttggtgtgtcacactaacactctcaatccagcccatggcaggcaggtgacagtccaggaattcgctcttttctttaccatctttgatgagaccaagtcctggtacttcacggaaaacatggagcgcaattgcagagccccctgtaacatacagatggaggaccctacctttaaggaaaattatcggttccacgcaatcaacggatacattatggatacactccctggccttgtgatggctcaggaccaacgaatcaggtggtacctcctcagcatgggttctaatgaaaacatacactccattcacttttcaggacatgtgttcactgtccggaagaaagaagagtataagatggccctctacaatttgtatccaggcgtgtttgagaccgttgaaatgcttccctctaaagctggcatctggagagtagagtgcttgatcggagaacatcttcacgcaggtatgagcaccttgttcctcgtgtacagcaacaaatgtcagaatccacttggcatggccagtggacacattcgcgactttcagatcacagcatctggccagtatggacaatgggccccaaagttggctcgcctccattactccggtagcataaatgcgtggtccactaaagaacctttcagctggattaaggtcgatcttcttgcccccatgatcatccacggcattaagacacagggagcgaggcagaaattctcctccctctacatctcacagttcattattatgtatagtttggacggcaagaagtggcaaacttatagaggtaacagtactggaacagacatggtgttcttcggcaacgttgatagctctggcatcaaacacaacatctttaatcctcccataatagctcggtacatcagattgcatccgacccactacagcattaggagtacactccgaatggagcttatgggttgcgacttgaattcctgttcaatgccactcggaatggagtctaaagccatctctgatgcacagataaccgccagtagctactttacgaacatgtttgctacgtggtcaccctctaaggcaaggcttcatttgcaaggccggtctaatgcctggagacctcaggtgaacaacccgaaagaatggctccaggtggactttcagaagaccatgaaagtaacaggtgtcactactcagggagttaagtccttggatactagcatgtatgtgaaggagttccttatttcctcatcacaagatggccaccagtggaccctcttctttcagaatggtaaggtcaaagtgtttcagggcaatcaagacagcttcacacccgtggtgaacagtcttgatcctccactcttgacacgataccttcgaatccatccacagtcttgggagcaccagattgcattgcgcatggaagtacttggatgcgaggctcaggacctctac

SEQ ID NO: 2220 - protein, 1457 aa, synthetic construct
  REGION 1..1457: note = Variant of human B-domain deleted Factor VIII
MQIELSTCFFLCLLRFCFSATRRYYLGAVELSWDYMQSDLGELPVDARFPPRVPKSFPFNTSQVYKKTLFVEFTDHLFNIAKPRPPWMGLLGPTIQAEVYDTVVITLKNMASHPVSLHAVGVSYWKASEGAEYDDQTSQREKEDDKVFPGGSHTYVWQVLKENGPMASDPPCLTYSYLSHVDLVKDLNSGLIGALLVCREGSLAKEKTQTLAKFILLFAVFDEGKSWHSETKNSLMQDRDAASARAWPKMHTVNGYVNRTLPGLIGCHRKSVYWHVIGMGTTPEVHSIFLEGHTFLVRNHRQASLGISPITFLTAQTGLRDLGQFLLFCHIPSHQHDGMEAYVKVDSCPEEPQLRMKNNEEAEDYDDDLTDSEMDVVRFDDDNSPSIIQARSGAKKHPKTWVHYIAAEEEDWDYAPLVLAPDDRSYKSQYLNNGPQRIGRKYKKVRFMAYTDETFKTREAIQHESGILGPLLYGEVGDTLLIIFKNQASRPYNIYPHGITDVRPLYSRRLPKGVKHLKDFPILPGEIFKYKWTITVEDGPTKSDPRCLTRYYSSFVNWERDLASGLIGPLLICYKESVDQRGNQIMSDKRNVILFSVFDENRSWYLTENIQRFLPNPAGVQLEDPEFQASNIMHSINGYVFDSLQLSVCLHEVAYWYILSIGAQTDFLSVFFSGYTFKHKNVYEDTLTLFPFSGETVFMEMENPGLWILGCHNSDFRNRGMTALLKVSSCDWNTGDYEEDSYEDISAYFDSKNNAIEPRSFSQNPPVLKRHQREGTRTTLQSDQEEIDYDDTISVEMKKEDFDIQDEDGNQSPRSFQKKTRHYFIAAVERLWDYGMSSSPHVLRNRAQSGSVPQFKKVVFQEFTDGSFTQPLYRGELNEHLGLLGPYIRAEVEDNIMVTFRNQASRPYSFYSSLISYEEDQRQGAEPRKNFVKPNETKTYFWKVQHHMAPTKDEFDCKAWAYFSDVDLEKDVHSGLIGPLLVCHTNTLNPAHGRQVTVQEFALFFTIFDETKSWYFTENMERNCRAPCNIQMEDPTFKENYRFHAINGYIMDTLPGLVMAQDQRIRWYLLSMGSNENIHSIHFSGHVFTVRKKEEYKMALYNLYPGVFETVEMLPSKAGIWRVECLIGEHLHAGMSTLFLVYSNKCQNPLGMASGHIRDFQITASGQYGQWAPKLARLHYSGSINAWSTKEPFSWIKVDLLAPMIIHGIKTQGARQKFSSLYISQFIIMYSLDGKKWQTYRGNSTGTDMVFFGNVDSSGIKHNIFNPPIIARYIRLHPTHYSIRSTLRMELMGCDLNSCSMPLGMESKAISDAQITASSYFTNMFATWSPSKARLHLQGRSNAWRPQVNNPKEWLQVDFQKTMKVTGVTTQGVKSLDTSMYVKEFLISSSQDGHQWTLFFQNGKVKVFQGNQDSFTPVVNSLDPPLLTRYLRIHPQSWEHQIALRMEVLGCEAQDLY

SEQ ID NO: 2221 - DNA, 4371 bp, synthetic construct
  misc_feature 1..4371: note = Variant of human B-domain deleted Factor VIII
  source 1..4371: mol_type = other DNA
atgcagattgaactgtctacctgcttcttcctctgtttgctgaggttctgctttagcgccactagacggtactaccttggcgctgtggagctgtcctgggactatatgcagagtgatttgggagagcttcccgtcgacgcacgatttcctcctcgcgttccaaagtcatttccctttaacacaagccaggtgtacaagaagacgctcttcgtcgaattcaccgatcacctgttcaatatcgccaaacccagaccaccatggatgggtcttttggggcctaccatacaagcggaggtgtatgacacagttgttatcactctcaagaacatggcttctcatccggtaagtcttcacgcagtgggcgtgtcctactggaaagcttcagaaggagccgagtatgatgatcagacatcccagagggagaaagaagacgacaaggtatttccaggtgggtctcatacctatgtgtggcaagtgctcaaagagaatggccctatggcaagcgatccgccgtgtttgacttacagctacctttcacacgttgacctcgtcaaggacctcaactccgggttgattggagccttgttggtatgcagggaaggatctcttgccaaagagaagacacagaccctggccaagtttatccttctctttgctgtgttcgatgagggcaaaagttggcatagcgaaacgaagaattccctcatgcaggatcgcgacgcagccagcgccagagcttggcccaagatgcacactgtgaacggatatgtcaataggacgcttcctggcttgattgggtgtcatcggaaaagtgtctactggcacgtgatcggaatggggacaacaccagaggtccactccatatttctcgaaggccataccttccttgttcgaaaccacagacaggcatccttggggatctctcccattacctttctcactgcccaaacgggtcttcgtgacttgggtcagttccttctcttttgccatatcccgtcacaccagcatgatggtatggaagcttatgtgaaagtcgacagttgtcctgaggagccacagttgcgcatgaagaataatgaagaagccgaggattacgacgacgatctcaccgattctgagatggacgtggtgaggtttgatgacgacaactctccctccatcattcaagctcggagcggggcgaagaaacaccccaagacttgggtccactatatagcggcggaagaggaggattgggattacgctcctcttgtattggcaccagatgaccgctcatacaaaagccagtacctcaacaacggaccgcagagaattggccggaagtataagaaagtgcgatttatggcctatacagacgaaacctttaagacaagggaggccatccagcatgagagtgggattttgggacctcttctttacggcgaagttggtgataccctcctcatcatcttcaagaatcaagcttctcgcccctataacatttacccacacgggatcactgacgttaggcctttgtatagcagaagacttcccaaaggcgtgaagcatctcaaagacttccccattttgccaggcgagatctttaagtacaaatggaccattacagtggaagatggaccgactaaatcagaccctcgatgccttacgcggtactattcctccttcgtgaattgggagagagatttggcaagcggactcataggaccactcctcatctgttacaaggaatctgtagaccagaggggtaaccagattatgagtgataaacgcaatgtgatcctttttagcgtcttcgacgagaaccggtcctggtacttgaccgagaatatacaaaggttccttcccaaccccgcaggcgttcagttggaagaccctgagtttcaggccagcaatattatgcactcaatcaacggctatgtgtttgatagtctccagctttctgtttgcctccatgaagtagcctattggtacatcttgtcaattggtgctcaaacagacttcctctccgtcttcttctccggctacacctttaagcacaagggcgtgtatgaggacactctcacactctttccattttctggagaaaccgtgttcatgagcatggagaatccaggcctttggatcttgggttgccacaacagtgattttcgcaatcggggaatgactgctctcctcaaagtcagcagctgtgattggaacacaggcgactatgaggaagattcttacgaggacataagtgcctactttgactccaagaataacgccattgagcccagatcattctcccagaatcctcccgtgcttaaaaggcatcagcgcgaaggtaccagaactactcttcagtctgatcaagaggagattgactatgacgacaccattagcgtggaaatgaagaaggaggatttcgatatctatgacgaagatgagaaccagtctccgcggagctttcagaagaagacgcgacactacttcattgcagcagtcgaaaggctttgggactacggtatgtcatcatcccctcatgtgttgcgcaatagagctcagagtggaagtgttccacagttcaagaaagtcgtctttcaagagtttacagatggcagcttcacacagcctctctatcggggcgagcttaacgaacatttgggactccttggtccctatatccgagccgaagtggaggacaacattatggttacctttaggaatcaagcctctcgcccctacagcttctactcctccctcatcagttatgaggaggatcagagacaaggcgctgaaccacggaagaactttgtgaaaccgaatgagacgaagacctacttctggaaagtacagcaccacatggcccccacaaaagacgaattcgattgcaaagcatgggcgtatttttcagacgttgacttggagaaagatgtacattcaggacttattggtcctttgttggtgtgtcacactaacactctcaatccagcccatggcaggcaggtgacagtccaggaattcgctcttttctttaccatctttgatgagaccaagtcctggtacttcacggaaaacatggagcgcaattgcagagccccctgtaacatacagatggaggaccctacctttaaggaaaattatcggttccacgcaatcaacggatacattatggatacactccctggccttgtgatggctcaggaccaacgaatcaggtggtacctcctcagcatgggttctaatgagaacatacactccattcacttttcaggacatgtgttcactgtccggaaggcggaagagtataagatggccctctacaatttgtatccaggcgtgtttgagaccgttgaaatgcttccctctaaagctggcatctggagagtagagtgcttgatcggagaacatcttcacgcaggtatgagcaccttgttcctcgtgtacagcaacaaatgtcagaatccacttggcatggccagtggacacattcgcgactttcagatcacagcatctggccagtatggacaatgggccccaaagttggctcgcctccattactccggtagcataaatgcgtggtccactaaagaacctttcagctggattaaggtcgatcttcttgcccccatgatcatccacggcattaagacacagggagcgaggcagaaattctcctccctctacatctcacagttcattattatgtatagtttggacggcaagaagtggcaaacttatagaggtaacagtactggaacagacatggtgttcttcggcaacgttgatagctctggcatcaaacacaacatctttaatcctcccataatagctcggtacatcagattgcatccgacccactacagcattaggagtacactccgaatggagcttatgggttgcgacttgaattcctgttcaatgccactcggaatggagtctaaagccatctctgatgcacagataaccgccagtagctactttacgaacatgtttgctacgtggtcaccctctaaggcaaggcttcatttgcaaggccggtctaatgcctggagacctcaggtgaacaacccgaaagaatggctccaggtggactttcagaagaccatgaaagtaacaggtgtcactactcagggagttaagtccttggatactagcatgtatgtgaaggagttccttatttcctcatcacaagatggccaccagtggaccctcttctttcagaatggtaaggtcaaagtgtttcagggcaatcaagacagcttcacacccgtggtgaacagtcttgatcctccactcttgacacgataccttcgaatccatccacagtcttgggagcaccagattgcattgcgcatggaagtacttggatgcgaggctcaggacctctac

SEQ ID NO: 2222 - protein, 1457 aa, synthetic construct
  REGION 1..1457: note = Variant of human B-domain deleted Factor VIII
MQIELSTCFFLCLLRFCFSATRRYYLGAVELSWDYMQSDLGELPVDARFPPRVPKSFPFNTSQVYKKTLFVEFTDHLFNIAKPRPPWMGLLGPTIQAEVYDTVVITLKNMASHPVSLHAVGVSYWKASEGAEYDDQTSQREKEDDKVFPGGSHTYVWQVLKENGPMASDPPCLTYSYLSHVDLVKDLNSGLIGALLVCREGSLAKEKTQTLAKFILLFAVFDEGKSWHSETKNSLMQDRDAASARAWPKMHTVNGYVNRTLPGLIGCHRKSVYWHVIGMGTTPEVHSIFLEGHTFLVRNHRQASLGISPITFLTAQTGLRDLGQFLLFCHIPSHQHDGMEAYVKVDSCPEEPQLRMKNNEEAEDYDDDLTDSEMDVVRFDDDNSPSIIQARSGAKKHPKTWVHYIAAEEEDWDYAPLVLAPDDRSYKSQYLNNGPQRIGRKYKKVRFMAYTDETFKTREAIQHESGILGPLLYGEVGDTLLIIFKNQASRPYNIYPHGITDVRPLYSRRLPKGVKHLKDFPILPGEIFKYKWTITVEDGPTKSDPRCLTRYYSSFVNWERDLASGLIGPLLICYKESVDQRGNQIMSDKRNVILFSVFDENRSWYLTENIQRFLPNPAGVQLEDPEFQASNIMHSINGYVFDSLQLSVCLHEVAYWYILSIGAQTDFLSVFFSGYTFKHKGVYEDTLTLFPFSGETVFMSMENPGLWILGCHNSDFRNRGMTALLKVSSCDWNTGDYEEDSYEDISAYFDSKNNAIEPRSFSQNPPVLKRHQREGTRTTLQSDQEEIDYDDTISVEMKKEDFDIYDEDENQSPRSFQKKTRHYFIAAVERLWDYGMSSSPHVLRNRAQSGSVPQFKKVVFQEFTDGSFTQPLYRGELNEHLGLLGPYIRAEVEDNIMVTFRNQASRPYSFYSSLISYEEDQRQGAEPRKNFVKPNETKTYFWKVQHHMAPTKDEFDCKAWAYFSDVDLEKDVHSGLIGPLLVCHTNTLNPAHGRQVTVQEFALFFTIFDETKSWYFTENMERNCRAPCNIQMEDPTFKENYRFHAINGYIMDTLPGLVMAQDQRIRWYLLSMGSNENIHSIHFSGHVFTVRKAEEYKMALYNLYPGVFETVEMLPSKAGIWRVECLIGEHLHAGMSTLFLVYSNKCQNPLGMASGHIRDFQITASGQYGQWAPKLARLHYSGSINAWSTKEPFSWIKVDLLAPMIIHGIKTQGARQKFSSLYISQFIIMYSLDGKKWQTYRGNSTGTDMVFFGNVDSSGIKHNIFNPPIIARYIRLHPTHYSIRSTLRMELMGCDLNSCSMPLGMESKAISDAQITASSYFTNMFATWSPSKARLHLQGRSNAWRPQVNNPKEWLQVDFQKTMKVTGVTTQGVKSLDTSMYVKEFLISSSQDGHQWTLFFQNGKVKVFQGNQDSFTPVVNSLDPPLLTRYLRIHPQSWEHQIALRMEVLGCEAQDLY

SEQ ID NO: 2223 - DNA, 4371 bp, synthetic construct
  misc_feature 1..4371: note = Variant of human B-domain deleted Factor VIII
  source 1..4371: mol_type = other DNA
atgcagattgaactgtctacctgcttcttcctctgtttgctgaggttctgctttagcgccactagacggtactaccttggcgctgtggagctgtcctgggactatatgcagagtgatttgggagagcttcccgtcgacgcacgatttcctcctcgcgttccaaagtcatttccctttaacacaagccaggtgtacaagaagacgctcttcgtcgaattcaccgatcacctgttcaatatcgccaaacccagaccaccatggatgggtcttttggggcctaccatacaagcggaggtgtatgacacagttgttatcactctcaagaacatggcttctcatccggtaagtcttcacgcagtgggcgtgtcctactggaaagcttcagaaggagccgagtatgatgatcagacatcccagagggagaaagaagacgacaaggtatttccaggtgggtctcatacctatgtgtggcaagtgctcaaagagaatggccctatggcaagcgatccgccgtgtttgacttacagctacctttcacacgttgacctcgtcaaggacctcaactccgggttgattggagccttgttggtatgcagggaaggatctcttgccaaagagaagacacagaccctggccaagtttatccttctctttgctgtgttcgatgagggcaaaagttggcatagcgaaacgaagaattccctcatgcaggatcgcgacgcagccagcgccagagcttggcccaagatgcacactgtgaacggatatgtcaataggacgcttcctggcttgattgggtgtcatcggaaaagtgtctactggcacgtgatcggaatggggacaacaccagaggtccactccatatttctcgaaggccataccttccttgttcgaaaccacagacaggcatccttggggatctctcccattacctttctcactgcccaaacgggtcttcgtgacttgggtcagttccttctcttttgccatatcccgtcacaccagcatgatggtatggaagcttatgtgaaagtcgacagttgtcctgaggagccacagttgcgcatgaagaataatgaagaagccgaggattacgacgacgatctcaccgattctgagatggacgtggtgaggtttgatgacgacaactctccctccatcattcaagctcggagcggggcgaagaaacaccccaagacttgggtccactatatagcggcggaagaggaggattgggattacgctcctcttgtattggcaccagatgaccgctcatacaaaagccagtacctcaacaacggaccgcagagaattggccggaagtataagaaagtgcgatttatggcctatacagacgaaacctttaagacaagggaggccatccagcatgagagtgggattttgggacctcttctttacggcgaagttggtgataccctcctcatcatcttcaagaatcaagcttctcgcccctataacatttacccacacgggatcactgacgttaggcctttgtatagcagaagacttcccaaaggcgtgaagcatctcaaagacttccccattttgccaggcgagatctttaagtacaaatggaccattacagtggaagatggaccgactaaatcggaccctcgatgccttacgcggtactattcctccttcgtgaattgggagagagatttggcaagcggactcataggaccactcctcatctgttacaaggaatctgtagaccagaggggtaaccagattatgagtgataaacgcaatgtgatcctttttagcgtcttcgacgagaaccggtcctggtacttgaccgagaatatacaaaggttccttcccaaccccgcaggcgttcagttggaagaccctgagtttcaggccagcaatattatgcactcaatcaacggctatgtgtttgatagtctccagctttctgtttgcctccatgaagtagcctattggtacatcttgtcaattggtgctcaaacagacttcctctccgtcttcttctccggctacacctttaagcacaagggcgtgtatgaggacactctcacactctttccattttctggagaaaccgtgttcatgagcatggagaatccaggcctttggatcttgggttgccacaacagtgattttcgcaatcggggaatgactgctctcctcaaagtcagcagctgtgattggaacacaggcgactatgaggaagattcttacgaggacataagtgcctactttgactccaagaataacgccattgagcccagatcattctcccagaatcctcccgtgcttaaaaggcatcagcgcgaaggtaccagaactactcttcagtctgatcaagaggagattgactatgacgacaccattagcgtggaaatgaagaaggaggatttcgatatctatgacgaagatgagaaccagtctccgcggagctttcagaagaagacgcgacactacttcattgcagcagtcgaaaggctttgggactacggtatgtcatcatcccctcatgtgttgcgcaatagagctcagagtggaagtgttccacagttcaagaaagtcgtctttcaagagtttacagatggcagcttcacacagcctctctatcggggcgagcttaacgaacatttgggactccttggtccctatatccgagccgaagtggaggacaacattatggttacctttaggaatcaagcctctcgcccctacagcttctactcctccctcatcagttatgaggaggatcagagacaaggcgctgaaccacggaagaactttgtgaaaccgaatgagacgaagacctacttctggaaagtacagcaccacatggcccccacaaaagacgaattcgattgcaaagcatgggcgtatttttcagacgttgacttggagaaagatgtacattcaggacttattggtcctttgttggtgtgtcacactaacactctcaatccagcccatggcaggcaggtgacagtccaggaattcgctcttttctttaccatctttgatgagaccaagtcctggtacttcacggaaaacatggagcgcaattgcagagccccctgtaacatacagatggaggaccctacctttaaggaaaattatcggttccacgcaatcaacggatacattatggatacactccctggccttgtgatggctcaggaccaacgaatcaggtggtacctcctcagcatgggttctaatgagaacatacactccattcacttttcaggacatgtgttcactgtccggaagggtgaagagtataagatggccctctacaatttgtatccaggcgtgtttgagaccgttgaaatgcttccctctaaagctggcatctggagagtagagtgcttgatcggagaacatcttcacgcaggtatgagcaccttgttcctcgtgtacagcaacaaatgtcagaatccacttggcatggccagtggacacattcgcgactttcagatcacagcatctggccagtatggacaatgggccccaaagttggctcgcctccattactccggtagcataaatgcgtggtccactaaagaacctttcagctggattaaggtcgatcttcttgcccccatgatcatccacggcattaagacacagggagcgaggcagaaattctcctccctctacatctcacagttcattattatgtatagtttggacggcaagaagtggcaaacttatagaggtaacagtactggaacagacatggtgttcttcggcaacgttgatagctctggcatcaaacacaacatctttaatcctcccataatagctcggtacatcagattgcatccgacccactacagcattaggagtacactccgaatggagcttatgggttgcgacttgaattcctgttcaatgccactcggaatggagtctaaagccatctctgatgcacagataaccgccagtagctactttacgaacatgtttgctacgtggtcaccctctaaggcaaggcttcatttgcaaggccggtctaatgcctggagacctcaggtgaacaacccgaaagaatggctccaggtggactttcagaagaccatgaaagtaacaggtgtcactactcagggagttaagtccttggatactagcatgtatgtgaaggagttccttatttcctcatcacaagatggccaccagtggaccctcttctttcagaatggtaaggtcaaagtgtttcagggcaatcaagacagcttcacacccgtggtgaacagtcttgatcctccactcttgacacgataccttcgaatccatccacagtcttgggagcaccagattgcattgcgcatggaagtacttggatgcgaggctcaggacctctac

SEQ ID NO: 2224 - protein, 1457 aa, synthetic construct
  REGION 1..1457: note = Variant of human B-domain deleted Factor VIII
MQIELSTCFFLCLLRFCFSATRRYYLGAVELSWDYMQSDLGELPVDARFPPRVPKSFPFNTSQVYKKTLFVEFTDHLFNIAKPRPPWMGLLGPTIQAEVYDTVVITLKNMASHPVSLHAVGVSYWKASEGAEYDDQTSQREKEDDKVFPGGSHTYVWQVLKENGPMASDPPCLTYSYLSHVDLVKDLNSGLIGALLVCREGSLAKEKTQTLAKFILLFAVFDEGKSWHSETKNSLMQDRDAASARAWPKMHTVNGYVNRTLPGLIGCHRKSVYWHVIGMGTTPEVHSIFLEGHTFLVRNHRQASLGISPITFLTAQTGLRDLGQFLLFCHIPSHQHDGMEAYVKVDSCPEEPQLRMKNNEEAEDYDDDLTDSEMDVVRFDDDNSPSIIQARSGAKKHPKTWVHYIAAEEEDWDYAPLVLAPDDRSYKSQYLNNGPQRIGRKYKKVRFMAYTDETFKTREAIQHESGILGPLLYGEVGDTLLIIFKNQASRPYNIYPHGITDVRPLYSRRLPKGVKHLKDFPILPGEIFKYKWTITVEDGPTKSDPRCLTRYYSSFVNWERDLASGLIGPLLICYKESVDQRGNQIMSDKRNVILFSVFDENRSWYLTENIQRFLPNPAGVQLEDPEFQASNIMHSINGYVFDSLQLSVCLHEVAYWYILSIGAQTDFLSVFFSGYTFKHKGVYEDTLTLFPFSGETVFMSMENPGLWILGCHNSDFRNRGMTALLKVSSCDWNTGDYEEDSYEDISAYFDSKNNAIEPRSFSQNPPVLKRHQREGTRTTLQSDQEEIDYDDTISVEMKKEDFDIYDEDENQSPRSFQKKTRHYFIAAVERLWDYGMSSSPHVLRNRAQSGSVPQFKKVVFQEFTDGSFTQPLYRGELNEHLGLLGPYIRAEVEDNIMVTFRNQASRPYSFYSSLISYEEDQRQGAEPRKNFVKPNETKTYFWKVQHHMAPTKDEFDCKAWAYFSDVDLEKDVHSGLIGPLLVCHTNTLNPAHGRQVTVQEFALFFTIFDETKSWYFTENMERNCRAPCNIQMEDPTFKENYRFHAINGYIMDTLPGLVMAQDQRIRWYLLSMGSNENIHSIHFSGHVFTVRKGEEYKMALYNLYPGVFETVEMLPSKAGIWRVECLIGEHLHAGMSTLFLVYSNKCQNPLGMASGHIRDFQITASGQYGQWAPKLARLHYSGSINAWSTKEPFSWIKVDLLAPMIIHGIKTQGARQKFSSLYISQFIIMYSLDGKKWQTYRGNSTGTDMVFFGNVDSSGIKHNIFNPPIIARYIRLHPTHYSIRSTLRMELMGCDLNSCSMPLGMESKAISDAQITASSYFTNMFATWSPSKARLHLQGRSNAWRPQVNNPKEWLQVDFQKTMKVTGVTTQGVKSLDTSMYVKEFLISSSQDGHQWTLFFQNGKVKVFQGNQDSFTPVVNSLDPPLLTRYLRIHPQSWEHQIALRMEVLGCEAQDLY

SEQ ID NO: 2225 - DNA, 4371 bp, synthetic construct
  misc_feature 1..4371: note = Variant of human B-domain deleted Factor VIII
  source 1..4371: mol_type = other DNA
atgcagattgaactgtctacctgcttcttcctctgtttgctgaggttctgctttagcgccactagacggtactaccttggcgctgtggagctgtcctgggactatatgcagagtgatttgggagagcttcccgtcgacgcacgatttcctcctcgcgttccaaagtcatttccctttaacacaagccaggtgtacaagaagacgctcttcgtcgaattcaccgatcacctgttcaatatcgccaaacccagaccaccatggatgggtcttttggggcctaccatacaagcggaggtgtatgacacagttgttatcactctcaagaacatggcttctcatccggtaagtcttcacgcagtgggcgtgtcctactggaaagcttcagaaggagccgagtatgatgatcagacatcccagagggagaaagaagacgacaaggtatttccaggtgggtctcatacctatgtgtggcaagtgctcaaagagaatggccctatggcaagcgatccgccgtgtttgacttacagctacctttcacacgttgacctcgtcaaggacctcaactccgggttgattggagccttgttggtatgcagggaaggatctcttgccaaagagaagacacagaccctggccaagtttatccttctctttgctgtgttcgatgagggcaaaagttggcatagcgaaacgaagaattccctcatgcaggatcgcgacgcagccagcgccagagcttggcccaagatgcacactgtgaacggatatgtcaataggacgcttcctggcttgattgggtgtcatcggaaaagtgtctactggcacgtgatcggaatggggacaacaccagaggtccactccatatttctcgaaggccataccttccttgttcgaaaccacagacaggcatccttggggatctctcccattacctttctcactgcccaaacgggtcttcgtgacttgggtcagttccttctcttttgccatatcccgtcacaccagcatgatggtatggaagcttatgtgaaagtcgacagttgtcctgaggagccacagttgcgcatgaagaataatgaagaagccgaggattacgacgacgatctcaccgattctgagatggacgtggtgaggtttgatgacgacaactctccctccatcattcaagctcggagcggggcgaagaaacaccccaagacttgggtccactatatagcggcggaagaggaggattgggattacgctcctcttgtattggcaccagatgaccgctcatacaaaagccagtacctcaacaacggaccgcagagaattggccggaagtataagaaagtgcgatttatggcctatacagacgaaacctttaagacaagggaggccatccagcatgagagtgggattttgggacctcttctttacggcgaagttggtgataccctcctcatcatcttcaagaatcaagcttctcgcccctataacatttacccacacgggatcactgacgttaggcctttgtatagcagaagacttcccaaaggcgtgaagcatctcaaagacttccccattttgccaggcgagatctttaagtacaaatggaccattacagtggaagatggaccgactaaatcggaccctcgatgccttacgcggtactattcctccttcgtgaattgggagagagatttggcaagcggactcataggaccactcctcatctgttacaaggaatctgtagaccagaggggtaaccagattatgagtgataaacgcaatgtgatcctttttagcgtcttcgacgagaaccggtcctggtacttgaccgagaatatacaaaggttccttcccaaccccgcaggcgttcagttggaagaccctgagtttcaggccagcaatattatgcactcaatcaacggctatgtgtttgatagtctccagctttctgtttgcctccatgaagtagcctattggtacatcttgtcaattggtgctcaaacagacttcctctccgtcttcttctccggctacacctttaagcacaagggggtgtatgaggacactctcacactctttccattttctggagaaaccgtgttcatgagcatggagaatccaggcctttggatcttgggttgccacaacagtgattttcgcaatcggggaatgactgctctcctcaaagtcagcagctgtgattggaacacaggcgactatgaggaagattcttacgaggacataagtgcctactttgactccaagaataacgccattgagcccagatcattctcccagaatcctcccgtgcttaaaaggcatcagcgcgaaggtaccagaactactcttcagtctgatcaagaggagattgactatgacgacaccattagcgtggaaatgaagaaggaggatttcgatatctatgacgaagatgagaaccagtctccgcggagctttcagaagaagacgcgacactacttcattgcagcagtcgaaaggctttgggactacggtatgtcatcatcccctcatgtgttgcgcaatagagctcagagtggaagtgttccacagttcaagaaagtcgtctttcaagagtttacagatggcagcttcacacagcctctctatcggggcgagcttaacgaacatttgggactccttggtccctatatccgagccgaagtggaggacaacattatggttacctttaggaatcaagcctctcgcccctacagcttctactcctccctcatcagttatgaggaggatcagagacaaggcgctgaaccacggaagaactttgtgaaaccgaatgagacgaagacctacttctggaaagtacagcaccacatggcccccacaaaagacgaattcgattgcaaagcatgggcgtatttttcagacgttgacttggagaaagatgtacattcaggacttattggtcctttgttggtgtgtcacactaacactctcaatccagcccatggcaggcaggtgacagtccaggaattcgctcttttctttaccatctttgatgagaccaagtcctggtacttcacggaaaacatggagcgcaattgcagagccccctgtaacatacagatggaggaccctacctttaaggaaaattatcggttccacgcaatcaacggatacattatggatacactccctggccttgtgatggctcaggaccaacgaatcaggtggtacctcctcagcatgggttctaatgagaacatacactccattcacttttcaggacatgtgttcactgtccggaagggtgaagagtataagatggccctctacaatttgtatccaggcgtgtttgagaccgttgaaatgcttcccatcaaagctggcatctggagagtagagtgcttgatcggagaacatcttcacgcaggtatgagcaccttgttcctcgtgtacagcaacaaatgtcagaatccacttggcatggccagtggacacattcgcgactttcagatcacagcatctggccagtatggacaatgggccccaaagttggctcgcctccattactccggtagcataaatgcgtggtccactaaagaacctttcagctggattaaggtcgatcttcttgcccccatgatcatccacggcattaagacacagggagcgaggcagaaattctcctccctctacatctcacagttcattattatgtatagtttggacggcaagaagtggcaaacttatagaggtaacagtactggaacagacatggtgttcttcggcaacgttgatagctctggcatcaaacacaacatctttaatcctcccataatagctcggtacatcagattgcatccgacccactacagcattaggagtacactccgaatggagcttatgggttgcgacttgaattcctgttcaatgccactcggaatggagtctaaagccatctctgatgcacagataaccgccagtagctactttacgaacatgtttgctacgtggtcaccctctaaggcaaggcttcatttgcaaggccggtctaatgcctggagacctcaggtgaacaacccgaaagaatggctccaggtggactttcagaagaccatgaaagtaacaggtgtcactactcagggagttaagtccttggatactagcatgtatgtgaaggagttccttatttcctcatcacaagatggccaccagtggaccctcttctttcagaatggtaaggtcaaagtgtttcagggcaatcaagacagcttcacacccgtggtgaacagtcttgatcctccactcttgacacgataccttcgaatccatccacagtcttgggagcaccagattgcattgcgcatggaagtacttggatgcgaggctcaggacctctac

SEQ ID NO: 2226 - protein, 1457 aa, synthetic construct
  REGION 1..1457: note = Variant of human B-domain deleted Factor VIII
MQIELSTCFFLCLLRFCFSATRRYYLGAVELSWDYMQSDLGELPVDARFPPRVPKSFPFNTSQVYKKTLFVEFTDHLFNIAKPRPPWMGLLGPTIQAEVYDTVVITLKNMASHPVSLHAVGVSYWKASEGAEYDDQTSQREKEDDKVFPGGSHTYVWQVLKENGPMASDPPCLTYSYLSHVDLVKDLNSGLIGALLVCREGSLAKEKTQTLAKFILLFAVFDEGKSWHSETKNSLMQDRDAASARAWPKMHTVNGYVNRTLPGLIGCHRKSVYWHVIGMGTTPEVHSIFLEGHTFLVRNHRQASLGISPITFLTAQTGLRDLGQFLLFCHIPSHQHDGMEAYVKVDSCPEEPQLRMKNNEEAEDYDDDLTDSEMDVVRFDDDNSPSIIQARSGAKKHPKTWVHYIAAEEEDWDYAPLVLAPDDRSYKSQYLNNGPQRIGRKYKKVRFMAYTDETFKTREAIQHESGILGPLLYGEVGDTLLIIFKNQASRPYNIYPHGITDVRPLYSRRLPKGVKHLKDFPILPGEIFKYKWTITVEDGPTKSDPRCLTRYYSSFVNWERDLASGLIGPLLICYKESVDQRGNQIMSDKRNVILFSVFDENRSWYLTENIQRFLPNPAGVQLEDPEFQASNIMHSINGYVFDSLQLSVCLHEVAYWYILSIGAQTDFLSVFFSGYTFKHKGVYEDTLTLFPFSGETVFMSMENPGLWILGCHNSDFRNRGMTALLKVSSCDWNTGDYEEDSYEDISAYFDSKNNAIEPRSFSQNPPVLKRHQREGTRTTLQSDQEEIDYDDTISVEMKKEDFDIYDEDENQSPRSFQKKTRHYFIAAVERLWDYGMSSSPHVLRNRAQSGSVPQFKKVVFQEFTDGSFTQPLYRGELNEHLGLLGPYIRAEVEDNIMVTFRNQASRPYSFYSSLISYEEDQRQGAEPRKNFVKPNETKTYFWKVQHHMAPTKDEFDCKAWAYFSDVDLEKDVHSGLIGPLLVCHTNTLNPAHGRQVTVQEFALFFTIFDETKSWYFTENMERNCRAPCNIQMEDPTFKENYRFHAINGYIMDTLPGLVMAQDQRIRWYLLSMGSNENIHSIHFSGHVFTVRKGEEYKMALYNLYPGVFETVEMLPIKAGIWRVECLIGEHLHAGMSTLFLVYSNKCQNPLGMASGHIRDFQITASGQYGQWAPKLARLHYSGSINAWSTKEPFSWIKVDLLAPMIIHGIKTQGARQKFSSLYISQFIIMYSLDGKKWQTYRGNSTGTDMVFFGNVDSSGIKHNIFNPPIIARYIRLHPTHYSIRSTLRMELMGCDLNSCSMPLGMESKAISDAQITASSYFTNMFATWSPSKARLHLQGRSNAWRPQVNNPKEWLQVDFQKTMKVTGVTTQGVKSLDTSMYVKEFLISSSQDGHQWTLFFQNGKVKVFQGNQDSFTPVVNSLDPPLLTRYLRIHPQSWEHQIALRMEVLGCEAQDLY

SEQ ID NO: 2227 - DNA, 4371 bp, synthetic construct
  misc_feature 1..4371: note = Variant of human B-domain deleted Factor VIII
  source 1..4371: mol_type = other DNA
atgcagattgaactgtctacctgcttcttcctctgtttgctgaggttctgctttagcgccactagacggtactaccttggcgctgtggagctgtcctgggactatatgcagagtgatttgggagagcttcccgtcgacgcacgatttcctcctcgcgttccaaagtcatttccctttaacacaagccaggtgtacaagaagacgctcttcgtcgaattcaccgatcacctgttcaatatcgccaaacccagaccaccatggatgggtcttttggggcctaccatacaagcggaggtgtatgacacagttgttatcactctcaagaacatggcttctcatccggtaagtcttcacgcagtgggcgtgtcctactggaaagcttcagaaggagccgagtatgatgatcagacatcccagagggagaaagaagacgacaaggtatttccaggtgggtctcatacctatgtgtggcaagtgctcaaagagaatggccctatggcaagcgatccgccgtgtttgacttacagctacctttcacacgttgacctcgtcaaggacctcaactccgggttgattggagccttgttggtatgcagggaaggatctcttgccaaagagaagacacagaccctggccaagtttatccttctctttgctgtgttcgatgagggcaaaagttggcatagcgaaacgaagaattccctcatgcaggatcgcgacgcagccagcgccagagcttggcccaagatgcacactgtgaacggatatgtcaataggacgcttcctggcttgattgggtgtcatcggaaaagtgtctactggcacgtgatcggaatggggacaacaccagaggtccactccatatttctcgaaggccataccttccttgttcgaaaccacagacaggcatccttggggatctctcccattacctttctcactgcccaaacgggtcttcgtgacttgggtcagttccttctcttttgccatatcccgtcacaccagcatgatggtatggaagcttatgtgaaagtcgacagttgtcctgaggagccacagttgcgcatgaagaataatgaagaagccgaggattacgacgacgatctcaccgattctgagatggacgtggtgaggtttgatgacgacaactctccctccatcattcaagctcggagcggggcgaagaaacaccccaagacttgggtccactatatagcggcggaagaggaggattgggattacgctcctcttgtattggcaccagatgaccgctcatacaaaagccagtacctcaacaacggaccgcagagaattggccggaagtataagaaagtgcgatttatggcctatacagacgaaacctttaagacaagggaggccatccagcatgagagtgggattttgggacctcttctttacggcgaagttggtgataccctcctcatcatcttcaagaatcaagcttctcgcccctataacatttacccacacgggatcactgacgttaggcctttgtatagcagaagacttcccaaaggcgtgaagcatctcaaagacttccccattttgccaggcgagatctttaagtacaaatggaccattacagtggaagatggaccgactaaatcggaccctcgatgccttacgcggtactattcctccttcgtgaattgggagagagatttggcaagcggactcataggaccactcctcatctgttacaaggaatctgtagaccagaggggtaaccagattatgagtgataaacgcaatgtgatcctttttagcgtcttcgacgagaaccggtcctggtacttgaccgagaatatacaaaggttccttcccaaccccgcaggcgttcagttggaagaccctgagtttcaggccagcaatattatgcactcaatcaacggctatgtgtttgatagtctccagctttctgtttgcctccatgaagtagcctattggtacatcttgtcaattggtgctcaaacagacttcctctccgtcttcttctccggctacacctttaagcacaagggcgtgtatgaggacactctcacactctttccattttctggagaaaccgtgttcatgagcatggagaatccaggcctttggatcttgggttgccacaacagtgattttcgcaatcggggaatgactgctctcctcaaagtcagcagctgtgattggaacacaggcgactatgaggaagattcttacgaggacataagtgcctactttgactccgaaaataacgccattgagcccagatcattctcccagaatcctcccgtgcttaaaaggcatcagcgcgaaggtaccagaactactcttcagtctgatcaagaggagattgactatgacgacaccattagcgtggaaatgaagaaggaggatttcgatatctatgacgaagatgagaaccagtctccgcggagctttcagaagaagacgcgacactacttcattgcagcagtcgaaaggctttgggactacggtatgtcatcatcccctcatgtgttgcgcaatagagctcagagtggaagtgttccacagttcaagaaagtcgtctttcaagagtttacagatggcagcttcacacagcctctctatcggggcgagcttaacgaacatttgggactccttggtccctatatccgagccgaagtggaggacaacattatggttacctttaggaatcaagcctctcgcccctacagcttctactcctccctcatcagttatgaggaggatcagagacaaggcgctgaaccacggaagaactttgtgaaaccgaatgagacgaagacctacttctggaaagtacagcaccacatggcccccacaaaagacgaattcgattgcaaagcatgggcgtatttttcagacgttgacttggagaaagatgtacattcaggacttattggtcctttgttggtgtgtcacactaacactctcaatccagcccatggcaggcaggtgacagtccaggaattcgctcttttctttaccatctttgatgagaccaagtcctggtacttcacggaaaacatggagcgcaattgcagagccccctgtaacatacagatggaggaccctacctttaaggaaaattatcggttccacgcaatcaacggatacattatggatacactccctggccttgtgatggctcaggaccaacgaatcaggtggtacctcctcagcatgggttctaatgagaacatacactccattcacttttcaggacatgtgttcactgtccggaagaaagaagagtataagatggccctctacaatttgtatccaggcgtgtttgagaccgttgaaatgcttccctctaaagctggcatctggagagtagagtgcttgatcggagaacatcttcacgcaggtatgagcaccttgttcctcgtgtacagcaacaaatgtcagaatccacttggcatggccagtggacacattcgcgactttcagatcacagcatctggccagtatggacaatgggccccaaagttggctcgcctccattactccggtagcataaatgcgtggtccactaaagaacctttcagctggattaaggtcgatcttcttgcccccatgatcatccacggcattaagacacagggagcgaggcagaaattctcctccctctacatctcacagttcattattatgtatagtttggacggcaagaagtggcaaacttatagaggtaacagtactggaacagacatggtgttcttcggcaacgttgatagctctggcatcaaacacaacatctttaatcctcccataatagctcggtacatcagattgcatccgacccactacagcattaggagtacactccgaatggagcttatgggttgcgacttgaattcctgttcaatgccactcggaatggagtctaaagccatctctgatgcacagataaccgccagtagctactttacgaacatgtttgctacgtggtcaccctctaaggcaaggcttcatttgcaaggccggtctaatgcctggagacctcaggtgaacaacccgaaagaatggctccaggtggactttcagaagaccatgaaagtaacaggtgtcactactcagggagttaagtccttggatactagcatgtatgtgaaggagttccttatttcctcatcacaagatggccaccagtggaccctcttctttcagaatggtaaggtcaaagtgtttcagggcaatcaagacagcttcacacccgtggtgaacagtcttgatcctccactcttgacacgataccttcgaatccatccacagtcttgggagcaccagattgcattgcgcatggaagtacttggatgcgaggctcaggacctctac

SEQ ID NO: 2228 - protein, 1457 aa, synthetic construct
  REGION 1..1457: note = Variant of human B-domain deleted Factor VIII
MQIELSTCFFLCLLRFCFSATRRYYLGAVELSWDYMQSDLGELPVDARFPPRVPKSFPFNTSQVYKKTLFVEFTDHLFNIAKPRPPWMGLLGPTIQAEVYDTVVITLKNMASHPVSLHAVGVSYWKASEGAEYDDQTSQREKEDDKVFPGGSHTYVWQVLKENGPMASDPPCLTYSYLSHVDLVKDLNSGLIGALLVCREGSLAKEKTQTLAKFILLFAVFDEGKSWHSETKNSLMQDRDAASARAWPKMHTVNGYVNRTLPGLIGCHRKSVYWHVIGMGTTPEVHSIFLEGHTFLVRNHRQASLGISPITFLTAQTGLRDLGQFLLFCHIPSHQHDGMEAYVKVDSCPEEPQLRMKNNEEAEDYDDDLTDSEMDVVRFDDDNSPSIIQARSGAKKHPKTWVHYIAAEEEDWDYAPLVLAPDDRSYKSQYLNNGPQRIGRKYKKVRFMAYTDETFKTREAIQHESGILGPLLYGEVGDTLLIIFKNQASRPYNIYPHGITDVRPLYSRRLPKGVKHLKDFPILPGEIFKYKWTITVEDGPTKSDPRCLTRYYSSFVNWERDLASGLIGPLLICYKESVDQRGNQIMSDKRNVILFSVFDENRSWYLTENIQRFLPNPAGVQLEDPEFQASNIMHSINGYVFDSLQLSVCLHEVAYWYILSIGAQTDFLSVFFSGYTFKHKGVYEDTLTLFPFSGETVFMSMENPGLWILGCHNSDFRNRGMTALLKVSSCDWNTGDYEEDSYEDISAYFDSENNAIEPRSFSQNPPVLKRHQREGTRTTLQSDQEEIDYDDTISVEMKKEDFDIYDEDENQSPRSFQKKTRHYFIAAVERLWDYGMSSSPHVLRNRAQSGSVPQFKKVVFQEFTDGSFTQPLYRGELNEHLGLLGPYIRAEVEDNIMVTFRNQASRPYSFYSSLISYEEDQRQGAEPRKNFVKPNETKTYFWKVQHHMAPTKDEFDCKAWAYFSDVDLEKDVHSGLIGPLLVCHTNTLNPAHGRQVTVQEFALFFTIFDETKSWYFTENMERNCRAPCNIQMEDPTFKENYRFHAINGYIMDTLPGLVMAQDQRIRWYLLSMGSNENIHSIHFSGHVFTVRKKEEYKMALYNLYPGVFETVEMLPSKAGIWRVECLIGEHLHAGMSTLFLVYSNKCQNPLGMASGHIRDFQITASGQYGQWAPKLARLHYSGSINAWSTKEPFSWIKVDLLAPMIIHGIKTQGARQKFSSLYISQFIIMYSLDGKKWQTYRGNSTGTDMVFFGNVDSSGIKHNIFNPPIIARYIRLHPTHYSIRSTLRMELMGCDLNSCSMPLGMESKAISDAQITASSYFTNMFATWSPSKARLHLQGRSNAWRPQVNNPKEWLQVDFQKTMKVTGVTTQGVKSLDTSMYVKEFLISSSQDGHQWTLFFQNGKVKVFQGNQDSFTPVVNSLDPPLLTRYLRIHPQSWEHQIALRMEVLGCEAQDLY

SEQ ID NO: 2229 - DNA, 4371 bp, synthetic construct
  misc_feature 1..4371: note = Variant of human B-domain deleted Factor VIII
  source 1..4371: mol_type = other DNA
atgcagattgaactgtctacctgcttcttcctctgtttgctgaggttctgctttagcgccactagacggtactaccttggcgctgtggagctgtcctgggactatatgcagagtgatttgggagagcttcccgtcgacgcacgatttcctcctcgcgttccaaagtcatttccctttaacacaagccaggtgtacaagaagacgctcttcgtcgaattcaccgatcacctgttcaatatcgccaaacccagaccaccatggatgggtcttttggggcctaccatacaagcggaggtgtatgacacagttgttatcactctcaagaacatggcttctcatccggtaagtcttcacgcagtgggcgtgtcctactggaaagcttcagaaggagccgagtatgatgatcagacatcccagagggagaaagaagacgacaaggtatttccaggtgggtctcatacctatgtgtggcaagtgctcaaagagaatggccctatggcaagcgatccgccgtgtttgacttacagctacctttcacacgttgacctcgtcaaggacctcaactccgggttgattggagccttgttggtatgcagggaaggatctcttgccaaagagaagacacagaccctggccaagtttatccttctctttgctgtgttcgatgagggcaaaagttggcatagcgaaacgaagaattccctcatgcaggatcgcgacgcagccagcgccagagcttggcccaagatgcacactgtgaacggatatgtcaataggacgcttcctggcttgattgggtgtcatcggaaaagtgtctactggcacgtgatcggaatggggacaacaccagaggtccactccatatttctcgaaggccataccttccttgttcgaaaccacagacaggcatccttggggatctctcccattacctttctcactgcccaaacgggtcttcgtgacttgggtcagttccttctcttttgccatatcccgtcacaccagcatgatggtatggaagcttatgtgaaagtcgacagttgtcctgaggagccacagttgcgcatgaagaataatgaagaagccgaggattacgacgacgatctcaccgattctgagatggacgtggtgaggtttgatgacgacaactctccctccatcattcaagctcggagcggggcgaagaaacaccccaagacttgggtccactatatagcggcggaagaggaggattgggattacgctcctcttgtattggcaccagatgaccgctcatacaaaagccagtacctcaacaacggaccgcagagaattggccggaagtataagaaagtgcgatttatggcctatacagacgaaacctttaagacaagggaggccatccagcatgagagtgggattttgggacctcttctttacggcgaagttggtgataccctcctcatcatcttcaagaatcaagcttctcgcccctataacatttacccacacgggatcactgacgttaggcctttgtatagcagaagacttcccaaaggcgtgaagcatctcaaagacttccccattttgccaggcgagatctttaagtacaaatggaccattacagtggaagatggaccgactaaatcagaccctcgatgccttacgcggtactattcctccttcgtgaattgggagagagatttggcaagcggactcataggaccactcctcatctgttacaaggaatctgtagaccagaggggtaaccagattatgagtgataaacgcaatgtgatcctttttagcgtcttcgacgagaaccggtcctggtacttgaccgagaatatacaaaggttccttcccaaccccgcaggcgttcagttggaagaccctgagtttcaggccagcaatattatgcactcaatcaacggctatgtgtttgatagtctccagctttctgtttgcctccatgaagtagcctattggtacatcttgtcaattggtgctcaaacagacttcctctccgtcttcttctccggctacacctttaagcacaagggcgtgtatgaggacactctcacactctttccattttctggagaaaccgtgttcatgagcatggagaatccaggcctttggatcttgggttgccacaacagtgattttcgcaatcggggaatgactgctctcctcaaagtcagcagctgtgattggaacacaggcgactatgaggaagattcttacgaggacataagtgcctactttgactccgagaataacgccattgagcccagatcattctcccagaatcctcccgtgcttaaaaggcatcagcgcgaaggtaccagaactactcttcagtctgatcaagaggagattgactatgacgacaccattagcgtggaaatgaagaaggaggatttcgatatctatgacgaagatgagaaccagtctccgcggagctttcagaagaagacgcgacactacttcattgcagcagtcgaaaggctttgggactacggtatgtcatcatcccctcatgtgttgcgcaatagagctcagagtggaagtgttccacagttcaagaaagtcgtctttcaagagtttacagatggcagcttcacacagcctctctatcggggcgagcttaacgaacatttgggactccttggtccctatatccgagccgaagtggaggacaacattatggttacctttaggaatcaagcctctcgcccctacagcttctactcctccctcatcagttatgaggaggatcagagacaaggcgctgaaccacggaagaactttgtgaaaccgaatgagacgaagacctacttctggaaagtacagcaccacatggcccccacaaaagacgaattcgattgcaaagcatgggcgtatttttcagacgttgacttggagaaagatgtacattcaggacttattggtcctttgttggtgtgtcacactaacactctcaatccagcccatggcaggcaggtgacagtccaggaattcgctcttttctttaccatctttgatgagaccaagtcctggtacttcacggaaaacatggagcgcaattgcagagccccctgtaacatacagatggaggaccctacctttaaggaaaattatcggttccacgcaatcaacggatacattatggatacactccctggccttgtgatggctcaggaccaacgaatcaggtggtacctcctcagcatgggttctaatagtaacatacactccattcacttttcaggacatgtgttcactgtccggaagaaagaagagtataagatggccctctacaatttgtatccaggcgtgtttgagaccgttgaaatgcttccctctaaagctggcatctggagagtagagtgcttgatcggagaacatcttcacgcaggtatgagcaccttgttcctcgtgtacagcaacaaatgtcagaatccacttggcatggccagtggacacattcgcgactttcagatcacagcatctggccagtatggacaatgggccccaaagttggctcgcctccattactccggtagcataaatgcgtggtccactaaagaacctttcagctggattaaggtcgatcttcttgcccccatgatcatccacggcattaagacacagggagcgaggcagaaattctcctccctctacatctcacagttcattattatgtatagtttggacggcaagaagtggcaaacttatagaggtaacagtactggaacagacatggtgttcttcggcaacgttgatagctctggcatcaaacacaacatctttaatcctcccataatagctcggtacatcagattgcatccgacccactacagcattaggagtacactccgaatggagcttatgggttgcgacttgaattcctgttcaatgccactcggaatggagtctaaagccatctctgatgcacagataaccgccagtagctactttacgaacatgtttgctacgtggtcaccctctaaggcaaggcttcatttgcaaggccggtctaatgcctggagacctcaggtgaacaacccgaaagaatggctccaggtggactttcagaagaccatgaaagtaacaggtgtcactactcagggagttaagtccttggatactagcatgtatgtgaaggagttccttatttcctcatcacaagatggccaccagtggaccctcttctttcagaatggtaaggtcaaagtgtttcagggcaatcaagacagcttcacacccgtggtgaacagtcttgatcctccactcttgacacgataccttcgaatccatccacagtcttgggagcaccagattgcattgcgcatggaagtacttggatgcgaggctcaggacctctac

SEQ ID NO: 2230 - protein, 1457 aa, synthetic construct
  REGION 1..1457: note = Variant of human B-domain deleted Factor VIII
MQIELSTCFFLCLLRFCFSATRRYYLGAVELSWDYMQSDLGELPVDARFPPRVPKSFPFNTSQVYKKTLFVEFTDHLFNIAKPRPPWMGLLGPTIQAEVYDTVVITLKNMASHPVSLHAVGVSYWKASEGAEYDDQTSQREKEDDKVFPGGSHTYVWQVLKENGPMASDPPCLTYSYLSHVDLVKDLNSGLIGALLVCREGSLAKEKTQTLAKFILLFAVFDEGKSWHSETKNSLMQDRDAASARAWPKMHTVNGYVNRTLPGLIGCHRKSVYWHVIGMGTTPEVHSIFLEGHTFLVRNHRQASLGISPITFLTAQTGLRDLGQFLLFCHIPSHQHDGMEAYVKVDSCPEEPQLRMKNNEEAEDYDDDLTDSEMDVVRFDDDNSPSIIQARSGAKKHPKTWVHYIAAEEEDWDYAPLVLAPDDRSYKSQYLNNGPQRIGRKYKKVRFMAYTDETFKTREAIQHESGILGPLLYGEVGDTLLIIFKNQASRPYNIYPHGITDVRPLYSRRLPKGVKHLKDFPILPGEIFKYKWTITVEDGPTKSDPRCLTRYYSSFVNWERDLASGLIGPLLICYKESVDQRGNQIMSDKRNVILFSVFDENRSWYLTENIQRFLPNPAGVQLEDPEFQASNIMHSINGYVFDSLQLSVCLHEVAYWYILSIGAQTDFLSVFFSGYTFKHKGVYEDTLTLFPFSGETVFMSMENPGLWILGCHNSDFRNRGMTALLKVSSCDWNTGDYEEDSYEDISAYFDSENNAIEPRSFSQNPPVLKRHQREGTRTTLQSDQEEIDYDDTISVEMKKEDFDIYDEDENQSPRSFQKKTRHYFIAAVERLWDYGMSSSPHVLRNRAQSGSVPQFKKVVFQEFTDGSFTQPLYRGELNEHLGLLGPYIRAEVEDNIMVTFRNQASRPYSFYSSLISYEEDQRQGAEPRKNFVKPNETKTYFWKVQHHMAPTKDEFDCKAWAYFSDVDLEKDVHSGLIGPLLVCHTNTLNPAHGRQVTVQEFALFFTIFDETKSWYFTENMERNCRAPCNIQMEDPTFKENYRFHAINGYIMDTLPGLVMAQDQRIRWYLLSMGSNSNIHSIHFSGHVFTVRKKEEYKMALYNLYPGVFETVEMLPSKAGIWRVECLIGEHLHAGMSTLFLVYSNKCQNPLGMASGHIRDFQITASGQYGQWAPKLARLHYSGSINAWSTKEPFSWIKVDLLAPMIIHGIKTQGARQKFSSLYISQFIIMYSLDGKKWQTYRGNSTGTDMVFFGNVDSSGIKHNIFNPPIIARYIRLHPTHYSIRSTLRMELMGCDLNSCSMPLGMESKAISDAQITASSYFTNMFATWSPSKARLHLQGRSNAWRPQVNNPKEWLQVDFQKTMKVTGVTTQGVKSLDTSMYVKEFLISSSQDGHQWTLFFQNGKVKVFQGNQDSFTPVVNSLDPPLLTRYLRIHPQSWEHQIALRMEVLGCEAQDLY

SEQ ID NO: 2231 - DNA, 4371 bp, synthetic construct
  misc_feature 1..4371: note = Variant of human B-domain deleted Factor VIII
  source 1..4371: mol_type = other DNA
atgcagattgaactgtctacctgcttcttcctctgtttgctgaggttctgctttagcgccactagacggtactaccttggcgctgtggagctgtcctgggactatatgcagagtgatttgggagagcttcccgtcgacgcacgatttcctcctcgcgttccaaagtcatttccctttaacacaagccaggtgtacaagaagacgctcttcgtcgaattcaccgatcacctgttcaatatcgccaaacccagaccaccatggatgggtcttttggggcctaccatacaagcggaggtgtatgacacagttgttatcactctcaagaacatggcttctcatccggtaagtcttcacgcagtgggcgtgtcctactggaaagcttcagaaggagccgagtatgatgatcagacatcccagagggagaaagaagacgacaaggtatttccaggtgggtctcatacctatgtgtggcaagtgctcaaagagaatggccctatggcaagcgatccgccgtgtttgacttacagctacctgtcacacgttgacctcgtcaaggacctcaactccgggttgattggagccttgttggtatgcagggaaggatctcttgccaaagagaagacacagaccctggccaagtttatccttctctttgctgtgttcgatgagggcaaaagttggcatagcgaaacgaagaattccctcatgcaggatcgcgacgcagccagcgccagagcttggcccaagatgcacactgtgaacggatatgtcaataggacgcttcctggcttgattgggtgtcatcggaaaagtgtctactggcacgtgatcggaatggggacaacaccagaggtccactccatatttctcgaaggccataccttccttgttcgaaaccacagacaggcatccttggggatctctcccattacctttctcactgcccaaacgggtcttcgtgacttgggtcagttccttctcttttgccatatcccgtcacaccagcatgatggtatggaagcttatgtgaaagtcgacagttgtcctgaggagccacagttgcgcatgaagaataatgaagaagccgaggattacgacgacgatctcaccgattctgagatggacgtggtgaggtttgatgacgacaactctccctccatcattcaagctcggagcggggcgaagaaacaccccaagacttgggtccactatatagcggcggaagaggaggattgggattacgctcctcttgtattggcaccagatgaccgctcatacaaaagccagtacctcaacaacggaccgcagagaattggccggaagtataagaaagtgcgatttatggcctatacagacgaaacctttaagacaagggaggccatccagcatgagagtgggattttgggacctcttctttacggcgaagttggtgataccctcctcatcatcttcaagaatcaagcttctcgcccctataacatttacccacacgggatcactgacgttaggcctttgtatagcagaagacttcccaaaggcgtgaagcatctcaaagacttccccattttgccaggcgagatctttaagtacaaatggaccattacagtggaagatggaccgactaaatcggaccctcgatgccttacgcggtactattcctccttcgtgaattgggagagagatttggcaagcggactcataggaccactcctcatctgttacaaggaatctgtagaccagaggggtaaccagattatgagtgataaacgcaatgtgatcctttttagcgtcttcgacgagaaccggtcctggtacttgaccgagaatatacaaaggttccttcccaaccccgcaggcgttcagttggaagaccctgagtttcaggccagcaatattatgcactcaatcaacggctatgtgtttgatagtctccagctttctgtttgcctccatgaagtagcctattggtacatcttgtcaattggtgctcaaacagacttcctctccgtcttcttctccggctacacctttaagcacaagggcgtgtatgaggacactctcacactctttccattttctggagaaaccgtgttcatgagtatggagaatccaggcctttggatcttgggttgccacaacagtgattttcgcaatcggggaatgactgctctcctcaaagtcagcagctgtgattggaacacaggcgactatgaggaagattcttacgaggacataagtgcctactttgactccgagaataacgccattgagcccagatcattctcccagaatcctcccgtgcttaaaaggcatcagcgcgaaggtaccagaactactcttcagtctgatcaagaggagattgactatgacgacaccattagcgtggaaatgaagaaggtagatttcgatatctacgacgaggacgggaaccagtctccgcggagctttcagaagaagacgcgacactacttcattgcagcagtcgaaaggctttgggactacggtatgtcatcatcccctcatgtgttgcgcaatagagctcagagtggaagtgttccacagttcaagaaagtcgtctttcaagagtttacagatggcagcttcacacagcctctctatcggggcgagcttaacgaacatttgggactccttggtccctatatccgagccgaagtggaggacaacattatggttacctttaggaatcaagcctctcgcccctacagcttctactcctccctcatcagttatgaggaggatcagagacaaggcgctgaaccacggaagaactttgtgaaaccgaatgagacgaagacctacttctggaaagtacagcaccacatggcccccacaaaagacgaattcgattgcaaagcatgggcgtatttttcagacgttgacttggagaaagatgtacattcaggacttattggtcctttgttggtgtgtcacactaacactctcaatccagcccatggcaggcaggtgacagtccaggaattcgctcttttctttaccatctttgatgagaccaagtcctggtacttcacggaaaacatggagcgcaattgcagagccccctgtaacatacagatggaggaccctacctttaaggaaaattatcggttccacgcaatcaacggatacattatggatacactccctggccttgtgatggctcaggaccaacgaatcaggtggtacctcctcagcatgggttctaatgagaacatacactccattcacttttcaggacatgtgttcactgtccggaagaaagaagagtataagatggccctctacaatttgtatccaggcgtgtttgagaccgttgaaatgcttccctctaaagctggcatctggagagtagagtgcttgatcggagaacatcttcacgcaggtatgagcaccttgttcctcgtgtacagcaacaaatgtcagaatccacttggcatggccagtggacacattcgcgactttcagatcacagcatctggccagtatggacaatgggccccaaagttggctcgcctccattactccggtagcataaatgcgtggtccactaaagaacctttcagctggattaaggtcgatcttcttgcccccatgatcatccacggcattaagacacagggagcgaggcagaaattctcctccctctacatctcacagttcattattatgtatagtttggacggcaagaagtggcaaacttatagaggtaacagtactggaacagacatggtgttcttcggcaacgttgatagctctggcatcaaacacaacatctttaatcctcccataatagctcggtacatcagattgcatccgacccactacagcattaggagtacactccgaatggagcttatgggttgcgacttgaattcctgttcaatgccactcggaatggagtctaaagccatctctgatgcacagataaccgccagtagctactttacgaacatgtttgctacgtggtcaccctctaaggcaaggcttcatttgcaaggccggtctaatgcctggagacctcaggtgaacaacccgaaagaatggctccaggtggactttcagaagaccatgaaagtaacaggtgtcactactcagggagttaagtccttggatactagcatgtatgtgaaggagttccttatttcctcatcacaagatggccaccagtggaccctcttctttcagaatggtaaggtcaaagtgtttcagggcaatcaagacagcttcacacccgtggtgaacagtcttgatcctccactcttgacacgataccttcgaatccatccacagtcttgggagcaccagattgcattgcgcatggaagtacttggatgcgaggctcaggacctctac

SEQ ID NO: 2232 - protein, 1457 aa, synthetic construct
  REGION 1..1457: note = Variant of human B-domain deleted Factor VIII
MQIELSTCFFLCLLRFCFSATRRYYLGAVELSWDYMQSDLGELPVDARFPPRVPKSFPFNTSQVYKKTLFVEFTDHLFNIAKPRPPWMGLLGPTIQAEVYDTVVITLKNMASHPVSLHAVGVSYWKASEGAEYDDQTSQREKEDDKVFPGGSHTYVWQVLKENGPMASDPPCLTYSYLSHVDLVKDLNSGLIGALLVCREGSLAKEKTQTLAKFILLFAVFDEGKSWHSETKNSLMQDRDAASARAWPKMHTVNGYVNRTLPGLIGCHRKSVYWHVIGMGTTPEVHSIFLEGHTFLVRNHRQASLGISPITFLTAQTGLRDLGQFLLFCHIPSHQHDGMEAYVKVDSCPEEPQLRMKNNEEAEDYDDDLTDSEMDVVRFDDDNSPSIIQARSGAKKHPKTWVHYIAAEEEDWDYAPLVLAPDDRSYKSQYLNNGPQRIGRKYKKVRFMAYTDETFKTREAIQHESGILGPLLYGEVGDTLLIIFKNQASRPYNIYPHGITDVRPLYSRRLPKGVKHLKDFPILPGEIFKYKWTITVEDGPTKSDPRCLTRYYSSFVNWERDLASGLIGPLLICYKESVDQRGNQIMSDKRNVILFSVFDENRSWYLTENIQRFLPNPAGVQLEDPEFQASNIMHSINGYVFDSLQLSVCLHEVAYWYILSIGAQTDFLSVFFSGYTFKHKGVYEDTLTLFPFSGETVFMSMENPGLWILGCHNSDFRNRGMTALLKVSSCDWNTGDYEEDSYEDISAYFDSENNAIEPRSFSQNPPVLKRHQREGTRTTLQSDQEEIDYDDTISVEMKKVDFDIYDEDGNQSPRSFQKKTRHYFIAAVERLWDYGMSSSPHVLRNRAQSGSVPQFKKVVFQEFTDGSFTQPLYRGELNEHLGLLGPYIRAEVEDNIMVTFRNQASRPYSFYSSLISYEEDQRQGAEPRKNFVKPNETKTYFWKVQHHMAPTKDEFDCKAWAYFSDVDLEKDVHSGLIGPLLVCHTNTLNPAHGRQVTVQEFALFFTIFDETKSWYFTENMERNCRAPCNIQMEDPTFKENYRFHAINGYIMDTLPGLVMAQDQRIRWYLLSMGSNENIHSIHFSGHVFTVRKKEEYKMALYNLYPGVFETVEMLPSKAGIWRVECLIGEHLHAGMSTLFLVYSNKCQNPLGMASGHIRDFQITASGQYGQWAPKLARLHYSGSINAWSTKEPFSWIKVDLLAPMIIHGIKTQGARQKFSSLYISQFIIMYSLDGKKWQTYRGNSTGTDMVFFGNVDSSGIKHNIFNPPIIARYIRLHPTHYSIRSTLRMELMGCDLNSCSMPLGMESKAISDAQITASSYFTNMFATWSPSKARLHLQGRSNAWRPQVNNPKEWLQVDFQKTMKVTGVTTQGVKSLDTSMYVKEFLISSSQDGHQWTLFFQNGKVKVFQGNQDSFTPVVNSLDPPLLTRYLRIHPQSWEHQIALRMEVLGCEAQDLY

SEQ ID NO: 2233 - DNA, 4371 bp, synthetic construct
  misc_feature 1..4371: note = Variant of human B-domain deleted Factor VIII
  source 1..4371: mol_type = other DNA
atgcagattgaactgtctacctgcttcttcctctgtttgctgaggttctgctttagcgccactagacggtactaccttggcgctgtggagctgtcctgggactatatgcagagtgatttgggagagcttcccgtcgacgcacgatttcctcctcgcgttccaaagtcatttccctttaacacaagccaggtgtacaagaagacgctcttcgtcgaattcaccgatcacctgttcaatatcgccaaacccagaccaccatggatgggtcttttggggcctaccatacaagcggaggtgtatgacacagttgttatcactctcaagaacatggcttctcatccggtaagtcttcacgcagtgggcgtgtcctactggaaagcttcagaaggagccgagtatgatgatcagacatcccagagggagaaagaagacgacaaggtatttccaggtgggtctcatacctatgtgtggcaagtgctcaaagagaatggccctatggcaagcgatccgccgtgtttgacttacagctacctttcacacgttgacctcgtcaaggacctcaactccgggttgattggagccttgttggtatgcagggaaggatctcttgccaaagagaagacacagaccctggccaagtttatccttctctttgctgtgttcgatgagggcaaaagttggcatagcgaaacgaagaattccctcatgcaggatcgcgacgcagccagcgccagagcttggcccaagatgcacactgtgaacggatatgtcaataggacgcttcctggcttgattgggtgtcatcggaaaagtgtctactggcacgtgatcggaatggggacaacaccagaggtccactccatatttctcgaaggccataccttccttgttcgaaaccacagacaggcatccttggggatctctcccattacctttctcactgcccaaacgggtcttcgtgacttgggtcagttccttctcttttgccatatcccgtcacaccagcatgatggtatggaagcttatgtgaaagtcgacagttgtcctgaggagccacagttgcgcatgaagaataatgaagaagccgaggattacgacgacgatctcaccgattctgagatggacgtggtgaggtttgatgacgacaactctccctccatcattcaagctcggagcggggcgaagaaacaccccaagacttgggtccactatatagcggcggaagaggaggattgggattacgctcctcttgtattggcaccagatgaccgctcatacaaaagccagtacctcaacaacggaccgcagagaattggccggaagtataagaaagtgcgatttatggcctatacagacgaaacctttaagacaagggaggccatccagcatgagagtgggattttgggacctcttctttacggcgaagttggtgataccctcctcatcatcttcaagaatcaagcttctcgcccctataacatttacccacacgggatcactgacgttaggcctttgtatagcagaagacttcccaaaggcgtgaagcatctcaaagacttccccattttgccaggcgagatctttaagtacaaatggaccattacagtggaagatggaccgactaaatcggaccctcgatgccttacgcggtactattcctccttcgtgaattgggagagagatttggcaagcggactcataggaccactcctcatctgttacaaggaatctgtagaccagaggggtaaccagattatgagtgataaacgcaatgtgatcctttttagcgtcttcgacgagaaccggtcctggtacttgaccgagaatatacaaaggttccttcccaaccccgcaggcgttcagttggaagaccctgagtttcaggccagcaatattatgcactcaatcaacggctatgtgtttgatagtctccagctttctgtttgcctccatgaagtagcctattggtacatcttgtcaattggtgctcaaacagacttcctctccgtcttcttctccggctacacctttaagcacaagggggtgtatgaggacactctcacactctttccattttctggagaaaccgtgttcatgagcatggagaatccaggcctttggatcttgggttgccacaacagtgattttcgcaatcggggaatgactgctctcctcaaagtcagcagctgtgattggaacacaggcgactatgaggaagattcttacgaggacataagtgcctactttgactccgaaaataacgccattgagcccagatcattctcccagaatcctcccgtgcttaaaaggcatcagcgcgaaggtaccagaactactcttcagtctgatcaagaggagattgactatgacgacaccattagcgtggaaatgaagaaggtggatttcgatatctatgacgaggatgagaaccagtctccgcggagctttcagaagaagacgcgacactacttcattgcagcagtcgaaaggctttgggactacggtatgtcatcatcccctcatgtgttgcgcaatagagctcagagtggaagtgttccacagttcaagaaagtcgtctttcaagagtttacagatggcagcttcacacagcctctctatcggggcgagcttaacgaacatttgggactccttggtccctatatccgagccgaagtggaggacaacattatggttacctttaggaatcaagcctctcgcccctacagcttctactcctccctcatcagttatgaggaggatcagagacaaggcgctgaaccacggaagaactttgtgaaaccgaatgagacgaagacctacttctggaaagtacagcaccacatggcccccacaaaagacgaattcgattgcaaagcatgggcgtatttttcagacgttgacttggagaaagatgtacattcaggacttattggtcctttgttggtgtgtcacactaacactctcaatccagcccatggcaggcaggtgacagtccaggaattcgctcttttctttaccatctttgatgagaccaagtcctggtacttcacggaaaacatggagcgcaattgcagagccccctgtaacatacagatggaggaccctacctttaaggaaaattatcggttccacgcaatcaacggatacattatggatacactccctggccttgtgatggctcaggaccaacgaatcaggtggtacctcctcagcatgggttctaatgagaacatacactccattcacttttcaggacatgtgttcactgtccggaagggtgaagagtataagatggccctctacaatttgtatccaggcgtgtttgagaccgttgaaatgcttccctctaaagctggcatctggagagtagagtgcttgatcggagaacatcttcacgcaggtatgagcaccttgttcctcgtgtacagcaacaaatgtcagaatccacttggcatggccagtggacacattcgcgactttcagatcacagcatctggccagtatggacaatgggccccaaagttggctcgcctccattactccggtagcataaatgcgtggtccactaaagaacctttcagctggattaaggtcgatcttcttgcccccatgatcatccacggcattaagacacagggagcgaggcagaaattctcctccctctacatctcacagttcattattatgtatagtttggacggcaagaagtggcaaacttatagaggtaacagtactggaacagacatggtgttcttcggcaacgttgatagctctggcatcaaacacaacatctttaatcctcccataatagctcggtacatcagattgcatccgacccactacagcattaggagtacactccgaatggagcttatgggttgcgacttgaattcctgttcaatgccactcggaatggagtctaaagccatctctgatgcacagataaccgccagtagctactttacgaacatgtttgctacgtggtcaccctctaaggcaaggcttcatttgcaaggccggtctaatgcctggagacctcaggtgaacaacccgaaagaatggctccaggtggactttcagaagaccatgaaagtaacaggtgtcactactcagggagttaagtccttggatactagcatgtatgtgaaggagttccttatttcctcatcacaagatggccaccagtggaccctcttctttcagaatggtaaggtcaaagtgtttcagggcaatcaagacagcttcacacccgtggtgaacagtcttgatcctccactcttgacacgataccttcgaatccatccacagtcttgggagcaccagattgcattgcgcatggaagtacttggatgcgaggctcaggacctctac

SEQ ID NO: 2234 - protein, 1457 aa, synthetic construct
  REGION 1..1457: note = Variant of human B-domain deleted Factor VIII
MQIELSTCFFLCLLRFCFSATRRYYLGAVELSWDYMQSDLGELPVDARFPPRVPKSFPFNTSQVYKKTLFVEFTDHLFNIAKPRPPWMGLLGPTIQAEVYDTVVITLKNMASHPVSLHAVGVSYWKASEGAEYDDQTSQREKEDDKVFPGGSHTYVWQVLKENGPMASDPPCLTYSYLSHVDLVKDLNSGLIGALLVCREGSLAKEKTQTLAKFILLFAVFDEGKSWHSETKNSLMQDRDAASARAWPKMHTVNGYVNRTLPGLIGCHRKSVYWHVIGMGTTPEVHSIFLEGHTFLVRNHRQASLGISPITFLTAQTGLRDLGQFLLFCHIPSHQHDGMEAYVKVDSCPEEPQLRMKNNEEAEDYDDDLTDSEMDVVRFDDDNSPSIIQARSGAKKHPKTWVHYIAAEEEDWDYAPLVLAPDDRSYKSQYLNNGPQRIGRKYKKVRFMAYTDETFKTREAIQHESGILGPLLYGEVGDTLLIIFKNQASRPYNIYPHGITDVRPLYSRRLPKGVKHLKDFPILPGEIFKYKWTITVEDGPTKSDPRCLTRYYSSFVNWERDLASGLIGPLLICYKESVDQRGNQIMSDKRNVILFSVFDENRSWYLTENIQRFLPNPAGVQLEDPEFQASNIMHSINGYVFDSLQLSVCLHEVAYWYILSIGAQTDFLSVFFSGYTFKHKGVYEDTLTLFPFSGETVFMSMENPGLWILGCHNSDFRNRGMTALLKVSSCDWNTGDYEEDSYEDISAYFDSENNAIEPRSFSQNPPVLKRHQREGTRTTLQSDQEEIDYDDTISVEMKKVDFDIYDEDENQSPRSFQKKTRHYFIAAVERLWDYGMSSSPHVLRNRAQSGSVPQFKKVVFQEFTDGSFTQPLYRGELNEHLGLLGPYIRAEVEDNIMVTFRNQASRPYSFYSSLISYEEDQRQGAEPRKNFVKPNETKTYFWKVQHHMAPTKDEFDCKAWAYFSDVDLEKDVHSGLIGPLLVCHTNTLNPAHGRQVTVQEFALFFTIFDETKSWYFTENMERNCRAPCNIQMEDPTFKENYRFHAINGYIMDTLPGLVMAQDQRIRWYLLSMGSNENIHSIHFSGHVFTVRKGEEYKMALYNLYPGVFETVEMLPSKAGIWRVECLIGEHLHAGMSTLFLVYSNKCQNPLGMASGHIRDFQITASGQYGQWAPKLARLHYSGSINAWSTKEPFSWIKVDLLAPMIIHGIKTQGARQKFSSLYISQFIIMYSLDGKKWQTYRGNSTGTDMVFFGNVDSSGIKHNIFNPPIIARYIRLHPTHYSIRSTLRMELMGCDLNSCSMPLGMESKAISDAQITASSYFTNMFATWSPSKARLHLQGRSNAWRPQVNNPKEWLQVDFQKTMKVTGVTTQGVKSLDTSMYVKEFLISSSQDGHQWTLFFQNGKVKVFQGNQDSFTPVVNSLDPPLLTRYLRIHPQSWEHQIALRMEVLGCEAQDLY

SEQ ID NO: 2235 - DNA, 4371 bp, synthetic construct
  misc_feature 1..4371: note = Variant of human B-domain deleted Factor VIII
  source 1..4371: mol_type = other DNA
atgcagattgaactgtctacctgcttcttcctctgtttgctgaggttctgctttagcgccactagacggtactaccttggcgctgtggagctgtcctgggactatatgcagagtgatttgggagagcttcccgtcgacgcacgatttcctcctcgcgttccaaagtcatttccctttaacacaagccaggtgtacaagaagacgctcttcgtcgaattcaccgatcacctgttcaatatcgccaaacccagaccaccatggatgggtcttttggggcctaccatacaagcggaggtgtatgacacagttgttatcactctcaagaacatggcttctcatccggtaagtcttcacgcagtgggcgtgtcctactggaaagcttcagaaggagccgagtatgatgatcagacatcccagagggagaaagaagacgacaaggtatttccaggtgggtctcatacctatgtgtggcaagtgctcaaagagaatggccctatggcaagcgatccgccgtgtttgacttacagctacctttcacacgttgacctcgtcaaggacctcaactccgggttgattggagccttgttggtatgcagggaaggatctcttgccaaagagaagacacagaccctggccaagtttatccttctctttgctgtgttcgatgagggcaaaagttggcatagcgaaacgaagaattccctcatgcaggatcgcgacgcagccagcgccagagcttggcccaagatgcacactgtgaacggatatgtcaataggacgcttcctggcttgattgggtgtcatcggaaaagtgtctactggcacgtgatcggaatggggacaacaccagaggtccactccatatttctcgaaggccataccttccttgttcgaaaccacagacaggcatccttggggatctctcccattacctttctcactgcccaaacgggtcttcgtgacttgggtcagttccttctcttttgccatatcccgtcacaccagcatgatggtatggaagcttatgtgaaagtcgacagttgtcctgaggagccacagttgcgcatgaagaataatgaagaagccgaggattacgacgacgatctcaccgattctgagatggacgtggtgaggtttgatgacgacaactctccctccatcattcaagctcggagcggggcgaagaaacaccccaagacttgggtccactatatagcggcggaagaggaggattgggattacgctcctcttgtattggcaccagatgaccgctcatacaaaagccagtacctcaacaacggaccgcagagaattggccggaagtataagaaagtgcgatttatggcctatacagacgaaacctttaagacaagggaggccatccagcatgagagtgggattttgggacctcttctttacggcgaagttggtgataccctcctcatcatcttcaagaatcaagcttctcgcccctataacatttacccacacgggatcactgacgttaggcctttgtatagcagaagacttcccaaaggcgtgaagcatctcaaagacttccccattttgccaggcgagatctttaagtacaaatggaccattacagtggaagatggaccgactaaatcggaccctcgatgccttacgcggtactattcctccttcgtgaattgggagagagatttggcaagcggactcataggaccactcctcatctgttacaaggaatctgtagaccagaggggtaaccagattatgagtgataaacgcaatgtgatcctttttagcgtcttcgacgagaaccggtcctggtacttgaccgagaatatacaaaggttccttcccaaccccgcaggcgttcagttggaagaccctgagtttcaggccagcaatattatgcactcaatcaacggctatgtgtttgatagtctccagctttctgtttgcctccatgaagtagcctattggtacatcttgtcaattggtgctcaaacagacttcctctccgtcttcttctccggctacacctttaagcacaagggggtgtatgaggacactctcacactctttccattttctggagaaaccgtgttcatgagcatggagaatccaggcctttggatcttgggttgccacaacagtgattttcgcaatcggggaatgactgctctcctcaaagtcagcagctgtgattggaacacaggcgactatgaggaagattcttacgaggacataagtgcctactttgactccgaaaataacgccattgagcccagatcattctcccagaatcctcccgtgcttaaaaggcatcagcgcgaaggtaccagaactactcttcagtctgatcaagaggagattgactatgacgacaccattagcgtggaaatgaagaaggaggatttcgatatctatgacgaagatgggaaccagtctccgcggagctttcagaagaagacgcgacactacttcattgcagcagtcgaaaggctttgggactacggtatgtcatcatcccctcatgtgttgcgcaatagagctcagagtggaagtgttccacagttcaagaaagtcgtctttcaagagtttacagatggcagcttcacacagcctctctatcggggcgagcttaacgaacatttgggactccttggtccctatatccgagccgaagtggaggacaacattatggttacctttaggaatcaagcctctcgcccctacagcttctactcctccctcatcagttatgaggaggatcagagacaaggcgctgaaccacggaagaactttgtgaaaccgaatgagacgaagacctacttctggaaagtacagcaccacatggcccccacaaaagacgaattcgattgcaaagcatgggcgtatttttcagacgttgacttggagaaagatgtacattcaggacttattggtcctttgttggtgtgtcacactaacactctcaatccagcccatggcaggcaggtgacagtccaggaattcgctcttttctttaccatctttgatgagaccaagtcctggtacttcacggaaaacatggagcgcaattgcagagccccctgtaacatacagatggaggaccctacctttaaggaaaattatcggttccacgcaatcaacggatacattatggatacactccctggccttgtgatggctcaggaccaacgaatcaggtggtacctcctcagcatgggttctaatgagaacatacactccattcacttttcaggacatgtgttcactgtccggaagaaagaagagtataagatggccctctacaatttgtatccaggcgtgtttgagaccgttgaaatgcttccctctaaagctggcatctggagagtagagtgcttgatcggagaacatcttcacgcaggtatgagcaccttgttcctcgtgtacagcaacaaatgtcagaatccacttggcatggccagtggacacattcgcgactttcagatcacagcatctggccagtatggacaatgggccccaaagttggctcgcctccattactccggtagcataaatgcgtggtccactaaagaacctttcagctggattaaggtcgatcttcttgcccccatgatcatccacggcattaagacacagggagcgaggcagaaattctcctccctctacatctcacagttcattattatgtatagtttggacggcaagaagtggcaaacttatagaggtaacagtactggaacagacatggtgttcttcggcaacgttgatagctctggcatcaaacacaacatctttaatcctcccataatagctcggtacatcagattgcatccgacccactacagcattaggagtacactccgaatggagcttatgggttgcgacttgaattcctgttcaatgccactcggaatggagtctaaagccatctctgatgcacagataaccgccagtagctactttacgaacatgtttgctacgtggtcaccctctaaggcaaggcttcatttgcaaggccggtctaatgcctggagacctcaggtgaacaacccgaaagaatggctccaggtggactttcagaagaccatgaaagtaacaggtgtcactactcagggagttaagtccttggatactagcatgtatgtgaaggagttccttatttcctcatcacaagatggccaccagtggaccctcttctttcagaatggtaaggtcaaagtgtttcagggcaatcaagacagcttcacacccgtggtgaacagtcttgatcctccactcttgacacgataccttcgaatccatccacagtcttgggagcaccagattgcattgcgcatggaagtacttggatgcgaggctcaggacctctac

SEQ ID NO: 2236 - protein, 1457 aa, synthetic construct
  REGION 1..1457: note = Variant of human B-domain deleted Factor VIII
MQIELSTCFFLCLLRFCFSATRRYYLGAVELSWDYMQSDLGELPVDARFPPRVPKSFPFNTSQVYKKTLFVEFTDHLFNIAKPRPPWMGLLGPTIQAEVYDTVVITLKNMASHPVSLHAVGVSYWKASEGAEYDDQTSQREKEDDKVFPGGSHTYVWQVLKENGPMASDPPCLTYSYLSHVDLVKDLNSGLIGALLVCREGSLAKEKTQTLAKFILLFAVFDEGKSWHSETKNSLMQDRDAASARAWPKMHTVNGYVNRTLPGLIGCHRKSVYWHVIGMGTTPEVHSIFLEGHTFLVRNHRQASLGISPITFLTAQTGLRDLGQFLLFCHIPSHQHDGMEAYVKVDSCPEEPQLRMKNNEEAEDYDDDLTDSEMDVVRFDDDNSPSIIQARSGAKKHPKTWVHYIAAEEEDWDYAPLVLAPDDRSYKSQYLNNGPQRIGRKYKKVRFMAYTDETFKTREAIQHESGILGPLLYGEVGDTLLIIFKNQASRPYNIYPHGITDVRPLYSRRLPKGVKHLKDFPILPGEIFKYKWTITVEDGPTKSDPRCLTRYYSSFVNWERDLASGLIGPLLICYKESVDQRGNQIMSDKRNVILFSVFDENRSWYLTENIQRFLPNPAGVQLEDPEFQASNIMHSINGYVFDSLQLSVCLHEVAYWYILSIGAQTDFLSVFFSGYTFKHKGVYEDTLTLFPFSGETVFMSMENPGLWILGCHNSDFRNRGMTALLKVSSCDWNTGDYEEDSYEDISAYFDSENNAIEPRSFSQNPPVLKRHQREGTRTTLQSDQEEIDYDDTISVEMKKEDFDIYDEDGNQSPRSFQKKTRHYFIAAVERLWDYGMSSSPHVLRNRAQSGSVPQFKKVVFQEFTDGSFTQPLYRGELNEHLGLLGPYIRAEVEDNIMVTFRNQASRPYSFYSSLISYEEDQRQGAEPRKNFVKPNETKTYFWKVQHHMAPTKDEFDCKAWAYFSDVDLEKDVHSGLIGPLLVCHTNTLNPAHGRQVTVQEFALFFTIFDETKSWYFTENMERNCRAPCNIQMEDPTFKENYRFHAINGYIMDTLPGLVMAQDQRIRWYLLSMGSNENIHSIHFSGHVFTVRKKEEYKMALYNLYPGVFETVEMLPSKAGIWRVECLIGEHLHAGMSTLFLVYSNKCQNPLGMASGHIRDFQITASGQYGQWAPKLARLHYSGSINAWSTKEPFSWIKVDLLAPMIIHGIKTQGARQKFSSLYISQFIIMYSLDGKKWQTYRGNSTGTDMVFFGNVDSSGIKHNIFNPPIIARYIRLHPTHYSIRSTLRMELMGCDLNSCSMPLGMESKAISDAQITASSYFTNMFATWSPSKARLHLQGRSNAWRPQVNNPKEWLQVDFQKTMKVTGVTTQGVKSLDTSMYVKEFLISSSQDGHQWTLFFQNGKVKVFQGNQDSFTPVVNSLDPPLLTRYLRIHPQSWEHQIALRMEVLGCEAQDLY

SEQ ID NO: 2237 - DNA, 4371 bp, synthetic construct
  misc_feature 1..4371: note = Variant of human B-domain deleted Factor VIII
  source 1..4371: mol_type = other DNA
atgcagattgaactgtctacctgcttcttcctctgtttgctgaggttctgctttagcgccactagacggtactaccttggcgctgtggagctgtcctgggactatatgcagagtgatttgggagagcttcccgtcgacgcacgatttcctcctcgcgttccaaagtcatttccctttaacacaagccaggtgtacaagaagacgctcttcgtcgaattcaccgatcacctgttcaatatcgccaaacccagaccaccatggatgggtcttttggggcctaccatacaagcggaggtgtatgacacagttgttatcactctcaagaacatggcttctcatccggtaagtcttcacgcagtgggcgtgtcctactggaaagcttcagaaggagccgagtatgatgatcagacatcccagagggagaaagaagacgacaaggtatttccaggtgggtctcatacctatgtgtggcaagtgctcaaagagaatggccctatggcaagcgatccgccgtgtttgacttacagctacctttcacacgttgacctcgtcaaggacctcaactccgggttgattggagccttgttggtatgcagggaaggatctcttgccaaagagaagacacagaccctggccaagtttatccttctctttgctgtgttcgatgagggcaaaagttggcatagcgaaacgaagaattccctcatgcaggatcgcgacgcagccagcgccagagcttggcccaagatgcacactgtgaacggatatgtcaataggacgcttcctggcttgattgggtgtcatcggaaaagtgtctactggcacgtgatcggaatggggacaacaccagaggtccactccatatttctcgaaggccataccttccttgttcgaaaccacagacaggcatccttggggatctctcccattacctttctcactgcccaaacgggtcttcgtgacttgggtcagttccttctcttttgccatatcccgtcacaccagcatgatggtatggaagcttatgtgaaagtcgacagttgtcctgaggagccacagttgcgcatgaagaataatgaagaagccgaggattacgacgacgatctcaccgattctgagatggacgtggtgaggtttgatgacgacaactctccctccatcattcaagctcggagcggggcgaagaaacaccccaagacttgggtccactatatagcggcggaagaggaggattgggattacgctcctcttgtattggcaccagatgaccgctcatacaaaagccagtacctcaacaacggaccgcagagaattggccggaagtataagaaagtgcgatttatggcctatacagacgaaacctttaagacaagggaggccatccagcatgagagtgggattttgggacctcttctttacggcgaagttggtgataccctcctcatcatcttcaagaatcaagcttctcgcccctataacatttacccacacgggatcactgacgttaggcctttgtatagcagaagacttcccaaaggcgtgaagcatctcaaagacttccccattttgccaggcgagatctttaagtacaaatggaccattacagtggaagatggaccgactaaatcggaccctcgatgccttacgcggtactattcctccttcgtgaattgggagagagatttggcaagcggactcataggaccactcctcatctgttacaaggaatctgtagaccagaggggtaaccagattatgagtgataaacgcaatgtgatcctttttagcgtcttcgacgagaaccggtcctggtacttgaccgagaatatacaaaggttccttcccaaccccgcaggcgttcagttggaagaccctgagtttcaggccagcaatattatgcactcaatcaacggctatgtgtttgatagtctccagctttctgtttgcctccatgaagtagcctattggtacatcttgtcaattggtgctcaaacagacttcctctccgtcttcttctccggctacacctttaagcacaagggggtgtatgaggacactctcacactctttccattttctggagaaaccgtgttcatgagcatggagaatccaggcctttggatcttgggttgccacaacagtgattttcgcaatcggggaatgactgctctcctcaaagtcagcagctgtgattggaacacaggcgactatgaggaggattcttacgaggacataagtgcctactttgactccgaaaataacgccattgagcccagatcattctcccagaatcctcccgtgcttaaaaggcatcagcgcgaaggtaccagaactactcttcagtctgatcaagaggagattgactatgacgacaccattagcgtggaaatgaagaaggaggatttcgatatctatgacgaagatgagaaccagtctccgcggagctttcagaagaagacgcgacactacttcattgcagcagtcgaaaggctttgggactacggtatgtcatcatcccctcatgtgttgcgcaatagagctcagagtggaagtgttccacagttcaagaaagtcgtctttcaagagtttacagatgccagcttcacacagcctctctatcggggcgagcttaacgaacatttgggactccttggtccctatatccgagccgaagtggaggacaacattatggttacctttaggaatcaagcctctcgcccctacagcttctactcctccctcatcagttatgaggaggatcagagacaaggcgctgaaccacggaagaactttgtgaaaccgaatgagacgaagacctacttctggaaagtacagcaccacatggcccccacaaaagacgaattcgattgcaaagcatgggcgtatttttcagacgttgacttggagaaagatgtacattcaggacttattggtcctttgttggtgtgtcacactaacactctcaatccagcccatggcaggcaggtgacagtccaggaattcgctcttttctttaccatctttgatgagaccaagtcctggtacttcacggaaaacatggagcgcaattgcagagccccctgtaacatacagatggaggaccctacctttaaggaaaattatcggttccacgcaatcaacggatacattatggatacactccctggccttgtgatggctcaggaccaacgaatcaggtggtacctcctcagcatgggttctaatgagaacatacactccattcacttttcaggacatgtgttcactgtccggaagaaagaagagtataagatggccctctacaatttgtatccaggcgtgtttgagaccgttgaaatgcttccctctaaagctggcatctggagagtagagtgcttgatcggagaacatcttcacgcaggtatgagcaccttgttcctcgtgtacagcaacaaatgtcagaatccacttggcatggccagtggacacattcgcgactttcagatcacagcatctggccagtatggacaatgggccccaaagttggctcgcctccattactccggtagcataaatgcgtggtccactaaagaacctttcagctggattaaggtcgatcttcttgcccccatgatcatccacggcattaagacacagggagcgaggcagaaattctcctccctctacatctcacagttcattattatgtatagtttggacggcaagaagtggcaaacttatagaggtaacagtactggaacagacatggtgttcttcggcaacgttgatagctctggcatcaaacacaacatctttaatcctcccataatagctcggtacatcagattgcatccgacccactacagcattaggagtacactccgaatggagcttatgggttgcgacttgaattcctgttcaatgccactcggaatggagtctaaagccatctctgatgcacagataaccgccagtagctactttacgaacatgtttgctacgtggtcaccctctaaggcaaggcttcatttgcaaggccggtctaatgcctggagacctcaggtgaacaacccgaaagaatggctccaggtggactttcagaagaccatgaaagtaacaggtgtcactactcagggagttaagtccttggatactagcatgtatgtgaaggagttccttatttcctcatcacaagatggccaccagtggaccctcttctttcagaatggtaaggtcaaagtgtttcagggcaatcaagacagcttcacacccgtggtgaacagtcttgatcctccactcttgacacgataccttcgaatccatccacagtcttgggagcaccagattgcattgcgcatggaagtacttggatgcgaggctcaggacctctac

SEQ ID NO: 2238 - protein, 1457 aa, synthetic construct
  REGION 1..1457: note = Variant of human B-domain deleted Factor VIII
MQIELSTCFFLCLLRFCFSATRRYYLGAVELSWDYMQSDLGELPVDARFPPRVPKSFPFNTSQVYKKTLFVEFTDHLFNIAKPRPPWMGLLGPTIQAEVYDTVVITLKNMASHPVSLHAVGVSYWKASEGAEYDDQTSQREKEDDKVFPGGSHTYVWQVLKENGPMASDPPCLTYSYLSHVDLVKDLNSGLIGALLVCREGSLAKEKTQTLAKFILLFAVFDEGKSWHSETKNSLMQDRDAASARAWPKMHTVNGYVNRTLPGLIGCHRKSVYWHVIGMGTTPEVHSIFLEGHTFLVRNHRQASLGISPITFLTAQTGLRDLGQFLLFCHIPSHQHDGMEAYVKVDSCPEEPQLRMKNNEEAEDYDDDLTDSEMDVVRFDDDNSPSIIQARSGAKKHPKTWVHYIAAEEEDWDYAPLVLAPDDRSYKSQYLNNGPQRIGRKYKKVRFMAYTDETFKTREAIQHESGILGPLLYGEVGDTLLIIFKNQASRPYNIYPHGITDVRPLYSRRLPKGVKHLKDFPILPGEIFKYKWTITVEDGPTKSDPRCLTRYYSSFVNWERDLASGLIGPLLICYKESVDQRGNQIMSDKRNVILFSVFDENRSWYLTENIQRFLPNPAGVQLEDPEFQASNIMHSINGYVFDSLQLSVCLHEVAYWYILSIGAQTDFLSVFFSGYTFKHKGVYEDTLTLFPFSGETVFMSMENPGLWILGCHNSDFRNRGMTALLKVSSCDWNTGDYEEDSYEDISAYFDSENNAIEPRSFSQNPPVLKRHQREGTRTTLQSDQEEIDYDDTISVEMKKEDFDIYDEDENQSPRSFQKKTRHYFIAAVERLWDYGMSSSPHVLRNRAQSGSVPQFKKVVFQEFTDASFTQPLYRGELNEHLGLLGPYIRAEVEDNIMVTFRNQASRPYSFYSSLISYEEDQRQGAEPRKNFVKPNETKTYFWKVQHHMAPTKDEFDCKAWAYFSDVDLEKDVHSGLIGPLLVCHTNTLNPAHGRQVTVQEFALFFTIFDETKSWYFTENMERNCRAPCNIQMEDPTFKENYRFHAINGYIMDTLPGLVMAQDQRIRWYLLSMGSNENIHSIHFSGHVFTVRKKEEYKMALYNLYPGVFETVEMLPSKAGIWRVECLIGEHLHAGMSTLFLVYSNKCQNPLGMASGHIRDFQITASGQYGQWAPKLARLHYSGSINAWSTKEPFSWIKVDLLAPMIIHGIKTQGARQKFSSLYISQFIIMYSLDGKKWQTYRGNSTGTDMVFFGNVDSSGIKHNIFNPPIIARYIRLHPTHYSIRSTLRMELMGCDLNSCSMPLGMESKAISDAQITASSYFTNMFATWSPSKARLHLQGRSNAWRPQVNNPKEWLQVDFQKTMKVTGVTTQGVKSLDTSMYVKEFLISSSQDGHQWTLFFQNGKVKVFQGNQDSFTPVVNSLDPPLLTRYLRIHPQSWEHQIALRMEVLGCEAQDLY

SEQ ID NO: 2239 - DNA, 4371 bp, synthetic construct
  misc_feature 1..4371: note = Variant of human B-domain deleted Factor VIII
  source 1..4371: mol_type = other DNA
atgcagattgaactgtctacctgcttcttcctctgtttgctgaggttctgctttagcgccactagacggtactaccttggcgctgtggagctgtcctgggactatatgcagagtgatttgggagagcttcccgtcgacgcacgatttcctcctcgcgttccaaagtcatttccctttaacacaagccaggtgtacaagaagacgctcttcgtcgaattcaccgatcacctgttcaatatcgccaaacccagaccaccatggatgggtcttttggggcctaccatacaagcggaggtgtatgacacagttgttatcactctcaagaacatggcttctcatccggtaagtcttcacgcagtgggcgtgtcctactggaaagcttcagaaggagccgagtatgatgatcagacatcccagagggagaaagaagacgacaaggtatttccaggtgggtctcatacctatgtgtggcaagtgctcaaagagaatggccctatggcaagcgatccgccgtgtttgacttacagctacctttcacacgttgacctcgtcaaggacctcaactccgggttgattggagccttgttggtatgcagggaaggatctcttgccaaagagaagacacagaccctggccaagtttatccttctctttgctgtgttcgatgagggcaaaagttggcatagcgaaacgaagaattccctcatgcaggatcgcgacgcagccagcgccagagcttggcccaagatgcacactgtgaacggatatgtcaataggacgcttcctggcttgattgggtgtcatcggaaaagtgtctactggcacgtgatcggaatggggacaacaccagaggtccactccatatttctcgaaggccataccttccttgttcgaaaccacagacaggcatccttggggatctctcccattacctttctcactgcccaaacgggtcttcgtgacttgggtcagttccttctcttttgccatatcccgtcacaccagcatgatggtatggaagcttatgtgaaagtcgacagttgtcctgaggagccacagttgcgcatgaagaataatgaagaagccgaggattacgacgacgatctcaccgattctgagatggacgtggtgaggtttgatgacgacaactctccctccatcattcaagctcggagcggggcgaagaaacaccccaagacttgggtccactatatagcggcggaagaggaggattgggattacgctcctcttgtattggcaccagatgaccgctcatacaaaagccagtacctcaacaacggaccgcagagaattggccggaagtataagaaagtgcgatttatggcctatacagacgaaacctttaagacaagggaggccatccagcatgagagtgggattttgggacctcttctttacggcgaagttggtgataccctcctcatcatcttcaagaatcaagcttctcgcccctataacatttacccacacgggatcactgacgttaggcctttgtatagcagaagacttcccaaaggcgtgaagcatctcaaagacttccccattttgccaggcgagatctttaagtacaaatggaccattacagtggaagatggaccgactaaatcggaccctcgatgccttacgcggtactattcctccttcgtgaattgggagagagatttggcaagcggactcataggaccactcctcatctgttacaaggaatctgtagaccagaggggtaaccagattatgagtgataaacgcaatgtgatcctttttagcgtcttcgacgagaaccggtcctggtacttgaccgagaatatacaaaggttccttcccaaccccgcaggcgttcagttggaagaccctgagtttcaggccagcaatattatgcactcaatcaacggctatgtgtttgatagtctccagctttctgtttgcctccatgaagtagcctattggtacatcttgtcaattggtgctcaaacagacttcctctccgtcttcttctccggctacacctttaagcacaagggcgtgtatgaggacactctcacactctttccattttctggagaaaccgtgttcatgagcatggagaatccaggcctttggatcttgggttgccacaacagtgattttcgcaatcggggaatgactgctctcctcaaagtcagcagctgtgattggaacacaggcgactatgaggaagattcttacgaggacataagtgcctactttgactccgagaataacgccattgagcccagatcattctcccagaatcctcccgtgcttaaaaggcatcagcgcgaaggtaccagaactactcttcagtctgatcaagaggagattgactatgacgacaccattagcgtggaaatgaagaaggaggatttcgatatctatgacgaagatgagaaccagtctccgcggagctttcagaagaagacgcgacactacttcattgcagcagtcgaaaggctttgggactacggtatgtcatcatcccctcatgtgttgcgcaatagagctcagagtggaagtgttccacagttcaagaaagtcgtctttcaagagtttacagatggcagcttcacacagcctctctatcggggcgagcttaacgaacatttgggactccttggtccctatatccgagccgaagtggaggacaacattatggttacctttaggaatcaagcctctcgcccctacagcttctactcctccctcatcagttatgaggaggatcagagacaaggcgctgaaccacggaagaactttgtgaaaccgaatgagacgaagacctacttctggaaagtacagcaccacatggcccccacaaaagacgaattcgattgcaaagcatgggcgtatttttcagacgttgacttggagaaagatgtacattcaggacttattggtcctttgttggtgtgtcacactaacactctcaatccagcccatggcaggcaggtgacagtccaggaattcgctcttttctttaccatctttgatgagaccaagtcctggtacttcacggaaaacatggagcgcaattgcagagccccctgtaacatacagatggaggaccctacctttaaggaaaattatcggttccacgcaatcaacggatacattatggatacactccctggccttgtgatggctcaggaccaacgaatcaggtggtacctcctcagcatgggttctaatgagaacatacactccattcacttttcaggacatgtgttcactgtccggaagggggaagagtataagatggccctctacaatttgtatccaggcgtgtttgagaccgttgaaatgcttccctctaaagctggcatctggagagtagagtgcttgatcggagaacatcttcacgcaggtatgagcaccttgttcctcgtgtacagcaacaaatgtcagaatccacttggcatggccagtggacacattcgcgactttcagatcacagcatctggccagtatggacaatgggccccaaagttggctcgcctccattactccggtagcataaatgcgtggtccactaaagaacctttcagctggattaaggtcgatcttcttgcccccatgatcatccacggcattaagacacagggagcgaggcagaaattctcctccctctacatctcacagttcattattatgtatagtttggacggcaagaagtggcaaacttatagaggtaacagtactggaacagacatggtgttcttcggcaacgttgatagctctggcatcaaacacaacatctttaatcctcccataatagctcggtacatcagattgcatccgacccactacagcattaggagtacactccgaatggagcttatgggttgcgacttgaattcctgttcaatgccactcggaatggagtctaaagccatctctgatgcacagataaccgccagtagctactttacgaacatgtttgctacgtggtcaccctctaaggcaaggcttcatttgcaaggccggtctaatgcctggagacctcaggtgaacaacccgaaagaatggctccaggtggactttcagaagaccatgaaagtaacaggtgtcactactcagggagttaagtccttggatactagcatgtatgtgaaggagttccttatttcctcatcacaagatggccaccagtggaccctcttctttcagaatggtaaggtcaaagtgtttcagggcaatcaagacagcttcacacccgtggtgaacagtcttgatcctccactcttgacacgataccttcgaatccatccacagtcttgggagcaccagattgcattgcgcatggaagtacttggatgcgaggctcaggacctctac

SEQ ID NO: 2240 - protein, 1457 aa, synthetic construct
  REGION 1..1457: note = Variant of human B-domain deleted Factor VIII
MQIELSTCFFLCLLRFCFSATRRYYLGAVELSWDYMQSDLGELPVDARFPPRVPKSFPFNTSQVYKKTLFVEFTDHLFNIAKPRPPWMGLLGPTIQAEVYDTVVITLKNMASHPVSLHAVGVSYWKASEGAEYDDQTSQREKEDDKVFPGGSHTYVWQVLKENGPMASDPPCLTYSYLSHVDLVKDLNSGLIGALLVCREGSLAKEKTQTLAKFILLFAVFDEGKSWHSETKNSLMQDRDAASARAWPKMHTVNGYVNRTLPGLIGCHRKSVYWHVIGMGTTPEVHSIFLEGHTFLVRNHRQASLGISPITFLTAQTGLRDLGQFLLFCHIPSHQHDGMEAYVKVDSCPEEPQLRMKNNEEAEDYDDDLTDSEMDVVRFDDDNSPSIIQARSGAKKHPKTWVHYIAAEEEDWDYAPLVLAPDDRSYKSQYLNNGPQRIGRKYKKVRFMAYTDETFKTREAIQHESGILGPLLYGEVGDTLLIIFKNQASRPYNIYPHGITDVRPLYSRRLPKGVKHLKDFPILPGEIFKYKWTITVEDGPTKSDPRCLTRYYSSFVNWERDLASGLIGPLLICYKESVDQRGNQIMSDKRNVILFSVFDENRSWYLTENIQRFLPNPAGVQLEDPEFQASNIMHSINGYVFDSLQLSVCLHEVAYWYILSIGAQTDFLSVFFSGYTFKHKGVYEDTLTLFPFSGETVFMSMENPGLWILGCHNSDFRNRGMTALLKVSSCDWNTGDYEEDSYEDISAYFDSENNAIEPRSFSQNPPVLKRHQREGTRTTLQSDQEEIDYDDTISVEMKKEDFDIYDEDENQSPRSFQKKTRHYFIAAVERLWDYGMSSSPHVLRNRAQSGSVPQFKKVVFQEFTDGSFTQPLYRGELNEHLGLLGPYIRAEVEDNIMVTFRNQASRPYSFYSSLISYEEDQRQGAEPRKNFVKPNETKTYFWKVQHHMAPTKDEFDCKAWAYFSDVDLEKDVHSGLIGPLLVCHTNTLNPAHGRQVTVQEFALFFTIFDETKSWYFTENMERNCRAPCNIQMEDPTFKENYRFHAINGYIMDTLPGLVMAQDQRIRWYLLSMGSNENIHSIHFSGHVFTVRKGEEYKMALYNLYPGVFETVEMLPSKAGIWRVECLIGEHLHAGMSTLFLVYSNKCQNPLGMASGHIRDFQITASGQYGQWAPKLARLHYSGSINAWSTKEPFSWIKVDLLAPMIIHGIKTQGARQKFSSLYISQFIIMYSLDGKKWQTYRGNSTGTDMVFFGNVDSSGIKHNIFNPPIIARYIRLHPTHYSIRSTLRMELMGCDLNSCSMPLGMESKAISDAQITASSYFTNMFATWSPSKARLHLQGRSNAWRPQVNNPKEWLQVDFQKTMKVTGVTTQGVKSLDTSMYVKEFLISSSQDGHQWTLFFQNGKVKVFQGNQDSFTPVVNSLDPPLLTRYLRIHPQSWEHQIALRMEVLGCEAQDLY

SEQ ID NO: 2241 - DNA, 4371 bp, synthetic construct
  misc_feature 1..4371: note = Variant of human B-domain deleted Factor VIII
  source 1..4371: mol_type = other DNA
atgcagattgaactgtctacctgcttcttcctctgtttgctgaggttctgctttagcgccactagacggtactaccttggcgctgtggagctgtcctgggactatatgcagagtgatttgggagagcttcccgtcgacgcacgatttcctcctcgcgttccaaagtcatttccctttaacacaagccaggtgtacaagaagacgctcttcgtcgaattcaccgatcacctgttcaatatcgccaaacccagaccaccatggatgggtcttttggggcctaccatacaagcggaggtgtatgacacagttgttatcactctcaagaacatggcttctcatccggtaagtcttcacgcagtgggcgtgtcctactggaaagcttcagaaggagccgagtatgatgatcagacatcccagagggagaaagaagacgacaaggtatttccaggtgggtctcatacctatgtgtggcaagtgctcaaagagaatggccctatggcaagcgatccgccgtgtttgacttacagctacctttcacacgttgacctcgtcaaggacctcaactccgggttgattggagccttgttggtatgcagggaaggatctcttgccaaagagaagacacagaccctggccaagtttatccttctctttgctgtgttcgatgagggcaaaagttggcatagcgaaacgaagaattccctcatgcaggatcgcgacgcagccagcgccagagcttggcccaagatgcacactgtgaacggatatgtcaataggacgcttcctggcttgattgggtgtcatcggaaaagtgtctactggcacgtgatcggaatggggacaacaccagaggtccactccatatttctcgaaggccataccttccttgttcgaaaccacagacaggcatccttggggatctctcccattacctttctcactgcccaaacgggtcttcgtgacttgggtcagttccttctcttttgccatatcccgtcacaccagcatgatggtatggaagcttatgtgaaagtcgacagttgtcctgaggagccacagttgcgcatgaagaataatgaagaagccgaggattacgacgacgatctcaccgattctgagatggacgtggtgaggtttgatgacgacaactctccctccatcattcaagctcggagcggggcgaagaaacaccccaagacttgggtccactatatagcggcggaagaggaggattgggattacgctcctcttgtattggcaccagatgaccgctcatacaaaagccagtacctcaacaacggaccgcagagaattggccggaagtataagaaagtgcgatttatggcctatacagacgaaacctttaagacaagggaggccatccagcatgagagtgggattttgggacctcttctttacggcgaagttggtgataccctcctcatcatcttcaagaatcaagcttctcgcccctataacatttacccacacgggatcactgacgttaggcctttgtatagcagaagacttcccaaaggcgtgaagcatctcaaagacttccccattttgccaggcgagatctttaagtacaaatggaccattacagtggaagatggaccgactaaatcggaccctcgatgccttacgcggtactattcctccttcgtgaattgggagagagatttggcaagcggactcataggaccactcctcatctgttacaaggaatctgtagaccagaggggtaaccagattatgagtgataaacgcaatgtgatcctttttagcgtcttcgacgagaaccggtcctggtacttgaccgagaatatacaaaggttccttcccaaccccgcaggcgttcagttggaagaccctgagtttcaggccagcaatattatgcactcaatcaacggctatgtgtttgatagtctccagctttctgtttgcctccatgaagtagcctattggtacatcttgtcaattggtgctcaaacagacttcctctccgtcttcttctccggctacacctttaagcacaagggcgtgtatgaggacactctcacactctttccattttctggagaaaccgtgttcatgagcatggagaatccaggcctttggatcttgggttgccacaacagtgattttcgcaatcggggaatgactgctctcctcaaagtcagcagctgtgattggaacacaggcgactatgaggaagattcttacgaggacataagtgcctactttgactccgaaaataacgccattgagcccagatcattctcccagaatcctcccgtgcttaaaaggcatcagcgcgaaggtaccagaactactcttcagtctgatcaagaggagattgactatgacgacaccattagcgtggaaatgaagaaggaggatttcgatatctatgacgaagatgagaaccagtctccgcggagctttcagaagaagacgcgacactacttcattgcagcagtcgaaaggctttgggactacggtatgtcatcatcccctcatgtgttgcgcaatagagctcagagtggaagtgttccacagttcaagaaagtcgtctttcaagagtttacagatggcagcttcacacagcctctctatcggggcgagcttaacgaacatttgggactccttggtccctatatccgagccgaagtggaggacaacattatggttacctttaggaatcaagcctctcgcccctacagcttctactcctccctcatcagttatgaggaggatcagagacaaggcgctgaaccacggaagaactttgtgaaaccgaatgagacgaagacctacttctggaaagtacagcaccacatggcccccacaaaagacgaattcgattgcaaagcatgggcgtatttttcagacgttgacttggagaaagatgtacattcaggacttattggtcctttgttggtgtgtcacactaacactctcaatccagcccatggcaggcaggtgacagtccaggaattcgctcttttctttaccatctttgatgagaccaagtcctggtacttcacggaaaacatggagcgcaattgcagagccccctgtaacatacagatggaggaccctacctttaaggaaaattatcggttccacgcaatcaacggatacattatggatacactccctggccttgtgatggctcaggaccaacgaatcaggtggtacctcctcagcatgggttctaatgagaacatacactccattcacttttcaggacatgtgttcactgtccggaagaaagaagagtataagatggccctctacaatttgtatccaggcgtgtttgagaccgttgaaatgcttcccatcaaagctggcatctggagagtagagtgcttgatcggagaacatcttcacgcaggtatgagcaccttgttcctcgtgtacagcaacaaatgtcagaatccacttggcatggccagtggacacattcgcgactttcagatcacagcatctggccagtatggacaatgggccccaaagttggctcgcctccattactccggtagcataaatgcgtggtccactaaagaacctttcagctggattaaggtcgatcttcttgcccccatgatcatccacggcattaagacacagggagcgaggcagaaattctcctccctctacatctcacagttcattattatgtatagtttggacggcaagaagtggcaaacttatagaggtaacagtactggaacagacatggtgttcttcggcaacgttgatagctctggcatcaaacacaacatctttaatcctcccataatagctcggtacatcagattgcatccgacccactacagcattaggagtacactccgaatggagcttatgggttgcgacttgaattcctgttcaatgccactcggaatggagtctaaagccatctctgatgcacagataaccgccagtagctactttacgaacatgtttgctacgtggtcaccctctaaggcaaggcttcatttgcaaggccggtctaatgcctggagacctcaggtgaacaacccgaaagaatggctccaggtggactttcagaagaccatgaaagtaacaggtgtcactactcagggagttaagtccttggatactagcatgtatgtgaaggagttccttatttcctcatcacaagatggccaccagtggaccctcttctttcagaatggtaaggtcaaagtgtttcagggcaatcaagacagcttcacacccgtggtgaacagtcttgatcctccactcttgacacgataccttcgaatccatccacagtcttgggagcaccagattgcattgcgcatggaagtacttggatgcgaggctcaggacctctac

SEQ ID NO: 2242 - protein, 1457 aa, synthetic construct
  REGION 1..1457: note = Variant of human B-domain deleted Factor VIII
MQIELSTCFFLCLLRFCFSATRRYYLGAVELSWDYMQSDLGELPVDARFPPRVPKSFPFNTSQVYKKTLFVEFTDHLFNIAKPRPPWMGLLGPTIQAEVYDTVVITLKNMASHPVSLHAVGVSYWKASEGAEYDDQTSQREKEDDKVFPGGSHTYVWQVLKENGPMASDPPCLTYSYLSHVDLVKDLNSGLIGALLVCREGSLAKEKTQTLAKFILLFAVFDEGKSWHSETKNSLMQDRDAASARAWPKMHTVNGYVNRTLPGLIGCHRKSVYWHVIGMGTTPEVHSIFLEGHTFLVRNHRQASLGISPITFLTAQTGLRDLGQFLLFCHIPSHQHDGMEAYVKVDSCPEEPQLRMKNNEEAEDYDDDLTDSEMDVVRFDDDNSPSIIQARSGAKKHPKTWVHYIAAEEEDWDYAPLVLAPDDRSYKSQYLNNGPQRIGRKYKKVRFMAYTDETFKTREAIQHESGILGPLLYGEVGDTLLIIFKNQASRPYNIYPHGITDVRPLYSRRLPKGVKHLKDFPILPGEIFKYKWTITVEDGPTKSDPRCLTRYYSSFVNWERDLASGLIGPLLICYKESVDQRGNQIMSDKRNVILFSVFDENRSWYLTENIQRFLPNPAGVQLEDPEFQASNIMHSINGYVFDSLQLSVCLHEVAYWYILSIGAQTDFLSVFFSGYTFKHKGVYEDTLTLFPFSGETVFMSMENPGLWILGCHNSDFRNRGMTALLKVSSCDWNTGDYEEDSYEDISAYFDSENNAIEPRSFSQNPPVLKRHQREGTRTTLQSDQEEIDYDDTISVEMKKEDFDIYDEDENQSPRSFQKKTRHYFIAAVERLWDYGMSSSPHVLRNRAQSGSVPQFKKVVFQEFTDGSFTQPLYRGELNEHLGLLGPYIRAEVEDNIMVTFRNQASRPYSFYSSLISYEEDQRQGAEPRKNFVKPNETKTYFWKVQHHMAPTKDEFDCKAWAYFSDVDLEKDVHSGLIGPLLVCHTNTLNPAHGRQVTVQEFALFFTIFDETKSWYFTENMERNCRAPCNIQMEDPTFKENYRFHAINGYIMDTLPGLVMAQDQRIRWYLLSMGSNENIHSIHFSGHVFTVRKKEEYKMALYNLYPGVFETVEMLPIKAGIWRVECLIGEHLHAGMSTLFLVYSNKCQNPLGMASGHIRDFQITASGQYGQWAPKLARLHYSGSINAWSTKEPFSWIKVDLLAPMIIHGIKTQGARQKFSSLYISQFIIMYSLDGKKWQTYRGNSTGTDMVFFGNVDSSGIKHNIFNPPIIARYIRLHPTHYSIRSTLRMELMGCDLNSCSMPLGMESKAISDAQITASSYFTNMFATWSPSKARLHLQGRSNAWRPQVNNPKEWLQVDFQKTMKVTGVTTQGVKSLDTSMYVKEFLISSSQDGHQWTLFFQNGKVKVFQGNQDSFTPVVNSLDPPLLTRYLRIHPQSWEHQIALRMEVLGCEAQDLY

SEQ ID NO: 2243 - DNA, 4371 bp, synthetic construct
  misc_feature 1..4371: note = Variant of human B-domain deleted Factor VIII
  source 1..4371: mol_type = other DNA
atgcagattgaactgtctacctgcttcttcctctgtttgctgaggttctgctttagcgccactagacggtactaccttggcgctgtggagctgtcctgggactatatgcagagtgatttgggagagcttcccgtcgacgcacgatttcctcctcgcgttccaaagtcatttccctttaacacaagccaggtgtacaagaagacgctcttcgtcgaattcaccgatcacctgttcaatatcgccaaacccagaccaccatggatgggtcttttggggcctaccatacaagcggaggtgtatgacacagttgttatcactctcaagaacatggcttctcatccggtaagtcttcacgcagtgggcgtgtcctactggaaagcttcagaaggagccgagtatgatgatcagacatcccagagggagaaagaagacgacaaggtatttccaggtgggtctcatacctatgtgtggcaagtgctcaaagagaatggccctatggccagcgatccgccgtgtttgacttacagctaccagtcacacgttgacctcgtcaaggacctcaactccgggttgattggagccttgttggtatgcagggaaggatctcttgccaaagagaagacacagaccctggccaagtttatccttctctttgctgtgttcgatgagggcaaaagttggcatagcgaaacgaagaattccctcatgcaggatcgcgacgcagccagcgccagagcttggcccaagatgcacactgtgaacggatatgtcaataggacgcttcctggcttgattgggtgtcatcggaaaagtgtctactggcacgtgatcggaatggggacaacaccagaggtccactccatatttctcgaaggccataccttccttgttcgaaaccacagacaggcatccttggggatctctcccattacctttctcactgcccaaacgctgcttcgtgacttgggtcagttccttctcttttgccatatcccgtcacaccagcatgatggtatggaagcttatgtgaaagtcgacagttgtcctgaggagccacagttgcgcatgaagaataatgaagaagccgaggattacgacgacgatctcaccgattctgagatggacgtggtgaggtttgatgacgacaactctccctccatcattcaagctcggagcggggcgaagaaacaccccaagacttgggtccactatatagcggcggaagaggaggattgggattacgctcctcttgtattggcaccagatgaccgctcatacaaaagccagtacctcaacaacggaccgcagagaattggccggaagtataagaaagtgcgatttatggcctatacagacgaaacctttaagacaagggaggccatccagcatgagagtgggattttgggacctcttctttacggcgaagttggtgataccctcctcatcatcttcaagaatcaagcttctcgcccctataacatttacccacacgggatcactgacgttaggcctttgtatagcagaagacttcccaaaggcgtgaagcatctcaaagacttccccattttgccaggcgagatctttaagtacaaatggaccattacagtggaagatggaccgactaaatcagaccctcgatgccttacgcggtactattcctccttcgtgaattgggagagagatttggcaagcggactcataggaccactcctcatctgttacaaggaatctgtagaccagaggggtaaccagattatgagtgataaacgcaatgtgatcctttttagcgtcttcgacgagaaccggtcctggtacttgaccgagaatatacaaaggttccttcccaaccccgcaggcgttcagttggaagaccctgagtttcaggccagcaatattatgcactcaatcaacggctatgtgtttgatagtctccagctttctgtttgcctccatgaagtagcctattggtacatcttgtcaattggtgctcaaacagacttcctctccgtcttcttctccggctacacctttaagcacaagggcgtgtatgaggacactctcacactctttccattttctggagaaaccgtgttcatgagcatggagaatccaggcctttggatcttgggttgccacaacagtgattttcgcaatcggggaatgactgctctcctcaaagtcagcagctgtgattggaacacaggcgactatgaaggggattcttacgaggacataagtgcctactttgactccgagaataacgccattgagcccagatcattctcccagaatcctcccgtgcttaaaaggcatcagcgcgaaggtaccagaactactcttcagtctgatcaagaggagattgactatgacgacaccattagcgtggaaatgaagaaggaagatttcgatatctacgacgaggacgggaaccagtctccgcggagctttcagaagaagacgcgacactacttcattgcagcagtcgaaaggctttgggactacggtatgtcatcatcccctcatgtgttgcgcaatagagctcagagtggaagtgttccacagttcaagaaagtcgtctttcaagagtttacagatggcagcttcacacagcctctctatcggggcgagcttaacgaacatttgggactccttggtccctatatccgagccgaagtggaggacaacattatggttacctttaggaatcaagcctctcgcccctacagcttctactcctccctcatcagttatgaggaggatcagagacaaggcgctgaaccacggaagaactttgtgaaaccgaatgagacgaagacctacttctggaaagtacagcaccacatggcccccacaaaagacgaattcgattgcaaagcatgggcgtatttttcagacgttgacttggagaaagatgtacattcaggacttattggtcctttgttggtgtgtcacactaacactctcaatccagcccatggcaggcaggtgacagtccaggaattcgctcttttctttaccatctttgatgagaccaagtcctggtacttcacggaaaacatggagcgcaattgcagagccccctgtaacatacagatggaggaccctacctttaaggaaaattatcggttccacgcaatcaacggatacattatggatacactccctggccttgtgatggctcaggaccaacgaatcaggtggtacctcctcagcatgggttctaatagtaacatacactccattcacttttcaggacatgtgttcactgtccggaagaaagaagagtataagatggccctctacaatttgtatccaggcgtgtttgagaccgttgaaatgcttcccattaaagctggcatctggagagtagagtgcttgatcggagaacatcttcacgcaggtatgagcaccttgttcctcgtgtacagcaacaaatgtcagaatccacttggcatggccagtggacacattcgcgactttcagatcacagcatctggccagtatggacaatgggccccaaagttggctcgcctccattactccggtagcataaatgcgtggtccactaaagaacctttcagctggattaaggtcgatcttcttgcccccatgatcatccacggcattaagacacagggagcgaggcagaaattctcctccctctacatctcacagttcattattatgtatagtttggacggcaagaagtggcaaacttatagaggtaacagtactggaacagacatggtgttcttcggcaacgttgatagctctggcatcaaacacaacatctttaatcctcccataatagctcggtacatcagattgcatccgacccactacagcattaggagtacactccgaatggagcttatgggttgcgacttgaattcctgttcaatgccactcggaatggagtctaaagccatctctgatgcacagataaccgccagtagctactttacgaacatgtttgctacgtggtcaccctctaaggcaaggcttcatttgcaaggccggtctaatgcctggagacctcaggtgaacaacccgaaagaatggctccaggtggactttcagaagaccatgaaagtaacaggtgtcactactcagggagttaagtccttggatactagcatgtatgtgaaggagttccttatttcctcatcacaagatggccaccagtggaccctcttctttcagaatggtaaggtcaaagtgtttcagggcaatcaagacagcttcacacccgtggtgaacagtcttgatcctccactcttgacacgataccttcgaatccatccacagtcttgggagcaccagattgcattgcgcatggaagtacttggatgcgaggctcaggacctctac

SEQ ID NO: 2244 - protein, 1457 aa, synthetic construct
  REGION 1..1457: note = Variant of human B-domain deleted Factor VIII
MQIELSTCFFLCLLRFCFSATRRYYLGAVELSWDYMQSDLGELPVDARFPPRVPKSFPFNTSQVYKKTLFVEFTDHLFNIAKPRPPWMGLLGPTIQAEVYDTVVITLKNMASHPVSLHAVGVSYWKASEGAEYDDQTSQREKEDDKVFPGGSHTYVWQVLKENGPMASDPPCLTYSYQSHVDLVKDLNSGLIGALLVCREGSLAKEKTQTLAKFILLFAVFDEGKSWHSETKNSLMQDRDAASARAWPKMHTVNGYVNRTLPGLIGCHRKSVYWHVIGMGTTPEVHSIFLEGHTFLVRNHRQASLGISPITFLTAQTLLRDLGQFLLFCHIPSHQHDGMEAYVKVDSCPEEPQLRMKNNEEAEDYDDDLTDSEMDVVRFDDDNSPSIIQARSGAKKHPKTWVHYIAAEEEDWDYAPLVLAPDDRSYKSQYLNNGPQRIGRKYKKVRFMAYTDETFKTREAIQHESGILGPLLYGEVGDTLLIIFKNQASRPYNIYPHGITDVRPLYSRRLPKGVKHLKDFPILPGEIFKYKWTITVEDGPTKSDPRCLTRYYSSFVNWERDLASGLIGPLLICYKESVDQRGNQIMSDKRNVILFSVFDENRSWYLTENIQRFLPNPAGVQLEDPEFQASNIMHSINGYVFDSLQLSVCLHEVAYWYILSIGAQTDFLSVFFSGYTFKHKGVYEDTLTLFPFSGETVFMSMENPGLWILGCHNSDFRNRGMTALLKVSSCDWNTGDYEGDSYEDISAYFDSENNAIEPRSFSQNPPVLKRHQREGTRTTLQSDQEEIDYDDTISVEMKKEDFDIYDEDGNQSPRSFQKKTRHYFIAAVERLWDYGMSSSPHVLRNRAQSGSVPQFKKVVFQEFTDGSFTQPLYRGELNEHLGLLGPYIRAEVEDNIMVTFRNQASRPYSFYSSLISYEEDQRQGAEPRKNFVKPNETKTYFWKVQHHMAPTKDEFDCKAWAYFSDVDLEKDVHSGLIGPLLVCHTNTLNPAHGRQVTVQEFALFFTIFDETKSWYFTENMERNCRAPCNIQMEDPTFKENYRFHAINGYIMDTLPGLVMAQDQRIRWYLLSMGSNSNIHSIHFSGHVFTVRKKEEYKMALYNLYPGVFETVEMLPIKAGIWRVECLIGEHLHAGMSTLFLVYSNKCQNPLGMASGHIRDFQITASGQYGQWAPKLARLHYSGSINAWSTKEPFSWIKVDLLAPMIIHGIKTQGARQKFSSLYISQFIIMYSLDGKKWQTYRGNSTGTDMVFFGNVDSSGIKHNIFNPPIIARYIRLHPTHYSIRSTLRMELMGCDLNSCSMPLGMESKAISDAQITASSYFTNMFATWSPSKARLHLQGRSNAWRPQVNNPKEWLQVDFQKTMKVTGVTTQGVKSLDTSMYVKEFLISSSQDGHQWTLFFQNGKVKVFQGNQDSFTPVVNSLDPPLLTRYLRIHPQSWEHQIALRMEVLGCEAQDLY

SEQ ID NO: 2245 - DNA, 4371 bp, synthetic construct
  misc_feature 1..4371: note = Variant of human B-domain deleted Factor VIII
  source 1..4371: mol_type = other DNA
atgcagattgaactgtctacctgcttcttcctctgtttgctgaggttctgctttagcgccactagacggtactaccttggcgctgtggagctgtcctgggactatatgcagagtgatttgggagagcttcccgtcgacgcacgatttcctcctcgcgttccaaagtcatttccctttaacacaagccaggtgtacaagaagacgctcttcgtcgaattcaccgatcacctgttcaatatcgccaaacccagaccaccatggatgggtcttttggggcctaccatacaagcggaggtgtatgacacagttgttatcactctcaagaacatggcttctcatccggtaagtcttcacgcagtgggcgtgtcctactggaaagcttcagaaggagccgagtatgatgatcagacatcccagagggagaaagaagacgacaaggtatttccaggtgggtctcatacctatgtgtggcaagtgctcaaagagaatggccctatggccagcgatccgccgtgtttgacttacagctaccagtcacacgttgacctcgtcaaggacctcaactccgggttgattggagccttgttggtatgcagggaaggatctcttgccaaagagaagacacagaccctggccaagtttatccttctctttgctgtgttcgatgagggcaaaagttggcatagcgaaacgaagaattccctcatgcaggatcgcgacgcagccagcgccagagcttggcccaagatgcacactgtgaacggatatgtcaataggacgcttcctggcttgattgggtgtcatcggaaaagtgtctactggcacgtgatcggaatggggacaacaccagaggtccactccatatttctcgaaggccataccttccttgttcgaaaccacagacaggcatccttggggatctctcccattacctttctcactgcccaaacgctgcttcgtgacttgggtcagttccttctcttttgccatatcccgtcacaccagcatgatggtatggaagcttatgtgaaagtcgacagttgtcctgaggagccacagttgcgcatgaagaataatgaagaagccgaggattacgacgacgatctcaccgattctgagatggacgtggtgaggtttgatgacgacaactctccctccatcattcaagctcggagcggggcgaagaaacaccccaagacttgggtccactatatagcggcggaagaggaggattgggattacgctcctcttgtattggcaccagatgaccgctcatacaaaagccagtacctcaacaacggaccgcagagaattggccggaagtataagaaagtgcgatttatggcctatacagacgaaacctttaagacaagggaggccatccagcatgagagtgggattttgggacctcttctttacggcgaagttggtgataccctcctcatcatcttcaagaatcaagcttctcgcccctataacatttacccacacgggatcactgacgttaggcctttgtatagcagaagacttcccaaaggcgtgaagcatctcaaagacttccccattttgccaggcgagatctttaagtacaaatggaccattacagtggaagatggaccgactaaatcagaccctcgatgccttacgcggtactattcctccttcgtgaattgggagagagatttggcaagcggactcataggaccactcctcatctgttacaaggaatctgtagaccagaggggtaaccagattatgagtgataaacgcaatgtgatcctttttagcgtcttcgacgagaaccggtcctggtacttgaccgagaatatacaaaggttccttcccaaccccgcaggcgttcagttggaagaccctgagtttcaggccagcaatattatgcactcaatcaacggctatgtgtttgatagtctccagctttctgtttgcctccatgaagtagcctattggtacatcttgtcaattggtgctcaaacagacttcctctccgtcttcttctccggctacacctttaagcacaagggcgtgtatgaggacactctcacactctttccattttctggagaaaccgtgttcatgagcatggagaatccaggcctttggatcttgggttgccacaacagtgattttcgcaatcggggaatgactgctctcctcaaagtcagcagctgtgattggaacacaggcgactatgaggaagattcttacgaggacataagtgcctactttgactccaagaataacgccattgagcccagatcattctcccagaatcctcccgtgcttaaaaggcatcagcgcgaaggtaccagaactactcttcagtctgatcaagaggagattgactatgacgacaccattagcgtggaaatgaagaaggtagatttcgatatctacgacgaggacgggaaccagtctccgcggagctttcagaagaagacgcgacactacttcattgcagcagtcgaaaggctttgggactacggtatgtcatcatcccctcatgtgttgcgcaatagagctcagagtggaagtgttccacagttcaagaaagtcgtctttcaagagtttacagatggcagcttcacacagcctctctatcggggcgagcttaacgaacatttgggactccttggtccctatatccgagccgaagtggaggacaacattatggttacctttaggaatcaagcctctcgcccctacagcttctactcctccctcatcagttatgaggaggatcagagacaaggcgctgaaccacggaagaactttgtgaaaccgaatgagacgaagacctacttctggaaagtacagcaccacatggcccccacaaaagacgaattcgattgcaaagcatgggcgtatttttcagacgttgacttggagaaagatgtacattcaggacttattggtcctttgttggtgtgtcacactaacactctcaatccagcccatggcaggcaggtgacagtccaggaattcgctcttttctttaccatctttgatgagaccaagtcctggtacttcacggaaaacatggagcgcaattgcagagccccctgtaacatacagatggaggaccctacctttaaggaaaattatcggttccacgcaatcaacggatacattatggatacactccctggccttgtgatggctcaggaccaacgaatcaggtggtacctcctcagcatgggttctaatgaaaacatacactccattcacttttcaggacatgtgttcactgtccggaagaaagaagagtataagatggccctctacaatttgtatccaggcgtgtttgagaccgttgaaatgcttccctctaaagctggcatctggagagtagagtgcttgatcggagaacatcttcacgcaggtatgagcaccttgttcctcgtgtacagcaacaaatgtcagaatccacttggcatggccagtggacacattcgcgactttcagatcacagcatctggccagtatggacaatgggccccaaagttggctcgcctccattactccggtagcataaatgcgtggtccactaaagaacctttcagctggattaaggtcgatcttcttgcccccatgatcatccacggcattaagacacagggagcgaggcagaaattctcctccctctacatctcacagttcattattatgtatagtttggacggcaagaagtggcaaacttatagaggtaacagtactggaacagacatggtgttcttcggcaacgttgatagctctggcatcaaacacaacatctttaatcctcccataatagctcggtacatcagattgcatccgacccactacagcattaggagtacactccgaatggagcttatgggttgcgacttgaattcctgttcaatgccactcggaatggagtctaaagccatctctgatgcacagataaccgccagtagctactttacgaacatgtttgctacgtggtcaccctctaaggcaaggcttcatttgcaaggccggtctaatgcctggagacctcaggtgaacaacccgaaagaatggctccaggtggactttcagaagaccatgaaagtaacaggtgtcactactcagggagttaagtccttggatactagcatgtatgtgaaggagttccttatttcctcatcacaagatggccaccagtggaccctcttctttcagaatggtaaggtcaaagtgtttcagggcaatcaagacagcttcacacccgtggtgaacagtcttgatcctccactcttgacacgataccttcgaatccatccacagtcttgggagcaccagattgcattgcgcatggaagtacttggatgcgaggctcaggacctctac

SEQ ID NO: 2246 - protein, 1457 aa, synthetic construct
  REGION 1..1457: note = Variant of human B-domain deleted Factor VIII
MQIELSTCFFLCLLRFCFSATRRYYLGAVELSWDYMQSDLGELPVDARFPPRVPKSFPFNTSQVYKKTLFVEFTDHLFNIAKPRPPWMGLLGPTIQAEVYDTVVITLKNMASHPVSLHAVGVSYWKASEGAEYDDQTSQREKEDDKVFPGGSHTYVWQVLKENGPMASDPPCLTYSYQSHVDLVKDLNSGLIGALLVCREGSLAKEKTQTLAKFILLFAVFDEGKSWHSETKNSLMQDRDAASARAWPKMHTVNGYVNRTLPGLIGCHRKSVYWHVIGMGTTPEVHSIFLEGHTFLVRNHRQASLGISPITFLTAQTLLRDLGQFLLFCHIPSHQHDGMEAYVKVDSCPEEPQLRMKNNEEAEDYDDDLTDSEMDVVRFDDDNSPSIIQARSGAKKHPKTWVHYIAAEEEDWDYAPLVLAPDDRSYKSQYLNNGPQRIGRKYKKVRFMAYTDETFKTREAIQHESGILGPLLYGEVGDTLLIIFKNQASRPYNIYPHGITDVRPLYSRRLPKGVKHLKDFPILPGEIFKYKWTITVEDGPTKSDPRCLTRYYSSFVNWERDLASGLIGPLLICYKESVDQRGNQIMSDKRNVILFSVFDENRSWYLTENIQRFLPNPAGVQLEDPEFQASNIMHSINGYVFDSLQLSVCLHEVAYWYILSIGAQTDFLSVFFSGYTFKHKGVYEDTLTLFPFSGETVFMSMENPGLWILGCHNSDFRNRGMTALLKVSSCDWNTGDYEEDSYEDISAYFDSKNNAIEPRSFSQNPPVLKRHQREGTRTTLQSDQEEIDYDDTISVEMKKVDFDIYDEDGNQSPRSFQKKTRHYFIAAVERLWDYGMSSSPHVLRNRAQSGSVPQFKKVVFQEFTDGSFTQPLYRGELNEHLGLLGPYIRAEVEDNIMVTFRNQASRPYSFYSSLISYEEDQRQGAEPRKNFVKPNETKTYFWKVQHHMAPTKDEFDCKAWAYFSDVDLEKDVHSGLIGPLLVCHTNTLNPAHGRQVTVQEFALFFTIFDETKSWYFTENMERNCRAPCNIQMEDPTFKENYRFHAINGYIMDTLPGLVMAQDQRIRWYLLSMGSNENIHSIHFSGHVFTVRKKEEYKMALYNLYPGVFETVEMLPSKAGIWRVECLIGEHLHAGMSTLFLVYSNKCQNPLGMASGHIRDFQITASGQYGQWAPKLARLHYSGSINAWSTKEPFSWIKVDLLAPMIIHGIKTQGARQKFSSLYISQFIIMYSLDGKKWQTYRGNSTGTDMVFFGNVDSSGIKHNIFNPPIIARYIRLHPTHYSIRSTLRMELMGCDLNSCSMPLGMESKAISDAQITASSYFTNMFATWSPSKARLHLQGRSNAWRPQVNNPKEWLQVDFQKTMKVTGVTTQGVKSLDTSMYVKEFLISSSQDGHQWTLFFQNGKVKVFQGNQDSFTPVVNSLDPPLLTRYLRIHPQSWEHQIALRMEVLGCEAQDLY

SEQ ID NO: 2247 - DNA, 4371 bp, synthetic construct
  misc_feature 1..4371: note = Variant of human B-domain deleted Factor VIII
  source 1..4371: mol_type = other DNA
atgcagattgaactgtctacctgcttcttcctctgtttgctgaggttctgctttagcgccactagacggtactaccttggcgctgtggagctgtcctgggactatatgcagagtgatttgggagagcttcccgtcgacgcacgatttcctcctcgcgttccaaagtcatttccctttaacacaagccaggtgtacaagaagacgctcttcgtcgaattcaccgatcacctgttcaatatcgccaaacccagaccaccatggatgggtcttttggggcctaccatacaagcggaggtgtatgacacagttgttatcactctcaagaacatggcttctcatccggtaagtcttcacgcagtgggcgtgtcctactggaaagcttcagaaggagccgagtatgatgatcagacatcccagagggagaaagaagacgacaaggtatttccaggtgggtctcatacctatgtgtggcaagtgctcaaagagaatggccctatggcaagcgatccgccgtgtttgacttacagctaccagtcacacgttgacctcgtcaaggacctcaactccgggttgattggagccttgttggtatgcagggaaggatctcttgccaaagagaagacacagaccctggccaagtttatccttctctttgctgtgttcgatgagggcaaaagttggcatagcgaaacgaagaattccctcatgcaggatcgcgacgcagccagcgccagagcttggcccaagatgcacactgtgaacggatatgtcaataggacgcttcctggcttgattgggtgtcatcggaaaagtgtctactggcacgtgatcggaatggggacaacaccagaggtccactccatatttctcgaaggccataccttccttgttcgaaaccacagacaggcatccttggggatctctcccattacctttctcactgcccaaacgctgcttcgtgacttgggtcagttccttctcttttgccatatcccgtcacaccagcatgatggtatggaagcttatgtgaaagtcgacagttgtcctgaggagccacagttgcgcatgaagaataatgaagaagccgaggattacgacgacgatctcaccgattctgagatggacgtggtgaggtttgatgacgacaactctccctccatcattcaagctcggagcggggcgaagaaacaccccaagacttgggtccactatatagcggcggaagaggaggattgggattacgctcctcttgtattggcaccagatgaccgctcatacaaaagccagtacctcaacaacggaccgcagagaattggccggaagtataagaaagtgcgatttatggcctatacagacgaaacctttaagacaagggaggccatccagcatgagagtgggattttgggacctcttctttacggcgaagttggtgataccctcctcatcatcttcaagaatcaagcttctcgcccctataacatttacccacacgggatcactgacgttaggcctttgtatagcagaagacttcccaaaggcgtgaagcatctcaaagacttccccattttgccaggcgagatctttaagtacaaatggaccattacagtggaagatggaccgactaaatcggaccctcgatgccttacgcggtactattcctccttcgtgaattgggagagagatttggcaagcggactcataggaccactcctcatctgttacaaggaatctgtagaccagaggggtaaccagattatgagtgataaacgcaatgtgatcctttttagcgtcttcgacgagaaccggtcctggtacttgaccgagaatatacaaaggttccttcccaaccccgcaggcgttcagttggaagaccctgagtttcaggccagcaatattatgcactcaatcaacggctatgtgtttgatagtctccagctttctgtttgcctccatgaagtagcctattggtacatcttgtcaattggtgctcaaacagacttcctctccgtcttcttctccggctacacctttaagcacaagaacgtgtatgaggacactctcacactctttccattttctggagaaaccgtgttcatgagtatggagaatccaggcctttggatcttgggttgccacaacagtgattttcgcaatcggggaatgactgctctcctcaaagtcagcagctgtgattggaacacaggcgactatgaagaggattcttacgaggacataagtgcctactttgactccaagaataacgccattgagcccagatcattctcccagaatcctcccgtgcttaaaaggcatcagcgcgaaggtaccagaactactcttcagtctgatcaagaggagattgactatgacgacaccattagcgtggaaatgaagaaggtagatttcgatatctacgacgagtcggggaaccagtctccgcggagctttcagaagaagacgcgacactacttcattgcagcagtcgaaaggctttgggactacggtatgtcatcatcccctcatgtgttgcgcaatagagctcagagtggaagtgttccacagttcaagaaagtcgtctttcaagagtttacagatggcagcttcacacagcctctctatcggggcgagcttaacgaacatttgggactccttggtccctatatccgagccgaagtggaggacaacattatggttacctttaggaatcaagcctctcgcccctacagcttctactcctccctcatcagttatgaggaggatcagagacaaggcgctgaaccacggaagaactttgtgaaaccgaatgagacgaagacctacttctggaaagtacagcaccacatggcccccacaaaagacgaattcgattgcaaagcatgggcgtatttttcagacgttgacttggagaaagatgtacattcaggacttattggtcctttgttggtgtgtcacactaacactctcaatccagcccatggcaggcaggtgacagtccaggaattcgctcttttctttaccatctttgatgagaccaagtcctggtacttcacggaaaacatggagcgcaattgcagagccccctgtaacatacagatggaggaccctacctttaaggaaaattatcggttccacgcaatcaacggatacattatggatacactccctggccttgtgatggctcaggaccaacgaatcaggtggtacctcctcagcatgggttctaatagtaacatacactccattcacttttcaggacatgtgttcactgtccggaagaaagaagagtataagatggccctctacaatttgtatccaggcgtgtttgagaccgttgaaatgcttcccagtaaagctggcatctggagagtagagtgcttgatcggagaacatcttcacgcaggtatgagcaccttgttcctcgtgtacagcaacaaatgtcagaatccacttggcatggccagtggacacattcgcgactttcagatcacagcatctggccagtatggacaatgggccccaaagttggctcgcctccattactccggtagcataaatgcgtggtccactaaagaacctttcagctggattaaggtcgatcttcttgcccccatgatcatccacggcattaagacacagggagcgaggcagaaattctcctccctctacatctcacagttcattattatgtatagtttggacggcaagaagtggcaaacttatagaggtaacagtactggaacagacatggtgttcttcggcaacgttgatagctctggcatcaaacacaacatctttaatcctcccataatagctcggtacatcagattgcatccgacccactacagcattaggagtacactccgaatggagcttatgggttgcgacttgaattcctgttcaatgccactcggaatggagtctaaagccatctctgatgcacagataaccgccagtagctactttacgaacatgtttgctacgtggtcaccctctaaggcaaggcttcatttgcaaggccggtctaatgcctggagacctcaggtgaacaacccgaaagaatggctccaggtggactttcagaagaccatgaaagtaacaggtgtcactactcagggagttaagtccttggatactagcatgtatgtgaaggagttccttatttcctcatcacaagatggccaccagtggaccctcttctttcagaatggtaaggtcaaagtgtttcagggcaatcaagacagcttcacacccgtggtgaacagtcttgatcctccactcttgacacgataccttcgaatccatccacagtcttgggagcaccagattgcattgcgcatggaagtacttggatgcgaggctcaggacctctac

SEQ ID NO: 2248 - protein, 1457 aa, synthetic construct
  REGION 1..1457: note = Variant of human B-domain deleted Factor VIII
MQIELSTCFFLCLLRFCFSATRRYYLGAVELSWDYMQSDLGELPVDARFPPRVPKSFPFNTSQVYKKTLFVEFTDHLFNIAKPRPPWMGLLGPTIQAEVYDTVVITLKNMASHPVSLHAVGVSYWKASEGAEYDDQTSQREKEDDKVFPGGSHTYVWQVLKENGPMASDPPCLTYSYQSHVDLVKDLNSGLIGALLVCREGSLAKEKTQTLAKFILLFAVFDEGKSWHSETKNSLMQDRDAASARAWPKMHTVNGYVNRTLPGLIGCHRKSVYWHVIGMGTTPEVHSIFLEGHTFLVRNHRQASLGISPITFLTAQTLLRDLGQFLLFCHIPSHQHDGMEAYVKVDSCPEEPQLRMKNNEEAEDYDDDLTDSEMDVVRFDDDNSPSIIQARSGAKKHPKTWVHYIAAEEEDWDYAPLVLAPDDRSYKSQYLNNGPQRIGRKYKKVRFMAYTDETFKTREAIQHESGILGPLLYGEVGDTLLIIFKNQASRPYNIYPHGITDVRPLYSRRLPKGVKHLKDFPILPGEIFKYKWTITVEDGPTKSDPRCLTRYYSSFVNWERDLASGLIGPLLICYKESVDQRGNQIMSDKRNVILFSVFDENRSWYLTENIQRFLPNPAGVQLEDPEFQASNIMHSINGYVFDSLQLSVCLHEVAYWYILSIGAQTDFLSVFFSGYTFKHKNVYEDTLTLFPFSGETVFMSMENPGLWILGCHNSDFRNRGMTALLKVSSCDWNTGDYEEDSYEDISAYFDSKNNAIEPRSFSQNPPVLKRHQREGTRTTLQSDQEEIDYDDTISVEMKKVDFDIYDESGNQSPRSFQKKTRHYFIAAVERLWDYGMSSSPHVLRNRAQSGSVPQFKKVVFQEFTDGSFTQPLYRGELNEHLGLLGPYIRAEVEDNIMVTFRNQASRPYSFYSSLISYEEDQRQGAEPRKNFVKPNETKTYFWKVQHHMAPTKDEFDCKAWAYFSDVDLEKDVHSGLIGPLLVCHTNTLNPAHGRQVTVQEFALFFTIFDETKSWYFTENMERNCRAPCNIQMEDPTFKENYRFHAINGYIMDTLPGLVMAQDQRIRWYLLSMGSNSNIHSIHFSGHVFTVRKKEEYKMALYNLYPGVFETVEMLPSKAGIWRVECLIGEHLHAGMSTLFLVYSNKCQNPLGMASGHIRDFQITASGQYGQWAPKLARLHYSGSINAWSTKEPFSWIKVDLLAPMIIHGIKTQGARQKFSSLYISQFIIMYSLDGKKWQTYRGNSTGTDMVFFGNVDSSGIKHNIFNPPIIARYIRLHPTHYSIRSTLRMELMGCDLNSCSMPLGMESKAISDAQITASSYFTNMFATWSPSKARLHLQGRSNAWRPQVNNPKEWLQVDFQKTMKVTGVTTQGVKSLDTSMYVKEFLISSSQDGHQWTLFFQNGKVKVFQGNQDSFTPVVNSLDPPLLTRYLRIHPQSWEHQIALRMEVLGCEAQDLY

SEQ ID NO: 2249 - DNA, 4371 bp, synthetic construct
  misc_feature 1..4371: note = Variant of human B-domain deleted Factor VIII
  source 1..4371: mol_type = other DNA
atgcagattgaactgtctacctgcttcttcctctgtttgctgaggttctgctttagcgccactagacggtactaccttggcgctgtggagctgtcctgggactatatgcagagtgatttgggagagcttcccgtcgacgcacgatttcctcctcgcgttccaaagtcatttccctttaacacaagccaggtgtacaagaagacgctcttcgtcgaattcaccgatcacctgttcaatatcgccaaacccagaccaccatggatgggtcttttggggcctaccatacaagcggaggtgtatgacacagttgttatcactctcaagaacatggcttctcatccggtaagtcttcacgcagtgggcgtgtcctactggaaagcttcagaaggagccgagtatgatgatcagacatcccagagggagaaagaagacgacaaggtatttccaggtgggtctcatacctatgtgtggcaagtgctcaaagagaatggccctatggccagcgatccgccgtgtttgacttacagctaccagtcacacgttgacctcgtcaaggacctcaactccgggttgattggagccttgttggtatgcagggaaggatctcttgccaaagagaagacacagaccctggccaagtttatccttctctttgctgtgttcgatgagggcaaaagttggcatagcgaaacgaagaattccctcatgcaggatcgcgacgcagccagcgccagagcttggcccaagatgcacactgtgaacggatatgtcaataggacgcttcctggcttgattgggtgtcatcggaaaagtgtctactggcacgtgatcggaatggggacaacaccagaggtccactccatatttctcgaaggccataccttccttgttcgaaaccacagacaggcatccttggggatctctcccattacctttctcactgcccaaacgggtcttcgtgacttgggtcagttccttctcttttgccatatcccgtcacaccagcatgatggtatggaagcttatgtgaaagtcgacagttgtcctgaggagccacagttgcgcatgaagaataatgaagaagccgaggattacgacgacgatctcaccgattctgagatggacgtggtgaggtttgatgacgacaactctccctccatcattcaagctcggagcggggcgaagaaacaccccaagacttgggtccactatatagcggcggaagaggaggattgggattacgctcctcttgtattggcaccagatgaccgctcatacaaaagccagtacctcaacaacggaccgcagagaattggccggaagtataagaaagtgcgatttatggcctatacagacgaaacctttaagacaagggaggccatccagcatgagagtgggattttgggacctcttctttacggcgaagttggtgataccctcctcatcatcttcaagaatcaagcttctcgcccctataacatttacccacacgggatcactgacgttaggcctttgtatagcagaagacttcccaaaggcgtgaagcatctcaaagacttccccattttgccaggcgagatctttaagtacaaatggaccattacagtggaagatggaccgactaaatcagaccctcgatgccttacgcggtactattcctccttcgtgaattgggagagagatttggcaagcggactcataggaccactcctcatctgttacaaggaatctgtagaccagaggggtaaccagattatgagtgataaacgcaatgtgatcctttttagcgtcttcgacgagaaccggtcctggtacttgaccgagaatatacaaaggttccttcccaaccccgcaggcgttcagttggaagaccctgagtttcaggccagcaatattatgcactcaatcaacggctatgtgtttgatagtctccagctttctgtttgcctccatgaagtagcctattggtacatcttgtcaattggtgctcaaacagacttcctctccgtcttcttctccggctacacctttaagcacaagaacgtgtatgaggacactctcacactctttccattttctggagaaaccgtgttcatgagcatggagaatccaggcctttggatcttgggttgccacaacagtgattttcgcaatcggggaatgactgctctcctcaaagtcagcagctgtgattggaacacaggcgactatgaggaagattcttacgaggacataagtgcctactttgactccaagaataacgccattgagcccagatcattctcccagaatcctcccgtgcttaaaaggcatcagcgcgaaggtaccagaactactcttcagtctgatcaagaggagattgactatgacgacaccattagcgtggaaatgaagaaggaggatttcgatatctatgacgaagatgagaaccagtctccgcggagctttcagaagaagacgcgacactacttcattgcagcagtcgaaaggctttgggactacggtatgtcatcatcccctcatgtgttgcgcaatagagctcagagtggaagtgttccacagttcaagaaagtcgtctttcaagagtttacagatggcagcttcacacagcctctctatcggggcgagcttaacgaacatttgggactccttggtccctatatccgagccgaagtggaggacaacattatggttacctttaggaatcaagcctctcgcccctacagcttctactcctccctcatcagttatgaggaggatcagagacaaggcgctgaaccacggaagaactttgtgaaaccgaatgagacgaagacctacttctggaaagtacagcaccacatggcccccacaaaagacgaattcgattgcaaagcatgggcgtatttttcagacgttgacttggagaaagatgtacattcaggacttattggtcctttgttggtgtgtcacactaacactctcaatccagcccatggcaggcaggtgacagtccaggaattcgctcttttctttaccatctttgatgagaccaagtcctggtacttcacggaaaacatggagcgcaattgcagagccccctgtaacatacagatggaggaccctacctttaaggaaaattatcggttccacgcaatcaacggatacattatggatacactccctggccttgtgatggctcaggaccaacgaatcaggtggtacctcctcagcatgggttctaatgagaacatacactccattcacttttcaggacatgtgttcactgtccggaagaaagaagagtataagatggccctctacaatttgtatccaggcgtgtttgagaccgttgaaatgcttccctctaaagctggcatctggagagtagagtgcttgatcggagaacatcttcacgcaggtatgagcaccttgttcctcgtgtacagcaacaaatgtcagaatccacttggcatggccagtggacacattcgcgactttcagatcacagcatctggccagtatggacaatgggccccaaagttggctcgcctccattactccggtagcataaatgcgtggtccactaaagaacctttcagctggattaaggtcgatcttcttgcccccatgatcatccacggcattaagacacagggagcgaggcagaaattctcctccctctacatctcacagttcattattatgtatagtttggacggcaagaagtggcaaacttatagaggtaacagtactggaacagacatggtgttcttcggcaacgttgatagctctggcatcaaacacaacatctttaatcctcccataatagctcggtacatcagattgcatccgacccactacagcattaggagtacactccgaatggagcttatgggttgcgacttgaattcctgttcaatgccactcggaatggagtctaaagccatctctgatgcacagataaccgccagtagctactttacgaacatgtttgctacgtggtcaccctctaaggcaaggcttcatttgcaaggccggtctaatgcctggagacctcaggtgaacaacccgaaagaatggctccaggtggactttcagaagaccatgaaagtaacaggtgtcactactcagggagttaagtccttggatactagcatgtatgtgaaggagttccttatttcctcatcacaagatggccaccagtggaccctcttctttcagaatggtaaggtcaaagtgtttcagggcaatcaagacagcttcacacccgtggtgaacagtcttgatcctccactcttgacacgataccttcgaatccatccacagtcttgggagcaccagattgcattgcgcatggaagtacttggatgcgaggctcaggacctctac

SEQ ID NO: 2250 - protein, 1457 aa, synthetic construct
  REGION 1..1457: note = Variant of human B-domain deleted Factor VIII
MQIELSTCFFLCLLRFCFSATRRYYLGAVELSWDYMQSDLGELPVDARFPPRVPKSFPFNTSQVYKKTLFVEFTDHLFNIAKPRPPWMGLLGPTIQAEVYDTVVITLKNMASHPVSLHAVGVSYWKASEGAEYDDQTSQREKEDDKVFPGGSHTYVWQVLKENGPMASDPPCLTYSYQSHVDLVKDLNSGLIGALLVCREGSLAKEKTQTLAKFILLFAVFDEGKSWHSETKNSLMQDRDAASARAWPKMHTVNGYVNRTLPGLIGCHRKSVYWHVIGMGTTPEVHSIFLEGHTFLVRNHRQASLGISPITFLTAQTGLRDLGQFLLFCHIPSHQHDGMEAYVKVDSCPEEPQLRMKNNEEAEDYDDDLTDSEMDVVRFDDDNSPSIIQARSGAKKHPKTWVHYIAAEEEDWDYAPLVLAPDDRSYKSQYLNNGPQRIGRKYKKVRFMAYTDETFKTREAIQHESGILGPLLYGEVGDTLLIIFKNQASRPYNIYPHGITDVRPLYSRRLPKGVKHLKDFPILPGEIFKYKWTITVEDGPTKSDPRCLTRYYSSFVNWERDLASGLIGPLLICYKESVDQRGNQIMSDKRNVILFSVFDENRSWYLTENIQRFLPNPAGVQLEDPEFQASNIMHSINGYVFDSLQLSVCLHEVAYWYILSIGAQTDFLSVFFSGYTFKHKNVYEDTLTLFPFSGETVFMSMENPGLWILGCHNSDFRNRGMTALLKVSSCDWNTGDYEEDSYEDISAYFDSKNNAIEPRSFSQNPPVLKRHQREGTRTTLQSDQEEIDYDDTISVEMKKEDFDIYDEDENQSPRSFQKKTRHYFIAAVERLWDYGMSSSPHVLRNRAQSGSVPQFKKVVFQEFTDGSFTQPLYRGELNEHLGLLGPYIRAEVEDNIMVTFRNQASRPYSFYSSLISYEEDQRQGAEPRKNFVKPNETKTYFWKVQHHMAPTKDEFDCKAWAYFSDVDLEKDVHSGLIGPLLVCHTNTLNPAHGRQVTVQEFALFFTIFDETKSWYFTENMERNCRAPCNIQMEDPTFKENYRFHAINGYIMDTLPGLVMAQDQRIRWYLLSMGSNENIHSIHFSGHVFTVRKKEEYKMALYNLYPGVFETVEMLPSKAGIWRVECLIGEHLHAGMSTLFLVYSNKCQNPLGMASGHIRDFQITASGQYGQWAPKLARLHYSGSINAWSTKEPFSWIKVDLLAPMIIHGIKTQGARQKFSSLYISQFIIMYSLDGKKWQTYRGNSTGTDMVFFGNVDSSGIKHNIFNPPIIARYIRLHPTHYSIRSTLRMELMGCDLNSCSMPLGMESKAISDAQITASSYFTNMFATWSPSKARLHLQGRSNAWRPQVNNPKEWLQVDFQKTMKVTGVTTQGVKSLDTSMYVKEFLISSSQDGHQWTLFFQNGKVKVFQGNQDSFTPVVNSLDPPLLTRYLRIHPQSWEHQIALRMEVLGCEAQDLY

SEQ ID NO: 2251 - DNA, 4371 bp, synthetic construct
  misc_feature 1..4371: note = Variant of human B-domain deleted Factor VIII
  source 1..4371: mol_type = other DNA
atgcagattgaactgtctacctgcttcttcctctgtttgctgaggttctgctttagcgccactagacggtactaccttggcgctgtggagctgtcctgggactatatgcagagtgatttgggagagcttcccgtcgacgcacgatttcctcctcgcgttccaaagtcatttccctttaacacaagccaggtgtacaagaagacgctcttcgtcgaattcaccgatcacctgttcaatatcgccaaacccagaccaccatggatgggtcttttggggcctaccatacaagcggaggtgtatgacacagttgttatcactctcaagaacatggcttctcatccggtaagtcttcacgcagtgggcgtgtcctactggaaagcttcagaaggagccgagtatgatgatcagacatcccagagggagaaagaagacgacaaggtatttccaggtgggtctcatacctatgtgtggcaagtgctcaaagagaatggccctatggcaagcgatccgccgtgtttgacttacagctaccagtcacacgttgacctcgtcaaggacctcaactccgggttgattggagccttgttggtatgcagggaaggatctcttgccaaagagaagacacagaccctggccaagtttatccttctctttgctgtgttcgatgagggcaaaagttggcatagcgaaacgaagaattccctcatgcaggatcgcgacgcagccagcgccagagcttggcccaagatgcacactgtgaacggatatgtcaataggacgcttcctggcttgattgggtgtcatcggaaaagtgtctactggcacgtgatcggaatggggacaacaccagaggtccactccatatttctcgaaggccataccttccttgttcgaaaccacagacaggcatccttggggatctctcccattacctttctcactgcccaaacgggtcttcgtgacttgggtcagttccttctcttttgccatatcccgtcacaccagcatgatggtatggaagcttatgtgaaagtcgacagttgtcctgaggagccacagttgcgcatgaagaataatgaagaagccgaggattacgacgacgatctcaccgattctgagatggacgtggtgaggtttgatgacgacaactctccctccatcattcaagctcggagcggggcgaagaaacaccccaagacttgggtccactatatagcggcggaagaggaggattgggattacgctcctcttgtattggcaccagatgaccgctcatacaaaagccagtacctcaacaacggaccgcagagaattggccggaagtataagaaagtgcgatttatggcctatacagacgaaacctttaagacaagggaggccatccagcatgagagtgggattttgggacctcttctttacggcgaagttggtgataccctcctcatcatcttcaagaatcaagcttctcgcccctataacatttacccacacgggatcactgacgttaggcctttgtatagcagaagacttcccaaaggcgtgaagcatctcaaagacttccccattttgccaggcgagatctttaagtacaaatggaccattacagtggaagatggaccgactaaatcggaccctcgatgccttacgcggtactattcctccttcgtgaattgggagagagatttggcaagcggactcataggaccactcctcatctgttacaaggaatctgtagaccagaggggtaaccagattatgagtgataaacgcaatgtgatcctttttagcgtcttcgacgagaaccggtcctggtacttgaccgagaatatacaaaggttccttcccaaccccgcaggcgttcagttggaagaccctgagtttcaggccagcaatattatgcactcaatcaacggctatgtgtttgatagtctccagctttctgtttgcctccatgaagtagcctattggtacatcttgtcaattggtgctcaaacagacttcctctccgtcttcttctccggctacacctttaagcacaagaacgtgtatgaggacactctcacactctttccattttctggagaaaccgtgttcatgagcatggagaatccaggcctttggatcttgggttgccacaacagtgattttcgcaatcggggaatgactgctctcctcaaagtcagcagctgtgattggaacacaggcgactattacgaggattcttacgaggacataagtgcctactttgactccaagaataacgccattgagcccagatcattctcccagaatcctcccgtgcttaaaaggcatcagcgcgaaggtaccagaactactcttcagtctgatcaagaggagattgactatgacgacaccattagcgtggaaatgaagaaggaggatttcgatatctatgacgaagatgagaaccagtctccgcggagctttcagaagaagacgcgacactacttcattgcagcagtcgaaaggctttgggactacggtatgtcatcatcccctcatgtgttgcgcaatagagctcagagtggaagtgttccacagttcaagaaagtcgtctttcaagagtttacagatggcagcttcacacagcctctctatcggggcgagcttaacgaacatttgggactccttggtccctatatccgagccgaagtggaggacaacattatggttacctttaggaatcaagcctctcgcccctacagcttctactcctccctcatcagttatgaggaggatcagagacaaggcgctgaaccacggaagaactttgtgaaaccgaatgagacgaagacctacttctggaaagtacagcaccacatggcccccacaaaagacgaattcgattgcaaagcatgggcgtatttttcagacgttgacttggagaaagatgtacattcaggacttattggtcctttgttggtgtgtcacactaacactctcaatccagcccatggcaggcaggtgacagtccaggaattcgctcttttctttaccatctttgatgagaccaagtcctggtacttcacggaaaacatggagcgcaattgcagagccccctgtaacatacagatggaggaccctacctttaaggaaaattatcggttccacgcaatcaacggatacattatggatacactccctggccttgtgatggctcaggaccaacgaatcaggtggtacctcctcagcatgggttctaatgagaacatacactccattcacttttcaggacatgtgttcactgtccggaagaaagaagagtataagatggccctctacaatttgtatccaggcgtgtttgagaccgttgaaatgcttcccatcaaagctggcatctggagagtagagtgcttgatcggagaacatcttcacgcaggtatgagcaccttgttcctcgtgtacagcaacaaatgtcagaatccacttggcatggccagtggacacattcgcgactttcagatcacagcatctggccagtatggacaatgggccccaaagttggctcgcctccattactccggtagcataaatgcgtggtccactaaagaacctttcagctggattaaggtcgatcttcttgcccccatgatcatccacggcattaagacacagggagcgaggcagaaattctcctccctctacatctcacagttcattattatgtatagtttggacggcaagaagtggcaaacttatagaggtaacagtactggaacagacatggtgttcttcggcaacgttgatagctctggcatcaaacacaacatctttaatcctcccataatagctcggtacatcagattgcatccgacccactacagcattaggagtacactccgaatggagcttatgggttgcgacttgaattcctgttcaatgccactcggaatggagtctaaagccatctctgatgcacagataaccgccagtagctactttacgaacatgtttgctacgtggtcaccctctaaggcaaggcttcatttgcaaggccggtctaatgcctggagacctcaggtgaacaacccgaaagaatggctccaggtggactttcagaagaccatgaaagtaacaggtgtcactactcagggagttaagtccttggatactagcatgtatgtgaaggagttccttatttcctcatcacaagatggccaccagtggaccctcttctttcagaatggtaaggtcaaagtgtttcagggcaatcaagacagcttcacacccgtggtgaacagtcttgatcctccactcttgacacgataccttcgaatccatccacagtcttgggagcaccagattgcattgcgcatggaagtacttggatgcgaggctcaggacctctac

SEQ ID NO: 2252 - protein, 1457 aa, synthetic construct
  REGION 1..1457: note = Variant of human B-domain deleted Factor VIII
MQIELSTCFFLCLLRFCFSATRRYYLGAVELSWDYMQSDLGELPVDARFPPRVPKSFPFNTSQVYKKTLFVEFTDHLFNIAKPRPPWMGLLGPTIQAEVYDTVVITLKNMASHPVSLHAVGVSYWKASEGAEYDDQTSQREKEDDKVFPGGSHTYVWQVLKENGPMASDPPCLTYSYQSHVDLVKDLNSGLIGALLVCREGSLAKEKTQTLAKFILLFAVFDEGKSWHSETKNSLMQDRDAASARAWPKMHTVNGYVNRTLPGLIGCHRKSVYWHVIGMGTTPEVHSIFLEGHTFLVRNHRQASLGISPITFLTAQTGLRDLGQFLLFCHIPSHQHDGMEAYVKVDSCPEEPQLRMKNNEEAEDYDDDLTDSEMDVVRFDDDNSPSIIQARSGAKKHPKTWVHYIAAEEEDWDYAPLVLAPDDRSYKSQYLNNGPQRIGRKYKKVRFMAYTDETFKTREAIQHESGILGPLLYGEVGDTLLIIFKNQASRPYNIYPHGITDVRPLYSRRLPKGVKHLKDFPILPGEIFKYKWTITVEDGPTKSDPRCLTRYYSSFVNWERDLASGLIGPLLICYKESVDQRGNQIMSDKRNVILFSVFDENRSWYLTENIQRFLPNPAGVQLEDPEFQASNIMHSINGYVFDSLQLSVCLHEVAYWYILSIGAQTDFLSVFFSGYTFKHKNVYEDTLTLFPFSGETVFMSMENPGLWILGCHNSDFRNRGMTALLKVSSCDWNTGDYYEDSYEDISAYFDSKNNAIEPRSFSQNPPVLKRHQREGTRTTLQSDQEEIDYDDTISVEMKKEDFDIYDEDENQSPRSFQKKTRHYFIAAVERLWDYGMSSSPHVLRNRAQSGSVPQFKKVVFQEFTDGSFTQPLYRGELNEHLGLLGPYIRAEVEDNIMVTFRNQASRPYSFYSSLISYEEDQRQGAEPRKNFVKPNETKTYFWKVQHHMAPTKDEFDCKAWAYFSDVDLEKDVHSGLIGPLLVCHTNTLNPAHGRQVTVQEFALFFTIFDETKSWYFTENMERNCRAPCNIQMEDPTFKENYRFHAINGYIMDTLPGLVMAQDQRIRWYLLSMGSNENIHSIHFSGHVFTVRKKEEYKMALYNLYPGVFETVEMLPIKAGIWRVECLIGEHLHAGMSTLFLVYSNKCQNPLGMASGHIRDFQITASGQYGQWAPKLARLHYSGSINAWSTKEPFSWIKVDLLAPMIIHGIKTQGARQKFSSLYISQFIIMYSLDGKKWQTYRGNSTGTDMVFFGNVDSSGIKHNIFNPPIIARYIRLHPTHYSIRSTLRMELMGCDLNSCSMPLGMESKAISDAQITASSYFTNMFATWSPSKARLHLQGRSNAWRPQVNNPKEWLQVDFQKTMKVTGVTTQGVKSLDTSMYVKEFLISSSQDGHQWTLFFQNGKVKVFQGNQDSFTPVVNSLDPPLLTRYLRIHPQSWEHQIALRMEVLGCEAQDLY

SEQ ID NO: 2253 - DNA, 4371 bp, synthetic construct
  misc_feature 1..4371: note = Variant of human B-domain deleted Factor VIII
  source 1..4371: mol_type = other DNA
atgcagattgaactgtctacctgcttcttcctctgtttgctgaggttctgctttagcgccactagacggtactaccttggcgctgtggagctgtcctgggactatatgcagagtgatttgggagagcttcccgtcgacgcacgatttcctcctcgcgttccaaagtcatttccctttaacacaagccaggtgtacaagaagacgctcttcgtcgaattcaccgatcacctgttcaatatcgccaaacccagaccaccatggatgggtcttttggggcctaccatacaagcggaggtgtatgacacagttgttatcactctcaagaacatggcttctcatccggtaagtcttcacgcagtgggcgtgtcctactggaaagcttcagaaggagccgagtatgatgatcagacatcccagagggagaaagaagacgacaaggtatttccaggtgggtctcatacctatgtgtggcaagtgctcaaagagaatggccctatggccagcgatccgccgtgtttgacttacagctaccagtcacacgttgacctcgtcaaggacctcaactccgggttgattggagccttgttggtatgcagggaaggatctcttgccaaagagaagacacagaccctggccaagtttatccttctctttgctgtgttcgatgagggcaaaagttggcatagcgaaacgaagaattccctcatgcaggatcgcgacgcagccagcgccagagcttggcccaagatgcacactgtgaacggatatgtcaataggacgcttcctggcttgattgggtgtcatcggaaaagtgtctactggcacgtgatcggaatggggacaacaccagaggtccactccatatttctcgaaggccataccttccttgttcgaaaccacagacaggcatccttggggatctctcccattacctttctcactgcccaaacgggtcttcgtgacttgggtcagttccttctcttttgccatatcccgtcacaccagcatgatggtatggaagcttatgtgaaagtcgacagttgtcctgaggagccacagttgcgcatgaagaataatgaagaagccgaggattacgacgacgatctcaccgattctgagatggacgtggtgaggtttgatgacgacaactctccctccatcattcaagctcggagcggggcgaagaaacaccccaagacttgggtccactatatagcggcggaagaggaggattgggattacgctcctcttgtattggcaccagatgaccgctcatacaaaagccagtacctcaacaacggaccgcagagaattggccggaagtataagaaagtgcgatttatggcctatacagacgaaacctttaagacaagggaggccatccagcatgagagtgggattttgggacctcttctttacggcgaagttggtgataccctcctcatcatcttcaagaatcaagcttctcgcccctataacatttacccacacgggatcactgacgttaggcctttgtatagcagaagacttcccaaaggcgtgaagcatctcaaagacttccccattttgccaggcgagatctttaagtacaaatggaccattacagtggaagatggaccgactaaatcggaccctcgatgccttacgcggtactattcctccttcgtgaattgggagagagatttggcaagcggactcataggaccactcctcatctgttacaaggaatctgtagaccagaggggtaaccagattatgagtgataaacgcaatgtgatcctttttagcgtcttcgacgagaaccggtcctggtacttgaccgagaatatacaaaggttccttcccaaccccgcaggcgttcagttggaagaccctgagtttcaggccagcaatattatgcactcaatcaacggctatgtgtttgatagtctccagctttctgtttgcctccatgaagtagcctattggtacatcttgtcaattggtgctcaaacagacttcctctccgtcttcttctccggctacacctttaagcacaagggcgtgtatgaggacactctcacactctttccattttctggagaaaccgtgttcatgagcatggagaatccaggcctttggatcttgggttgccacaacagtgattttcgcaatcggggaatgactgctctcctcaaagtcagcagctgtgattggaacacaggcgactatgaggaagattcttacgaggacataagtgcctactttgactccgagaataacgccattgagcccagatcattctcccagaatcctcccgtgcttaaaaggcatcagcgcgaaggtaccagaactactcttcagtctgatcaagaggagattgactatgacgacaccattagcgtggaaatgaagaaggaggatttcgatatctacgacgaggacgggaaccagtctccgcggagctttcagaagaagacgcgacactacttcattgcagcagtcgaaaggctttgggactacggtatgtcatcatcccctcatgtgttgcgcaatagagctcagagtggaagtgttccacagttcaagaaagtcgtctttcaagagtttacagatggcagcttcacacagcctctctatcggggcgagcttaacgaacatttgggactccttggtccctatatccgagccgaagtggaggacaacattatggttacctttaggaatcaagcctctcgcccctacagcttctactcctccctcatcagttatgaggaggatcagagacaaggcgctgaaccacggaagaactttgtgaaaccgaatgagacgaagacctacttctggaaagtacagcaccacatggcccccacaaaagacgaattcgattgcaaagcatgggcgtatttttcagacgttgacttggagaaagatgtacattcaggacttattggtcctttgttggtgtgtcacactaacactctcaatccagcccatggcaggcaggtgacagtccaggaattcgctcttttctttaccatctttgatgagaccaagtcctggtacttcacggaaaacatggagcgcaattgcagagccccctgtaacatacagatggaggaccctacctttaaggaaaattatcggttccacgcaatcaacggatacattatggatacactccctggccttgtgatggctcaggaccaacgaatcaggtggtacctcctcagcatgggttctaatgaaaacatacactccattcacttttcaggacatgtgttcactgtccggaagaaagaagagtataagatggccctctacaatttgtatccaggcgtgtttgagaccgttgaaatgcttccctctaaagctggcatctggagagtagagtgcttgatcggagaacatcttcacgcaggtatgagcaccttgttcctcgtgtacagcaacaaatgtcagaatccacttggcatggccagtggacacattcgcgactttcagatcacagcatctggccagtatggacaatgggccccaaagttggctcgcctccattactccggtagcataaatgcgtggtccactaaagaacctttcagctggattaaggtcgatcttcttgcccccatgatcatccacggcattaagacacagggagcgaggcagaaattctcctccctctacatctcacagttcattattatgtatagtttggacggcaagaagtggcaaacttatagaggtaacagtactggaacagacatggtgttcttcggcaacgttgatagctctggcatcaaacacaacatctttaatcctcccataatagctcggtacatcagattgcatccgacccactacagcattaggagtacactccgaatggagcttatgggttgcgacttgaattcctgttcaatgccactcggaatggagtctaaagccatctctgatgcacagataaccgccagtagctactttacgaacatgtttgctacgtggtcaccctctaaggcaaggcttcatttgcaaggccggtctaatgcctggagacctcaggtgaacaacccgaaagaatggctccaggtggactttcagaagaccatgaaagtaacaggtgtcactactcagggagttaagtccttggatactagcatgtatgtgaaggagttccttatttcctcatcacaagatggccaccagtggaccctcttctttcagaatggtaaggtcaaagtgtttcagggcaatcaagacagcttcacacccgtggtgaacagtcttgatcctccactcttgacacgataccttcgaatccatccacagtcttgggagcaccagattgcattgcgcatggaagtacttggatgcgaggctcaggacctctac

SEQ ID NO: 2254 - protein, 1457 aa, synthetic construct
  REGION 1..1457: note = Variant of human B-domain deleted Factor VIII
MQIELSTCFFLCLLRFCFSATRRYYLGAVELSWDYMQSDLGELPVDARFPPRVPKSFPFNTSQVYKKTLFVEFTDHLFNIAKPRPPWMGLLGPTIQAEVYDTVVITLKNMASHPVSLHAVGVSYWKASEGAEYDDQTSQREKEDDKVFPGGSHTYVWQVLKENGPMASDPPCLTYSYQSHVDLVKDLNSGLIGALLVCREGSLAKEKTQTLAKFILLFAVFDEGKSWHSETKNSLMQDRDAASARAWPKMHTVNGYVNRTLPGLIGCHRKSVYWHVIGMGTTPEVHSIFLEGHTFLVRNHRQASLGISPITFLTAQTGLRDLGQFLLFCHIPSHQHDGMEAYVKVDSCPEEPQLRMKNNEEAEDYDDDLTDSEMDVVRFDDDNSPSIIQARSGAKKHPKTWVHYIAAEEEDWDYAPLVLAPDDRSYKSQYLNNGPQRIGRKYKKVRFMAYTDETFKTREAIQHESGILGPLLYGEVGDTLLIIFKNQASRPYNIYPHGITDVRPLYSRRLPKGVKHLKDFPILPGEIFKYKWTITVEDGPTKSDPRCLTRYYSSFVNWERDLASGLIGPLLICYKESVDQRGNQIMSDKRNVILFSVFDENRSWYLTENIQRFLPNPAGVQLEDPEFQASNIMHSINGYVFDSLQLSVCLHEVAYWYILSIGAQTDFLSVFFSGYTFKHKGVYEDTLTLFPFSGETVFMSMENPGLWILGCHNSDFRNRGMTALLKVSSCDWNTGDYEEDSYEDISAYFDSENNAIEPRSFSQNPPVLKRHQREGTRTTLQSDQEEIDYDDTISVEMKKEDFDIYDEDGNQSPRSFQKKTRHYFIAAVERLWDYGMSSSPHVLRNRAQSGSVPQFKKVVFQEFTDGSFTQPLYRGELNEHLGLLGPYIRAEVEDNIMVTFRNQASRPYSFYSSLISYEEDQRQGAEPRKNFVKPNETKTYFWKVQHHMAPTKDEFDCKAWAYFSDVDLEKDVHSGLIGPLLVCHTNTLNPAHGRQVTVQEFALFFTIFDETKSWYFTENMERNCRAPCNIQMEDPTFKENYRFHAINGYIMDTLPGLVMAQDQRIRWYLLSMGSNENIHSIHFSGHVFTVRKKEEYKMALYNLYPGVFETVEMLPSKAGIWRVECLIGEHLHAGMSTLFLVYSNKCQNPLGMASGHIRDFQITASGQYGQWAPKLARLHYSGSINAWSTKEPFSWIKVDLLAPMIIHGIKTQGARQKFSSLYISQFIIMYSLDGKKWQTYRGNSTGTDMVFFGNVDSSGIKHNIFNPPIIARYIRLHPTHYSIRSTLRMELMGCDLNSCSMPLGMESKAISDAQITASSYFTNMFATWSPSKARLHLQGRSNAWRPQVNNPKEWLQVDFQKTMKVTGVTTQGVKSLDTSMYVKEFLISSSQDGHQWTLFFQNGKVKVFQGNQDSFTPVVNSLDPPLLTRYLRIHPQSWEHQIALRMEVLGCEAQDLY

SEQ ID NO: 2255 - DNA, 4371 bp, synthetic construct
  misc_feature 1..4371: note = Variant of human B-domain deleted Factor VIII
  source 1..4371: mol_type = other DNA
atgcagattgaactgtctacctgcttcttcctctgtttgctgaggttctgctttagcgccactagacggtactaccttggcgctgtggagctgtcctgggactatatgcagagtgatttgggagagcttcccgtcgacgcacgatttcctcctcgcgttccaaagtcatttccctttaacacaagccaggtgtacaagaagacgctcttcgtcgaattcaccgatcacctgttcaatatcgccaaacccagaccaccatggatgggtcttttggggcctaccatacaagcggaggtgtatgacacagttgttatcactctcaagaacatggcttctcatccggtaagtcttcacgcagtgggcgtgtcctactggaaagcttcagaaggagccgagtatgatgatcagacatcccagagggagaaagaagacgacaaggtatttccaggtgggtctcatacctatgtgtggcaagtgctcaaagagaatggccctatggcaagcgatccgccgtgtttgacttacagctaccagtcacacgttgacctcgtcaaggacctcaactccgggttgattggagccttgttggtatgcagggaaggatctcttgccaaagagaagacacagaccctggccaagtttatccttctctttgctgtgttcgatgagggcaaaagttggcatagcgaaacgaagaattccctcatgcaggatcgcgacgcagccagcgccagagcttggcccaagatgcacactgtgaacggatatgtcaataggacgcttcctggcttgattgggtgtcatcggaaaagtgtctactggcacgtgatcggaatggggacaacaccagaggtccactccatatttctcgaaggccataccttccttgttcgaaaccacagacaggcatccttggggatctctcccattacctttctcactgcccaaacgggtcttcgtgacttgggtcagttccttctcttttgccatatcccgtcacaccagcatgatggtatggaagcttatgtgaaagtcgacagttgtcctgaggagccacagttgcgcatgaagaataatgaagaagccgaggattacgacgacgatctcaccgattctgagatggacgtggtgaggtttgatgacgacaactctccctccatcattcaagctcggagcggggcgaagaaacaccccaagacttgggtccactatatagcggcggaagaggaggattgggattacgctcctcttgtattggcaccagatgaccgctcatacaaaagccagtacctcaacaacggaccgcagagaattggccggaagtataagaaagtgcgatttatggcctatacagacgaaacctttaagacaagggaggccatccagcatgagagtgggattttgggacctcttctttacggcgaagttggtgataccctcctcatcatcttcaagaatcaagcttctcgcccctataacatttacccacacgggatcactgacgttaggcctttgtatagcagaagacttcccaaaggcgtgaagcatctcaaagacttccccattttgccaggcgagatctttaagtacaaatggaccattacagtggaagatggaccgactaaatcggaccctcgatgccttacgcggtactattcctccttcgtgaattgggagagagatttggcaagcggactcataggaccactcctcatctgttacaaggaatctgtagaccagaggggtaaccagattatgagtgataaacgcaatgtgatcctttttagcgtcttcgacgagaaccggtcctggtacttgaccgagaatatacaaaggttccttcccaaccccgcaggcgttcagttggaagaccctgagtttcaggccagcaatattatgcactcaatcaacggctatgtgtttgatagtctccagctttctgtttgcctccatgaagtagcctattggtacatcttgtcaattggtgctcaaacagacttcctctccgtcttcttctccggctacacctttaagcacaagggcgtgtatgaggacactctcacactctttccattttctggagaaaccgtgttcatggaaatggagaatccaggcctttggatcttgggttgccacaacagtgattttcgcaatcggggaatgactgctctcctcaaagtcagcagctgtgattggaacacaggcgactatgaggaagattcttacgaggacataagtgcctactttgactccaagaataacgccattgagcccagatcattctcccagaatcctcccgtgcttaaaaggcatcagcgcgaaggtaccagaactactcttcagtctgatcaagaggagattgactatgacgacaccattagcgtggaaatgaagaaggtagatttcgatatccaggacgagtcggggaaccagtctccgcggagctttcagaagaagacgcgacactacttcattgcagcagtcgaaaggctttgggactacggtatgtcatcatcccctcatgtgttgcgcaatagagctcagagtggaagtgttccacagttcaagaaagtcgtctttcaagagtttacagatggcagcttcacacagcctctctatcggggcgagcttaacgaacatttgggactccttggtccctatatccgagccgaagtggaggacaacattatggttacctttaggaatcaagcctctcgcccctacagcttctactcctccctcatcagttatgaggaggatcagagacaaggcgctgaaccacggaagaactttgtgaaaccgaatgagacgaagacctacttctggaaagtacagcaccacatggcccccacaaaagacgaattcgattgcaaagcatgggcgtatttttcagacgttgacttggagaaagatgtacattcaggacttattggtcctttgttggtgtgtcacactaacactctcaatccagcccatggcaggcaggtgacagtccaggaattcgctcttttctttaccatctttgatgagaccaagtcctggtacttcacggaaaacatggagcgcaattgcagagccccctgtaacatacagatggaggaccctacctttaaggaaaattatcggttccacgcaatcaacggatacattatggatacactccctggccttgtgatggctcaggaccaacgaatcaggtggtacctcctcagcatgggttctaatgagaacatacactccattcacttttcaggacatgtgttcactgtccggaagaaagaagagtataagatggccctctacaatttgtatccaggcgtgtttgagaccgttgaaatgcttccctctaaagctggcatctggagagtagagtgcttgatcggagaacatcttcacgcaggtatgagcaccttgttcctcgtgtacagcaacaaatgtcagaatccacttggcatggccagtggacacattcgcgactttcagatcacagcatctggccagtatggacaatgggccccaaagttggctcgcctccattactccggtagcataaatgcgtggtccactaaagaacctttcagctggattaaggtcgatcttcttgcccccatgatcatccacggcattaagacacagggagcgaggcagaaattctcctccctctacatctcacagttcattattatgtatagtttggacggcaagaagtggcaaacttatagaggtaacagtactggaacagacatggtgttcttcggcaacgttgatagctctggcatcaaacacaacatctttaatcctcccataatagctcggtacatcagattgcatccgacccactacagcattaggagtacactccgaatggagcttatgggttgcgacttgaattcctgttcaatgccactcggaatggagtctaaagccatctctgatgcacagataaccgccagtagctactttacgaacatgtttgctacgtggtcaccctctaaggcaaggcttcatttgcaaggccggtctaatgcctggagacctcaggtgaacaacccgaaagaatggctccaggtggactttcagaagaccatgaaagtaacaggtgtcactactcagggagttaagtccttggatactagcatgtatgtgaaggagttccttatttcctcatcacaagatggccaccagtggaccctcttctttcagaatggtaaggtcaaagtgtttcagggcaatcaagacagcttcacacccgtggtgaacagtcttgatcctccactcttgacacgataccttcgaatccatccacagtcttgggagcaccagattgcattgcgcatggaagtacttggatgcgaggctcaggacctctac

SEQ ID NO: 2256 - protein, 1457 aa, synthetic construct
  REGION 1..1457: note = Variant of human B-domain deleted Factor VIII
MQIELSTCFFLCLLRFCFSATRRYYLGAVELSWDYMQSDLGELPVDARFPPRVPKSFPFNTSQVYKKTLFVEFTDHLFNIAKPRPPWMGLLGPTIQAEVYDTVVITLKNMASHPVSLHAVGVSYWKASEGAEYDDQTSQREKEDDKVFPGGSHTYVWQVLKENGPMASDPPCLTYSYQSHVDLVKDLNSGLIGALLVCREGSLAKEKTQTLAKFILLFAVFDEGKSWHSETKNSLMQDRDAASARAWPKMHTVNGYVNRTLPGLIGCHRKSVYWHVIGMGTTPEVHSIFLEGHTFLVRNHRQASLGISPITFLTAQTGLRDLGQFLLFCHIPSHQHDGMEAYVKVDSCPEEPQLRMKNNEEAEDYDDDLTDSEMDVVRFDDDNSPSIIQARSGAKKHPKTWVHYIAAEEEDWDYAPLVLAPDDRSYKSQYLNNGPQRIGRKYKKVRFMAYTDETFKTREAIQHESGILGPLLYGEVGDTLLIIFKNQASRPYNIYPHGITDVRPLYSRRLPKGVKHLKDFPILPGEIFKYKWTITVEDGPTKSDPRCLTRYYSSFVNWERDLASGLIGPLLICYKESVDQRGNQIMSDKRNVILFSVFDENRSWYLTENIQRFLPNPAGVQLEDPEFQASNIMHSINGYVFDSLQLSVCLHEVAYWYILSIGAQTDFLSVFFSGYTFKHKGVYEDTLTLFPFSGETVFMEMENPGLWILGCHNSDFRNRGMTALLKVSSCDWNTGDYEEDSYEDISAYFDSKNNAIEPRSFSQNPPVLKRHQREGTRTTLQSDQEEIDYDDTISVEMKKVDFDIQDESGNQSPRSFQKKTRHYFIAAVERLWDYGMSSSPHVLRNRAQSGSVPQFKKVVFQEFTDGSFTQPLYRGELNEHLGLLGPYIRAEVEDNIMVTFRNQASRPYSFYSSLISYEEDQRQGAEPRKNFVKPNETKTYFWKVQHHMAPTKDEFDCKAWAYFSDVDLEKDVHSGLIGPLLVCHTNTLNPAHGRQVTVQEFALFFTIFDETKSWYFTENMERNCRAPCNIQMEDPTFKENYRFHAINGYIMDTLPGLVMAQDQRIRWYLLSMGSNENIHSIHFSGHVFTVRKKEEYKMALYNLYPGVFETVEMLPSKAGIWRVECLIGEHLHAGMSTLFLVYSNKCQNPLGMASGHIRDFQITASGQYGQWAPKLARLHYSGSINAWSTKEPFSWIKVDLLAPMIIHGIKTQGARQKFSSLYISQFIIMYSLDGKKWQTYRGNSTGTDMVFFGNVDSSGIKHNIFNPPIIARYIRLHPTHYSIRSTLRMELMGCDLNSCSMPLGMESKAISDAQITASSYFTNMFATWSPSKARLHLQGRSNAWRPQVNNPKEWLQVDFQKTMKVTGVTTQGVKSLDTSMYVKEFLISSSQDGHQWTLFFQNGKVKVFQGNQDSFTPVVNSLDPPLLTRYLRIHPQSWEHQIALRMEVLGCEAQDLY

SEQ ID NO: 2257 - DNA, 4371 bp, synthetic construct
  misc_feature 1..4371: note = Variant of human B-domain deleted Factor VIII
  source 1..4371: mol_type = other DNA
atgcagattgaactgtctacctgcttcttcctctgtttgctgaggttctgctttagcgccactagacggtactaccttggcgctgtggagctgtcctgggactatatgcagagtgatttgggagagcttcccgtcgacgcacgatttcctcctcgcgttccaaagtcatttccctttaacacaagccaggtgtacaagaagacgctcttcgtcgaattcaccgatcacctgttcaatatcgccaaacccagaccaccatggatgggtcttttggggcctaccatacaagcggaggtgtatgacacagttgttatcactctcaagaacatggcttctcatccggtaagtcttcacgcagtgggcgtgtcctactggaaagcttcagaaggagccgagtatgatgatcagacatcccagagggagaaagaagacgacaaggtatttccaggtgggtctcatacctatgtgtggcaagtgctcaaagagaatggccctatggcaagcgatccgccgtgtttgacttacagctaccagtcacacgttgacctcgtcaaggacctcaactccgggttgattggagccttgttggtatgcagggaaggatctcttgccaaagagaagacacagaccctggccaagtttatccttctctttgctgtgttcgatgagggcaaaagttggcatagcgaaacgaagaattccctcatgcaggatcgcgacgcagccagcgccagagcttggcccaagatgcacactgtgaacggatatgtcaataggacgcttcctggcttgattgggtgtcatcggaaaagtgtctactggcacgtgatcggaatggggacaacaccagaggtccactccatatttctcgaaggccataccttccttgttcgaaaccacagacaggcatccttggggatctctcccattacctttctcactgcccaaacgggtcttcgtgacttgggtcagttccttctcttttgccatatcccgtcacaccagcatgatggtatggaagcttatgtgaaagtcgacagttgtcctgaggagccacagttgcgcatgaagaataatgaagaagccgaggattacgacgacgatctcaccgattctgagatggacgtggtgaggtttgatgacgacaactctccctccatcattcaagctcggagcggggcgaagaaacaccccaagacttgggtccactatatagcggcggaagaggaggattgggattacgctcctcttgtattggcaccagatgaccgctcatacaaaagccagtacctcaacaacggaccgcagagaattggccggaagtataagaaagtgcgatttatggcctatacagacgaaacctttaagacaagggaggccatccagcatgagagtgggattttgggacctcttctttacggcgaagttggtgataccctcctcatcatcttcaagaatcaagcttctcgcccctataacatttacccacacgggatcactgacgttaggcctttgtatagcagaagacttcccaaaggcgtgaagcatctcaaagacttccccattttgccaggcgagatctttaagtacaaatggaccattacagtggaagatggaccgactaaatcagaccctcgatgccttacgcggtactattcctccttcgtgaattgggagagagatttggcaagcggactcataggaccactcctcatctgttacaaggaatctgtagaccagaggggtaaccagattatgagtgataaacgcaatgtgatcctttttagcgtcttcgacgagaaccggtcctggtacttgaccgagaatatacaaaggttccttcccaaccccgcaggcgttcagttggaagaccctgagtttcaggccagcaatattatgcactcaatcaacggctatgtgtttgatagtctccagctttctgtttgcctccatgaagtagcctattggtacatcttgtcaattggtgctcaaacagacttcctctccgtcttcttctccggctacacctttaagcacaagggcgtgtatgaggacactctcacactctttccattttctggagaaaccgtgttcatgagtatggagaatccaggcctttggatcttgggttgccacaacagtgattttcgcaatcggggaatgactgctctcctcaaagtcagcagctgtgattggaacacaggcgactatgaggaagattcttacgaggacataagtgcctactttgactccaagaataacgccattgagcccagatcattctcccagaatcctcccgtgcttaaaaggcatcagcgcgaaggtaccagaactactcttcagtctgatcaagaggagattgactatgacgacaccattagcgtggaaatgaagaaggaagatttcgatatccaggacgaggacgggaaccagtctccgcggagctttcagaagaagacgcgacactacttcattgcagcagtcgaaaggctttgggactacggtatgtcatcatcccctcatgtgttgcgcaatagagctcagagtggaagtgttccacagttcaagaaagtcgtctttcaagagtttacagatgccagcttcacacagcctctctatcggggcgagcttaacgaacatttgggactccttggtccctatatccgagccgaagtggaggacaacattatggttacctttaggaatcaagcctctcgcccctacagcttctactcctccctcatcagttatgaggaggatcagagacaaggcgctgaaccacggaagaactttgtgaaaccgaatgagacgaagacctacttctggaaagtacagcaccacatggcccccacaaaagacgaattcgattgcaaagcatgggcgtatttttcagacgttgacttggagaaagatgtacattcaggacttattggtcctttgttggtgtgtcacactaacactctcaatccagcccatggcaggcaggtgacagtccaggaattcgctcttttctttaccatctttgatgagaccaagtcctggtacttcacggaaaacatggagcgcaattgcagagccccctgtaacatacagatggaggaccctacctttaaggaaaattatcggttccacgcaatcaacggatacattatggatacactccctggccttgtgatggctcaggaccaacgaatcaggtggtacctcctcagcatgggttctaatgagaacatacactccattcacttttcaggacatgtgttcactgtccggaagaaagaagagtataagatggccctctacaatttgtatccaggcgtgtttgagaccgttgaaatgcttccctctaaagctggcatctggagagtagagtgcttgatcggagaacatcttcacgcaggtatgagcaccttgttcctcgtgtacagcaacaaatgtcagaatccacttggcatggccagtggacacattcgcgactttcagatcacagcatctggccagtatggacaatgggccccaaagttggctcgcctccattactccggtagcataaatgcgtggtccactaaagaacctttcagctggattaaggtcgatcttcttgcccccatgatcatccacggcattaagacacagggagcgaggcagaaattctcctccctctacatctcacagttcattattatgtatagtttggacggcaagaagtggcaaacttatagaggtaacagtactggaacagacatggtgttcttcggcaacgttgatagctctggcatcaaacacaacatctttaatcctcccataatagctcggtacatcagattgcatccgacccactacagcattaggagtacactccgaatggagcttatgggttgcgacttgaattcctgttcaatgccactcggaatggagtctaaagccatctctgatgcacagataaccgccagtagctactttacgaacatgtttgctacgtggtcaccctctaaggcaaggcttcatttgcaaggccggtctaatgcctggagacctcaggtgaacaacccgaaagaatggctccaggtggactttcagaagaccatgaaagtaacaggtgtcactactcagggagttaagtccttggatactagcatgtatgtgaaggagttccttatttcctcatcacaagatggccaccagtggaccctcttctttcagaatggtaaggtcaaagtgtttcagggcaatcaagacagcttcacacccgtggtgaacagtcttgatcctccactcttgacacgataccttcgaatccatccacagtcttgggagcaccagattgcattgcgcatggaagtacttggatgcgaggctcaggacctctac

SEQ ID NO: 2258 - protein, 1457 aa, synthetic construct
  REGION 1..1457: note = Variant of human B-domain deleted Factor VIII
MQIELSTCFFLCLLRFCFSATRRYYLGAVELSWDYMQSDLGELPVDARFPPRVPKSFPFNTSQVYKKTLFVEFTDHLFNIAKPRPPWMGLLGPTIQAEVYDTVVITLKNMASHPVSLHAVGVSYWKASEGAEYDDQTSQREKEDDKVFPGGSHTYVWQVLKENGPMASDPPCLTYSYQSHVDLVKDLNSGLIGALLVCREGSLAKEKTQTLAKFILLFAVFDEGKSWHSETKNSLMQDRDAASARAWPKMHTVNGYVNRTLPGLIGCHRKSVYWHVIGMGTTPEVHSIFLEGHTFLVRNHRQASLGISPITFLTAQTGLRDLGQFLLFCHIPSHQHDGMEAYVKVDSCPEEPQLRMKNNEEAEDYDDDLTDSEMDVVRFDDDNSPSIIQARSGAKKHPKTWVHYIAAEEEDWDYAPLVLAPDDRSYKSQYLNNGPQRIGRKYKKVRFMAYTDETFKTREAIQHESGILGPLLYGEVGDTLLIIFKNQASRPYNIYPHGITDVRPLYSRRLPKGVKHLKDFPILPGEIFKYKWTITVEDGPTKSDPRCLTRYYSSFVNWERDLASGLIGPLLICYKESVDQRGNQIMSDKRNVILFSVFDENRSWYLTENIQRFLPNPAGVQLEDPEFQASNIMHSINGYVFDSLQLSVCLHEVAYWYILSIGAQTDFLSVFFSGYTFKHKGVYEDTLTLFPFSGETVFMSMENPGLWILGCHNSDFRNRGMTALLKVSSCDWNTGDYEEDSYEDISAYFDSKNNAIEPRSFSQNPPVLKRHQREGTRTTLQSDQEEIDYDDTISVEMKKEDFDIQDEDGNQSPRSFQKKTRHYFIAAVERLWDYGMSSSPHVLRNRAQSGSVPQFKKVVFQEFTDASFTQPLYRGELNEHLGLLGPYIRAEVEDNIMVTFRNQASRPYSFYSSLISYEEDQRQGAEPRKNFVKPNETKTYFWKVQHHMAPTKDEFDCKAWAYFSDVDLEKDVHSGLIGPLLVCHTNTLNPAHGRQVTVQEFALFFTIFDETKSWYFTENMERNCRAPCNIQMEDPTFKENYRFHAINGYIMDTLPGLVMAQDQRIRWYLLSMGSNENIHSIHFSGHVFTVRKKEEYKMALYNLYPGVFETVEMLPSKAGIWRVECLIGEHLHAGMSTLFLVYSNKCQNPLGMASGHIRDFQITASGQYGQWAPKLARLHYSGSINAWSTKEPFSWIKVDLLAPMIIHGIKTQGARQKFSSLYISQFIIMYSLDGKKWQTYRGNSTGTDMVFFGNVDSSGIKHNIFNPPIIARYIRLHPTHYSIRSTLRMELMGCDLNSCSMPLGMESKAISDAQITASSYFTNMFATWSPSKARLHLQGRSNAWRPQVNNPKEWLQVDFQKTMKVTGVTTQGVKSLDTSMYVKEFLISSSQDGHQWTLFFQNGKVKVFQGNQDSFTPVVNSLDPPLLTRYLRIHPQSWEHQIALRMEVLGCEAQDLY

SEQ ID NO: 2259 - DNA, 4371 bp, synthetic construct
  misc_feature 1..4371: note = Variant of human B-domain deleted Factor VIII
  source 1..4371: mol_type = other DNA
atgcagattgaactgtctacctgcttcttcctctgtttgctgaggttctgctttagcgccactagacggtactaccttggcgctgtggagctgtcctgggactatatgcagagtgatttgggagagcttcccgtcgacgcacgatttcctcctcgcgttccaaagtcatttccctttaacacaagccaggtgtacaagaagacgctcttcgtcgaattcaccgatcacctgttcaatatcgccaaacccagaccaccatggatgggtcttttggggcctaccatacaagcggaggtgtatgacacagttgttatcactctcaagaacatggcttctcatccggtaagtcttcacgcagtgggcgtgtcctactggaaagcttcagaaggagccgagtatgatgatcagacatcccagagggagaaagaagacgacaaggtatttccaggtgggtctcatacctatgtgtggcaagtgctcaaagagaatggccctatggcaagcgatccgccgtgtttgacttacagctacctttcacacgttgacctcgtcaaggacctcaactccgggttgattggagccttgttggtatgcagggaaggatctcttgccaaagagaagacacagaccctggccaagtttatccttctctttgctgtgttcgatgagggcaaaagttggcatagcgaaacgaagaattccctcatgcaggatcgcgacgcagccagcgccagagcttggcccaagatgcacactgtgaacggatatgtcaataggacgcttcctggcttgattgggtgtcatcggaaaagtgtctactggcacgtgatcggaatggggacaacaccagaggtccactccatatttctcgaaggccataccttccttgttcgaaaccacagacaggcatccttggggatctctcccattacctttctcactgcccaaacgggtcttcgtgacttgggtcagttccttctcttttgccatatcccgtcacaccagcatgatggtatggaagcttatgtgaaagtcgacagttgtcctgaggagccacagttgcgcatgaagaataatgaagaagccgaggattacgacgacgatctcaccgattctgagatggacgtggtgaggtttgatgacgacaactctccctccatcattcaagctcggagcggggcgaagaaacaccccaagacttgggtccactatatagcggcggaagaggaggattgggattacgctcctcttgtattggcaccagatgaccgctcatacaaaagccagtacctcaacaacggaccgcagagaattggccggaagtataagaaagtgcgatttatggcctatacagacgaaacctttaagacaagggaggccatccagcatgagagtgggattttgggacctcttctttacggcgaagttggtgataccctcctcatcatcttcaagaatcaagcttctcgcccctataacatttacccacacgggatcactgacgttaggcctttgtatagcagaagacttcccaaaggcgtgaagcatctcaaagacttccccattttgccaggcgagatctttaagtacaaatggaccattacagtggaagatggaccgactaaatcggaccctcgatgccttacgcggtactattcctccttcgtgaattgggagagagatttggcaagcggactcataggaccactcctcatctgttacaaggaatctgtagaccagaggggtaaccagattatgagtgataaacgcaatgtgatcctttttagcgtcttcgacgagaaccggtcctggtacttgaccgagaatatacaaaggttccttcccaaccccgcaggcgttcagttggaagaccctgagtttcaggccagcaatattatgcactcaatcaacggctatgtgtttgatagtctccagctttctgtttgcctccatgaagtagcctattggtacatcttgtcaattggtgctcaaacagacttcctctccgtcttcttctccggctacacctttaagcacaagggggtgtatgaggacactctcacactctttccattttctggagaaaccgtgttcatgagcatggagaatccaggcctttggatcttgggttgccacaacagtgattttcgcaatcggggaatgactgctctcctcaaagtcagcagctgtgattggaacacaggcgactatgaggaagattcttacgaggacataagtgcctactttgactccaagaataacgccattgagcccagatcattctcccagaatcctcccgtgcttaaaaggcatcagcgcgaaggtaccagaactactcttcagtctgatcaagaggagattgactatgacgacaccattagcgtggaaatgaagaaggaggatttcgatatctatgacgaagatgagaaccagtctccgcggagctttcagaagaagacgcgacactacttcattgcagcagtcgaaaggctttgggactacggtatgtcatcatcccctcatgtgttgcgcaatagagctcagagtggaagtgttccacagttcaagaaagtcgtctttcaagagtttacagatggcagcttcacacagcctctctatcggggcgagcttaacgaacatttgggactccttggtccctatatccgagccgaagtggaggacaacattatggttacctttaggaatcaagcctctcgcccctacagcttctactcctccctcatcagttatgaggaggatcagagacaaggcgctgaaccacggaagaactttgtgaaaccgaatgagacgaagacctacttctggaaagtacagcaccacatggcccccacaaaagacgaattcgattgcaaagcatgggcgtatttttcagacgttgacttggagaaagatgtacattcaggacttattggtcctttgttggtgtgtcacactaacactctcaatccagcccatggcaggcaggtgacagtccaggaattcgctcttttctttaccatctttgatgagaccaagtcctggtacttcacggaaaacatggagcgcaattgcagagccccctgtaacatacagatggaggaccctacctttaaggaaaattatcggttccacgcaatcaacggatacattatggatacactccctggccttgtgatggctcaggaccaacgaatcaggtggtacctcctcagcatgggttctaatgagaacatacactccattcacttttcaggacatgtgttcactgtccggaagaaagaagagtataagatggccctctacaatttgtatccaggcgtgtttgagaccgttgaaatgcttcccatcaaagctggcatctggagagtagagtgcttgatcggagaacatcttcacgcaggtatgagcaccttgttcctcgtgtacagcaacaaatgtcagaatccacttggcatggccagtggacacattcgcgactttcagatcacagcatctggccagtatggacaatgggccccaaagttggctcgcctccattactccggtagcataaatgcgtggtccactaaagaacctttcagctggattaaggtcgatcttcttgcccccatgatcatccacggcattaagacacagggagcgaggcagaaattctcctccctctacatctcacagttcattattatgtatagtttggacggcaagaagtggcaaacttatagaggtaacagtactggaacagacatggtgttcttcggcaacgttgatagctctggcatcaaacacaacatctttaatcctcccataatagctcggtacatcagattgcatccgacccactacagcattaggagtacactccgaatggagcttatgggttgcgacttgaattcctgttcaatgccactcggaatggagtctaaagccatctctgatgcacagataaccgccagtagctactttacgaacatgtttgctacgtggtcaccctctaaggcaaggcttcatttgcaaggccggtctaatgcctggagacctcaggtgaacaacccgaaagaatggctccaggtggactttcagaagaccatgaaagtaacaggtgtcactactcagggagttaagtccttggatactagcatgtatgtgaaggagttccttatttcctcatcacaagatggccaccagtggaccctcttctttcagaatggtaaggtcaaagtgtttcagggcaatcaagacagcttcacacccgtggtgaacagtcttgatcctccactcttgacacgataccttcgaatccatccacagtcttgggagcaccagattgcattgcgcatggaagtacttggatgcgaggctcaggacctctac

SEQ ID NO: 2260 - protein, 1457 aa, synthetic construct
  REGION 1..1457: note = Variant of human B-domain deleted Factor VIII
MQIELSTCFFLCLLRFCFSATRRYYLGAVELSWDYMQSDLGELPVDARFPPRVPKSFPFNTSQVYKKTLFVEFTDHLFNIAKPRPPWMGLLGPTIQAEVYDTVVITLKNMASHPVSLHAVGVSYWKASEGAEYDDQTSQREKEDDKVFPGGSHTYVWQVLKENGPMASDPPCLTYSYLSHVDLVKDLNSGLIGALLVCREGSLAKEKTQTLAKFILLFAVFDEGKSWHSETKNSLMQDRDAASARAWPKMHTVNGYVNRTLPGLIGCHRKSVYWHVIGMGTTPEVHSIFLEGHTFLVRNHRQASLGISPITFLTAQTGLRDLGQFLLFCHIPSHQHDGMEAYVKVDSCPEEPQLRMKNNEEAEDYDDDLTDSEMDVVRFDDDNSPSIIQARSGAKKHPKTWVHYIAAEEEDWDYAPLVLAPDDRSYKSQYLNNGPQRIGRKYKKVRFMAYTDETFKTREAIQHESGILGPLLYGEVGDTLLIIFKNQASRPYNIYPHGITDVRPLYSRRLPKGVKHLKDFPILPGEIFKYKWTITVEDGPTKSDPRCLTRYYSSFVNWERDLASGLIGPLLICYKESVDQRGNQIMSDKRNVILFSVFDENRSWYLTENIQRFLPNPAGVQLEDPEFQASNIMHSINGYVFDSLQLSVCLHEVAYWYILSIGAQTDFLSVFFSGYTFKHKGVYEDTLTLFPFSGETVFMSMENPGLWILGCHNSDFRNRGMTALLKVSSCDWNTGDYEEDSYEDISAYFDSKNNAIEPRSFSQNPPVLKRHQREGTRTTLQSDQEEIDYDDTISVEMKKEDFDIYDEDENQSPRSFQKKTRHYFIAAVERLWDYGMSSSPHVLRNRAQSGSVPQFKKVVFQEFTDGSFTQPLYRGELNEHLGLLGPYIRAEVEDNIMVTFRNQASRPYSFYSSLISYEEDQRQGAEPRKNFVKPNETKTYFWKVQHHMAPTKDEFDCKAWAYFSDVDLEKDVHSGLIGPLLVCHTNTLNPAHGRQVTVQEFALFFTIFDETKSWYFTENMERNCRAPCNIQMEDPTFKENYRFHAINGYIMDTLPGLVMAQDQRIRWYLLSMGSNENIHSIHFSGHVFTVRKKEEYKMALYNLYPGVFETVEMLPIKAGIWRVECLIGEHLHAGMSTLFLVYSNKCQNPLGMASGHIRDFQITASGQYGQWAPKLARLHYSGSINAWSTKEPFSWIKVDLLAPMIIHGIKTQGARQKFSSLYISQFIIMYSLDGKKWQTYRGNSTGTDMVFFGNVDSSGIKHNIFNPPIIARYIRLHPTHYSIRSTLRMELMGCDLNSCSMPLGMESKAISDAQITASSYFTNMFATWSPSKARLHLQGRSNAWRPQVNNPKEWLQVDFQKTMKVTGVTTQGVKSLDTSMYVKEFLISSSQDGHQWTLFFQNGKVKVFQGNQDSFTPVVNSLDPPLLTRYLRIHPQSWEHQIALRMEVLGCEAQDLY

SEQ ID NO: 2261 - DNA, 4371 bp, synthetic construct
  misc_feature 1..4371: note = Variant of human B-domain deleted Factor VIII
  source 1..4371: mol_type = other DNA
atgcagattgaactgtctacctgcttcttcctctgtttgctgaggttctgctttagcgccactagacggtactaccttggcgctgtggagctgtcctgggactatatgcagagtgatttgggagagcttcccgtcgacgcacgatttcctcctcgcgttccaaagtcatttccctttaacacaagccaggtgtacaagaagacgctcttcgtcgaattcaccgatcacctgttcaatatcgccaaacccagaccaccatggatgggtcttttggggcctaccatacaagcggaggtgtatgacacagttgttatcactctcaagaacatggcttctcatccggtaagtcttcacgcagtgggcgtgtcctactggaaagcttcagaaggagccgagtatgatgatcagacatcccagagggagaaagaagacgacaaggtatttccaggtgggtctcatacctatgtgtggcaagtgctcaaagagaatggccctatggcaagcgatccgccgtgtttgacttacagctacctttcacacgttgacctcgtcaaggacctcaactccgggttgattggagccttgttggtatgcagggaaggatctcttgccaaagagaagacacagaccctggccaagtttatccttctctttgctgtgttcgatgagggcaaaagttggcatagcgaaacgaagaattccctcatgcaggatcgcgacgcagccagcgccagagcttggcccaagatgcacactgtgaacggatatgtcaataggacgcttcctggcttgattgggtgtcatcggaaaagtgtctactggcacgtgatcggaatggggacaacaccagaggtccactccatatttctcgaaggccataccttccttgttcgaaaccacagacaggcatccttggggatctctcccattacctttctcactgcccaaacgggtcttcgtgacttgggtcagttccttctcttttgccatatcccgtcacaccagcatgatggtatggaagcttatgtgaaagtcgacagttgtcctgaggagccacagttgcgcatgaagaataatgaagaagccgaggattacgacgacgatctcaccgattctgagatggacgtggtgaggtttgatgacgacaactctccctccatcattcaagctcggagcggggcgaagaaacaccccaagacttgggtccactatatagcggcggaagaggaggattgggattacgctcctcttgtattggcaccagatgaccgctcatacaaaagccagtacctcaacaacggaccgcagagaattggccggaagtataagaaagtgcgatttatggcctatacagacgaaacctttaagacaagggaggccatccagcatgagagtgggattttgggacctcttctttacggcgaagttggtgataccctcctcatcatcttcaagaatcaagcttctcgcccctataacatttacccacacgggatcactgacgttaggcctttgtatagcagaagacttcccaaaggcgtgaagcatctcaaagacttccccattttgccaggcgagatctttaagtacaaatggaccattacagtggaagatggaccgactaaaccggaccctcgatgccttacgcggtactattcctccttcgtgaattgggagagagatttggcaagcggactcataggaccactcctcatctgttacaaggaatctgtagaccagaggggtaaccagattatgagtgataaacgcaatgtgatcctttttagcgtcttcgacgagaaccggtcctggtacttgaccgagaatatacaaaggttccttcccaaccccgcaggcgttcagttggaagaccctgagtttcaggccagcaatattatgcactcaatcaacggctatgtgtttgatagtctccagctttctgtttgcctccatgaagtagcctattggtacatcttgtcaattggtgctcaaacagacttcctctccgtcttcttctccggctacacctttaagcacaagggggtgtatgaggacactctcacactctttccattttctggagaaaccgtgttcatgagcatggagaatccaggcctttggatcttgggttgccacaacagtgattttcgcaatcggggaatgactgctctcctcaaagtcagcagctgtgattggaacacaggcgactatgaggaagattcttacgaggacataagtgcctactttgactccaaaaataacgccattgagcccagatcattctcccagaatcctcccgtgcttaaaaggcatcagcgcgaaggtaccagaactactcttcagtctgatcaagaggagattgactatgacgacaccattagcgtggaaatgaagaaggaggatttcgatatctatgacgaggatgagaaccagtctccgcggagctttcagaagaagacgcgacactacttcattgcagcagtcgaaaggctttgggactacggtatgtcatcatcccctcatgtgttgcgcaatagagctcagagtggaagtgttccacagttcaagaaagtcgtctttcaagagtttacagatggcagcttcacacagcctctctatcggggcgagcttaacgaacatttgggactccttggtccctatatccgagccgaagtggaggacaacattatggttacctttaggaatcaagcctctcgcccctacagcttctactcctccctcatcagttatgaggaggatcagagacaaggcgctgaaccacggaagaactttgtgaaaccgaatgagacgaagacctacttctggaaagtacagcaccacatggcccccacaaaagacgaattcgattgcaaagcatgggcgtatttttcagacgttgacttggagaaagatgtacattcaggacttattggtcctttgttggtgtgtcacactaacactctcaatccagcccatggcaggcaggtgacagtccaggaattcgctcttttctttaccatctttgatgagaccaagtcctggtacttcacggaaaacatggagcgcaattgcagagccccctgtaacatacagatggaggaccctacctttaaggaaaattatcggttccacgcaatcaacggatacattatggatacactccctggccttgtgatggctcaggaccaacgaatcaggtggtacctcctcagcatgggttctaatgagaacatacactccattcacttttcaggacatgtgttcactgtccggaagaaagaagagtataagatggccctctacaatttgtatccaggcgtgtttgagaccgttgaaatgcttccctctaaagctggcatctggagagtagagtgcttgatcggagaacatcttcacgcaggtatgagcaccttgttcctcgtgtacagcaacaaatgtcagaatccacttggcatggccagtggacacattcgcgactttcagatcacagcatctggccagtatggacaatgggccccaaagttggctcgcctccattactccggtagcataaatgcgtggtccactaaagaacctttcagctggattaaggtcgatcttcttgcccccatgatcatccacggcattaagacacagggagcgaggcagaaattctcctccctctacatctcacagttcattattatgtatagtttggacggcaagaagtggcaaacttatagaggtaacagtactggaacagacatggtgttcttcggcaacgttgatagctctggcatcaaacacaacatctttaatcctcccataatagctcggtacatcagattgcatccgacccactacagcattaggagtacactccgaatggagcttatgggttgcgacttgaattcctgttcaatgccactcggaatggagtctaaagccatctctgatgcacagataaccgccagtagctactttacgaacatgtttgctacgtggtcaccctctaaggcaaggcttcatttgcaaggccggtctaatgcctggagacctcaggtgaacaacccgaaagaatggctccaggtggactttcagaagaccatgaaagtaacaggtgtcactactcagggagttaagtccttggatactagcatgtatgtgaaggagttccttatttcctcatcacaagatggccaccagtggaccctcttctttcagaatggtaaggtcaaagtgtttcagggcaatcaagacagcttcacacccgtggtgaacagtcttgatcctccactcttgacacgataccttcgaatccatccacagtcttgggagcaccagattgcattgcgcatggaagtacttggatgcgaggctcaggacctctac

SEQ ID NO: 2262 - protein, 1457 aa, synthetic construct
  REGION 1..1457: note = Variant of human B-domain deleted Factor VIII
MQIELSTCFFLCLLRFCFSATRRYYLGAVELSWDYMQSDLGELPVDARFPPRVPKSFPFNTSQVYKKTLFVEFTDHLFNIAKPRPPWMGLLGPTIQAEVYDTVVITLKNMASHPVSLHAVGVSYWKASEGAEYDDQTSQREKEDDKVFPGGSHTYVWQVLKENGPMASDPPCLTYSYLSHVDLVKDLNSGLIGALLVCREGSLAKEKTQTLAKFILLFAVFDEGKSWHSETKNSLMQDRDAASARAWPKMHTVNGYVNRTLPGLIGCHRKSVYWHVIGMGTTPEVHSIFLEGHTFLVRNHRQASLGISPITFLTAQTGLRDLGQFLLFCHIPSHQHDGMEAYVKVDSCPEEPQLRMKNNEEAEDYDDDLTDSEMDVVRFDDDNSPSIIQARSGAKKHPKTWVHYIAAEEEDWDYAPLVLAPDDRSYKSQYLNNGPQRIGRKYKKVRFMAYTDETFKTREAIQHESGILGPLLYGEVGDTLLIIFKNQASRPYNIYPHGITDVRPLYSRRLPKGVKHLKDFPILPGEIFKYKWTITVEDGPTKPDPRCLTRYYSSFVNWERDLASGLIGPLLICYKESVDQRGNQIMSDKRNVILFSVFDENRSWYLTENIQRFLPNPAGVQLEDPEFQASNIMHSINGYVFDSLQLSVCLHEVAYWYILSIGAQTDFLSVFFSGYTFKHKGVYEDTLTLFPFSGETVFMSMENPGLWILGCHNSDFRNRGMTALLKVSSCDWNTGDYEEDSYEDISAYFDSKNNAIEPRSFSQNPPVLKRHQREGTRTTLQSDQEEIDYDDTISVEMKKEDFDIYDEDENQSPRSFQKKTRHYFIAAVERLWDYGMSSSPHVLRNRAQSGSVPQFKKVVFQEFTDGSFTQPLYRGELNEHLGLLGPYIRAEVEDNIMVTFRNQASRPYSFYSSLISYEEDQRQGAEPRKNFVKPNETKTYFWKVQHHMAPTKDEFDCKAWAYFSDVDLEKDVHSGLIGPLLVCHTNTLNPAHGRQVTVQEFALFFTIFDETKSWYFTENMERNCRAPCNIQMEDPTFKENYRFHAINGYIMDTLPGLVMAQDQRIRWYLLSMGSNENIHSIHFSGHVFTVRKKEEYKMALYNLYPGVFETVEMLPSKAGIWRVECLIGEHLHAGMSTLFLVYSNKCQNPLGMASGHIRDFQITASGQYGQWAPKLARLHYSGSINAWSTKEPFSWIKVDLLAPMIIHGIKTQGARQKFSSLYISQFIIMYSLDGKKWQTYRGNSTGTDMVFFGNVDSSGIKHNIFNPPIIARYIRLHPTHYSIRSTLRMELMGCDLNSCSMPLGMESKAISDAQITASSYFTNMFATWSPSKARLHLQGRSNAWRPQVNNPKEWLQVDFQKTMKVTGVTTQGVKSLDTSMYVKEFLISSSQDGHQWTLFFQNGKVKVFQGNQDSFTPVVNSLDPPLLTRYLRIHPQSWEHQIALRMEVLGCEAQDLY

SEQ ID NO: 2263 - DNA, 4371 bp, synthetic construct
  misc_feature 1..4371: note = Variant of human B-domain deleted Factor VIII
  source 1..4371: mol_type = other DNA
atgcagattgaactgtctacctgcttcttcctctgtttgctgaggttctgctttagcgccactagacggtactaccttggcgctgtggagctgtcctgggactatatgcagagtgatttgggagagcttcccgtcgacgcacgatttcctcctcgcgttccaaagtcatttccctttaacacaagccaggtgtacaagaagacgctcttcgtcgaattcaccgatcacctgttcaatatcgccaaacccagaccaccatggatgggtcttttggggcctaccatacaagcggaggtgtatgacacagttgttatcactctcaagaacatggcttctcatccggtaagtcttcacgcagtgggcgtgtcctactggaaagcttcagaaggagccgagtatgatgatcagacatcccagagggagaaagaagacgacaaggtatttccaggtgggtctcatacctatgtgtggcaagtgctcaaagagaatggccctatggcaagcgatccgccgtgtttgacttacagctacctttcacacgttgacctcgtcaaggacctcaactccgggttgattggagccttgttggtatgcagggaaggatctcttgccaaagagaagacacagaccctggccaagtttatccttctctttgctgtgttcgatgagggcaaaagttggcatagcgaaacgaagaattccctcatgcaggatcgcgacgcagccagcgccagagcttggcccaagatgcacactgtgaacggatatgtcaataggacgcttcctggcttgattgggtgtcatcggaaaagtgtctactggcacgtgatcggaatggggacaacaccagaggtccactccatatttctcgaaggccataccttccttgttcgaaaccacagacaggcatccttggggatctctcccattacctttctcactgcccaaacgggtcttcgtgacttgggtcagttccttctcttttgccatatcccgtcacaccagcatgatggtatggaagcttatgtgaaagtcgacagttgtcctgaggagccacagttgcgcatgaagaataatgaagaagccgaggattacgacgacgatctcaccgattctgagatggacgtggtgaggtttgatgacgacaactctccctccatcattcaagctcggagcggggcgaagaaacaccccaagacttgggtccactatatagcggcggaagaggaggattgggattacgctcctcttgtattggcaccagatgaccgctcatacaaaagccagtacctcaacaacggaccgcagagaattggccggaagtataagaaagtgcgatttatggcctatacagacgaaacctttaagacaagggaggccatccagcatgagagtgggattttgggacctcttctttacggcgaagttggtgataccctcctcatcatcttcaagaatcaagcttctcgcccctataacatttacccacacgggatcactgacgttaggcctttgtatagcagaagacttcccaaaggcgtgaagcatctcaaagacttccccattttgccaggcgagatctttaagtacaaatggaccattacagtggaagatggaccgactaaaccggaccctcgatgccttacgcggtactattcctccttcgtgaattgggagagagatttggcaagcggactcataggaccactcctcatctgttacaaggaatctgtagaccagaggggtaaccagattatgagtgataaacgcaatgtgatcctttttagcgtcttcgacgagaaccggtcctggtacttgaccgagaatatacaaaggttccttcccaaccccgcaggcgttcagttggaagaccctgagtttcaggccagcaatattatgcactcaatcaacggctatgtgtttgatagtctccagctttctgtttgcctccatgaagtagcctattggtacatcttgtcaattggtgctcaaacagacttcctctccgtcttcttctccggctacacctttaagcacaagggggtgtatgaggacactctcacactctttccattttctggagaaaccgtgttcatgagcatggagaatccaggcctttggatcttgggttgccacaacagtgattttcgcaatcggggaatgactgctctcctcaaagtcagcagctgtgattggaacacaggcgactattacggggattcttacgaggacataagtgcctactttgactccaagaataacgccattgagcccagatcattctcccagaatcctcccgtgcttaaaaggcatcagcgcgaaggtaccagaactactcttcagtctgatcaagaggagattgactatgacgacaccattagcgtggaaatgaagaaggaggatttcgatatctatgacgaggatgggaaccagtctccgcggagctttcagaagaagacgcgacactacttcattgcagcagtcgaaaggctttgggactacggtatgtcatcatcccctcatgtgttgcgcaatagagctcagagtggaagtgttccacagttcaagaaagtcgtctttcaagagtttacagatggcagcttcacacagcctctctatcggggcgagcttaacgaacatttgggactccttggtccctatatccgagccgaagtggaggacaacattatggttacctttaggaatcaagcctctcgcccctacagcttctactcctccctcatcagttatgaggaggatcagagacaaggcgctgaaccacggaagaactttgtgaaaccgaatgagacgaagacctacttctggaaagtacagcaccacatggcccccacaaaagacgaattcgattgcaaagcatgggcgtatttttcagacgttgacttggagaaagatgtacattcaggacttattggtcctttgttggtgtgtcacactaacactctcaatccagcccatggcaggcaggtgacagtccaggaattcgctcttttctttaccatctttgatgagaccaagtcctggtacttcacggaaaacatggagcgcaattgcagagccccctgtaacatacagatggaggaccctacctttaaggaaaattatcggttccacgcaatcaacggatacattatggatacactccctggccttgtgatggctcaggaccaacgaatcaggtggtacctcctcagcatgggttctaatgagaacatacactccattcacttttcaggacatgtgttcactgtccggaagaaagaagagtataagatggccctctacaatttgtatccaggcgtgtttgagaccgttgaaatgcttcccagcaaagctggcatctggagagtagagtgcttgatcggagaacatcttcacgcaggtatgagcaccttgttcctcgtgtacagcaacaaatgtcagaatccacttggcatggccagtggacacattcgcgactttcagatcacagcatctggccagtatggacaatgggccccaaagttggctcgcctccattactccggtagcataaatgcgtggtccactaaagaacctttcagctggattaaggtcgatcttcttgcccccatgatcatccacggcattaagacacagggagcgaggcagaaattctcctccctctacatctcacagttcattattatgtatagtttggacggcaagaagtggcaaacttatagaggtaacagtactggaacagacatggtgttcttcggcaacgttgatagctctggcatcaaacacaacatctttaatcctcccataatagctcggtacatcagattgcatccgacccactacagcattaggagtacactccgaatggagcttatgggttgcgacttgaattcctgttcaatgccactcggaatggagtctaaagccatctctgatgcacagataaccgccagtagctactttacgaacatgtttgctacgtggtcaccctctaaggcaaggcttcatttgcaaggccggtctaatgcctggagacctcaggtgaacaacccgaaagaatggctccaggtggactttcagaagaccatgaaagtaacaggtgtcactactcagggagttaagtccttggatactagcatgtatgtgaaggagttccttatttcctcatcacaagatggccaccagtggaccctcttctttcagaatggtaaggtcaaagtgtttcagggcaatcaagacagcttcacacccgtggtgaacagtcttgatcctccactcttgacacgataccttcgaatccatccacagtcttgggagcaccagattgcattgcgcatggaagtacttggatgcgaggctcaggacctctac

SEQ ID NO: 2264 - protein, 1457 aa, synthetic construct
  REGION 1..1457: note = Variant of human B-domain deleted Factor VIII
MQIELSTCFFLCLLRFCFSATRRYYLGAVELSWDYMQSDLGELPVDARFPPRVPKSFPFNTSQVYKKTLFVEFTDHLFNIAKPRPPWMGLLGPTIQAEVYDTVVITLKNMASHPVSLHAVGVSYWKASEGAEYDDQTSQREKEDDKVFPGGSHTYVWQVLKENGPMASDPPCLTYSYLSHVDLVKDLNSGLIGALLVCREGSLAKEKTQTLAKFILLFAVFDEGKSWHSETKNSLMQDRDAASARAWPKMHTVNGYVNRTLPGLIGCHRKSVYWHVIGMGTTPEVHSIFLEGHTFLVRNHRQASLGISPITFLTAQTGLRDLGQFLLFCHIPSHQHDGMEAYVKVDSCPEEPQLRMKNNEEAEDYDDDLTDSEMDVVRFDDDNSPSIIQARSGAKKHPKTWVHYIAAEEEDWDYAPLVLAPDDRSYKSQYLNNGPQRIGRKYKKVRFMAYTDETFKTREAIQHESGILGPLLYGEVGDTLLIIFKNQASRPYNIYPHGITDVRPLYSRRLPKGVKHLKDFPILPGEIFKYKWTITVEDGPTKPDPRCLTRYYSSFVNWERDLASGLIGPLLICYKESVDQRGNQIMSDKRNVILFSVFDENRSWYLTENIQRFLPNPAGVQLEDPEFQASNIMHSINGYVFDSLQLSVCLHEVAYWYILSIGAQTDFLSVFFSGYTFKHKGVYEDTLTLFPFSGETVFMSMENPGLWILGCHNSDFRNRGMTALLKVSSCDWNTGDYYGDSYEDISAYFDSKNNAIEPRSFSQNPPVLKRHQREGTRTTLQSDQEEIDYDDTISVEMKKEDFDIYDEDGNQSPRSFQKKTRHYFIAAVERLWDYGMSSSPHVLRNRAQSGSVPQFKKVVFQEFTDGSFTQPLYRGELNEHLGLLGPYIRAEVEDNIMVTFRNQASRPYSFYSSLISYEEDQRQGAEPRKNFVKPNETKTYFWKVQHHMAPTKDEFDCKAWAYFSDVDLEKDVHSGLIGPLLVCHTNTLNPAHGRQVTVQEFALFFTIFDETKSWYFTENMERNCRAPCNIQMEDPTFKENYRFHAINGYIMDTLPGLVMAQDQRIRWYLLSMGSNENIHSIHFSGHVFTVRKKEEYKMALYNLYPGVFETVEMLPSKAGIWRVECLIGEHLHAGMSTLFLVYSNKCQNPLGMASGHIRDFQITASGQYGQWAPKLARLHYSGSINAWSTKEPFSWIKVDLLAPMIIHGIKTQGARQKFSSLYISQFIIMYSLDGKKWQTYRGNSTGTDMVFFGNVDSSGIKHNIFNPPIIARYIRLHPTHYSIRSTLRMELMGCDLNSCSMPLGMESKAISDAQITASSYFTNMFATWSPSKARLHLQGRSNAWRPQVNNPKEWLQVDFQKTMKVTGVTTQGVKSLDTSMYVKEFLISSSQDGHQWTLFFQNGKVKVFQGNQDSFTPVVNSLDPPLLTRYLRIHPQSWEHQIALRMEVLGCEAQDLY

SEQ ID NO: 2265 - DNA, 4371 bp, synthetic construct
  misc_feature 1..4371: note = Variant of human B-domain deleted Factor VIII
  source 1..4371: mol_type = other DNA
atgcagattgaactgtctacctgcttcttcctctgtttgctgaggttctgctttagcgccactagacggtactaccttggcgctgtggagctgtcctgggactatatgcagagtgatttgggagagcttcccgtcgacgcacgatttcctcctcgcgttccaaagtcatttccctttaacacaagccaggtgtacaagaagacgctcttcgtcgaattcaccgatcacctgttcaatatcgccaaacccagaccaccatggatgggtcttttggggcctaccatacaagcggaggtgtatgacacagttgttatcactctcaagaacatggcttctcatccggtaagtcttcacgcagtgggcgtgtcctactggaaagcttcagaaggagccgagtatgatgatcagacatcccagagggagaaagaagacgacaaggtatttccaggtgggtctcatacctatgtgtggcaagtgctcaaagagaatggccctatggcaagcgatccgccgtgtttgacttacagctacctttcacacgttgacctcgtcaaggacctcaactccgggttgattggagccttgttggtatgcagggaaggatctcttgccaaagagaagacacagaccctggccaagtttatccttctctttgctgtgttcgatgagggcaaaagttggcatagcgaaacgaagaattccctcatgcaggatcgcgacgcagccagcgccagagcttggcccaagatgcacactgtgaacggatatgtcaataggacgcttcctggcttgattgggtgtcatcggaaaagtgtctactggcacgtgatcggaatggggacaacaccagaggtccactccatatttctcgaaggccataccttccttgttcgaaaccacagacaggcatccttggggatctctcccattacctttctcactgcccaaacgggtcttcgtgacttgggtcagttccttctcttttgccatatcccgtcacaccagcatgatggtatggaagcttatgtgaaagtcgacagttgtcctgaggagccacagttgcgcatgaagaataatgaagaagccgaggattacgacgacgatctcaccgattctgagatggacgtggtgaggtttgatgacgacaactctccctccatcattcaagctcggagcggggcgaagaaacaccccaagacttgggtccactatatagcggcggaagaggaggattgggattacgctcctcttgtattggcaccagatgaccgctcatacaaaagccagtacctcaacaacggaccgcagagaattggccggaagtataagaaagtgcgatttatggcctatacagacgaaacctttaagacaagggaggccatccagcatgagagtgggattttgggacctcttctttacggcgaagttggtgataccctcctcatcatcttcaagaatcaagcttctcgcccctataacatttacccacacgggatcactgacgttaggcctttgtatagcagaagacttcccaaaggcgtgaagcatctcaaagacttccccattttgccaggcgagatctttaagtacaaatggaccattacagtggaagatggaccgactaaaccggaccctcgatgccttacgcggtactattcctccttcgtgaattgggagagagatttggcaagcggactcataggaccactcctcatctgttacaaggaatctgtagaccagaggggtaaccagattatgagtgataaacgcaatgtgatcctttttagcgtcttcgacgagaaccggtcctggtacttgaccgagaatatacaaaggttccttcccaaccccgcaggcgttcagttggaagaccctgagtttcaggccagcaatattatgcactcaatcaacggctatgtgtttgatagtctccagctttctgtttgcctccatgaagtagcctattggtacatcttgtcaattggtgctcaaacagacttcctctccgtcttcttctccggctacacctttaagcacaagggggtgtatgaggacactctcacactctttccattttctggagaaaccgtgttcatgagcatggagaatccaggcctttggatcttgggttgccacaacagtgattttcgcaatcggggaatgactgctctcctcaaagtcagcagctgtgattggaacacaggcgactattacgaggattcttacgaggacataagtgcctactttgactccaaaaataacgccattgagcccagatcattctcccagaatcctcccgtgcttaaaaggcatcagcgcgaaggtaccagaactactcttcagtctgatcaagaggagattgactatgacgacaccattagcgtggaaatgaagaaggaggatttcgatatctatgacgaggatgggaaccagtctccgcggagctttcagaagaagacgcgacactacttcattgcagcagtcgaaaggctttgggactacggtatgtcatcatcccctcatgtgttgcgcaatagagctcagagtggaagtgttccacagttcaagaaagtcgtctttcaagagtttacagatggcagcttcacacagcctctctatcggggcgagcttaacgaacatttgggactccttggtccctatatccgagccgaagtggaggacaacattatggttacctttaggaatcaagcctctcgcccctacagcttctactcctccctcatcagttatgaggaggatcagagacaaggcgctgaaccacggaagaactttgtgaaaccgaatgagacgaagacctacttctggaaagtacagcaccacatggcccccacaaaagacgaattcgattgcaaagcatgggcgtatttttcagacgttgacttggagaaagatgtacattcaggacttattggtcctttgttggtgtgtcacactaacactctcaatccagcccatggcaggcaggtgacagtccaggaattcgctcttttctttaccatctttgatgagaccaagtcctggtacttcacggaaaacatggagcgcaattgcagagccccctgtaacatacagatggaggaccctacctttaaggaaaattatcggttccacgcaatcaacggatacattatggatacactccctggccttgtgatggctcaggaccaacgaatcaggtggtacctcctcagcatgggttctaatgagaacatacactccattcacttttcaggacatgtgttcactgtccggaagggtgaagagtataagatggccctctacaatttgtatccaggcgtgtttgagaccgttgaaatgcttccctctaaagctggcatctggagagtagagtgcttgatcggagaacatcttcacgcaggtatgagcaccttgttcctcgtgtacagcaacaaatgtcagaatccacttggcatggccagtggacacattcgcgactttcagatcacagcatctggccagtatggacaatgggccccaaagttggctcgcctccattactccggtagcataaatgcgtggtccactaaagaacctttcagctggattaaggtcgatcttcttgcccccatgatcatccacggcattaagacacagggagcgaggcagaaattctcctccctctacatctcacagttcattattatgtatagtttggacggcaagaagtggcaaacttatagaggtaacagtactggaacagacatggtgttcttcggcaacgttgatagctctggcatcaaacacaacatctttaatcctcccataatagctcggtacatcagattgcatccgacccactacagcattaggagtacactccgaatggagcttatgggttgcgacttgaattcctgttcaatgccactcggaatggagtctaaagccatctctgatgcacagataaccgccagtagctactttacgaacatgtttgctacgtggtcaccctctaaggcaaggcttcatttgcaaggccggtctaatgcctggagacctcaggtgaacaacccgaaagaatggctccaggtggactttcagaagaccatgaaagtaacaggtgtcactactcagggagttaagtccttggatactagcatgtatgtgaaggagttccttatttcctcatcacaagatggccaccagtggaccctcttctttcagaatggtaaggtcaaagtgtttcagggcaatcaagacagcttcacacccgtggtgaacagtcttgatcctccactcttgacacgataccttcgaatccatccacagtcttgggagcaccagattgcattgcgcatggaagtacttggatgcgaggctcaggacctctac

SEQ ID NO: 2266 - protein, 1457 aa, synthetic construct
  REGION 1..1457: note = Variant of human B-domain deleted Factor VIII
MQIELSTCFFLCLLRFCFSATRRYYLGAVELSWDYMQSDLGELPVDARFPPRVPKSFPFNTSQVYKKTLFVEFTDHLFNIAKPRPPWMGLLGPTIQAEVYDTVVITLKNMASHPVSLHAVGVSYWKASEGAEYDDQTSQREKEDDKVFPGGSHTYVWQVLKENGPMASDPPCLTYSYLSHVDLVKDLNSGLIGALLVCREGSLAKEKTQTLAKFILLFAVFDEGKSWHSETKNSLMQDRDAASARAWPKMHTVNGYVNRTLPGLIGCHRKSVYWHVIGMGTTPEVHSIFLEGHTFLVRNHRQASLGISPITFLTAQTGLRDLGQFLLFCHIPSHQHDGMEAYVKVDSCPEEPQLRMKNNEEAEDYDDDLTDSEMDVVRFDDDNSPSIIQARSGAKKHPKTWVHYIAAEEEDWDYAPLVLAPDDRSYKSQYLNNGPQRIGRKYKKVRFMAYTDETFKTREAIQHESGILGPLLYGEVGDTLLIIFKNQASRPYNIYPHGITDVRPLYSRRLPKGVKHLKDFPILPGEIFKYKWTITVEDGPTKPDPRCLTRYYSSFVNWERDLASGLIGPLLICYKESVDQRGNQIMSDKRNVILFSVFDENRSWYLTENIQRFLPNPAGVQLEDPEFQASNIMHSINGYVFDSLQLSVCLHEVAYWYILSIGAQTDFLSVFFSGYTFKHKGVYEDTLTLFPFSGETVFMSMENPGLWILGCHNSDFRNRGMTALLKVSSCDWNTGDYYEDSYEDISAYFDSKNNAIEPRSFSQNPPVLKRHQREGTRTTLQSDQEEIDYDDTISVEMKKEDFDIYDEDGNQSPRSFQKKTRHYFIAAVERLWDYGMSSSPHVLRNRAQSGSVPQFKKVVFQEFTDGSFTQPLYRGELNEHLGLLGPYIRAEVEDNIMVTFRNQASRPYSFYSSLISYEEDQRQGAEPRKNFVKPNETKTYFWKVQHHMAPTKDEFDCKAWAYFSDVDLEKDVHSGLIGPLLVCHTNTLNPAHGRQVTVQEFALFFTIFDETKSWYFTENMERNCRAPCNIQMEDPTFKENYRFHAINGYIMDTLPGLVMAQDQRIRWYLLSMGSNENIHSIHFSGHVFTVRKGEEYKMALYNLYPGVFETVEMLPSKAGIWRVECLIGEHLHAGMSTLFLVYSNKCQNPLGMASGHIRDFQITASGQYGQWAPKLARLHYSGSINAWSTKEPFSWIKVDLLAPMIIHGIKTQGARQKFSSLYISQFIIMYSLDGKKWQTYRGNSTGTDMVFFGNVDSSGIKHNIFNPPIIARYIRLHPTHYSIRSTLRMELMGCDLNSCSMPLGMESKAISDAQITASSYFTNMFATWSPSKARLHLQGRSNAWRPQVNNPKEWLQVDFQKTMKVTGVTTQGVKSLDTSMYVKEFLISSSQDGHQWTLFFQNGKVKVFQGNQDSFTPVVNSLDPPLLTRYLRIHPQSWEHQIALRMEVLGCEAQDLY

SEQ ID NO: 2267 - DNA, 4371 bp, synthetic construct
  misc_feature 1..4371: note = Variant of human B-domain deleted Factor VIII
  source 1..4371: mol_type = other DNA
atgcagattgaactgtctacctgcttcttcctctgtttgctgaggttctgctttagcgccactagacggtactaccttggcgctgtggagctgtcctgggactatatgcagagtgatttgggagagcttcccgtcgacgcacgatttcctcctcgcgttccaaagtcatttccctttaacacaagccaggtgtacaagaagacgctcttcgtcgaattcaccgatcacctgttcaatatcgccaaacccagaccaccatggatgggtcttttggggcctaccatacaagcggaggtgtatgacacagttgttatcactctcaagaacatggcttctcatccggtaagtcttcacgcagtgggcgtgtcctactggaaagcttcagaaggagccgagtatgatgatcagacatcccagagggagaaagaagacgacaaggtatttccaggtgggtctcatacctatgtgtggcaagtgctcaaagagaatggccctatggcaagcgatccgccgtgtttgacttacagctacctttcacacgttgacctcgtcaaggacctcaactccgggttgattggagccttgttggtatgcagggaaggatctcttgccaaagagaagacacagaccctggccaagtttatccttctctttgctgtgttcgatgagggcaaaagttggcatagcgaaacgaagaattccctcatgcaggatcgcgacgcagccagcgccagagcttggcccaagatgcacactgtgaacggatatgtcaataggacgcttcctggcttgattgggtgtcatcggaaaagtgtctactggcacgtgatcggaatggggacaacaccagaggtccactccatatttctcgaaggccataccttccttgttcgaaaccacagacaggcatccttggggatctctcccattacctttctcactgcccaaacgggtcttcgtgacttgggtcagttccttctcttttgccatatcccgtcacaccagcatgatggtatggaagcttatgtgaaagtcgacagttgtcctgaggagccacagttgcgcatgaagaataatgaagaagccgaggattacgacgacgatctcaccgattctgagatggacgtggtgaggtttgatgacgacaactctccctccatcattcaagctcggagcggggcgaagaaacaccccaagacttgggtccactatatagcggcggaagaggaggattgggattacgctcctcttgtattggcaccagatgaccgctcatacaaaagccagtacctcaacaacggaccgcagagaattggccggaagtataagaaagtgcgatttatggcctatacagacgaaacctttaagacaagggaggccatccagcatgagagtgggattttgggacctcttctttacggcgaagttggtgataccctcctcatcatcttcaagaatcaagcttctcgcccctataacatttacccacacgggatcactgacgttaggcctttgtatagcagaagacttcccaaaggcgtgaagcatctcaaagacttccccattttgccaggcgagatctttaagtacaaatggaccattacagtggaagatggaccgactaaaccggaccctcgatgccttacgcggtactattcctccttcgtgaattgggagagagatttggcaagcggactcataggaccactcctcatctgttacaaggaatctgtagaccagaggggtaaccagattatgagtgataaacgcaatgtgatcctttttagcgtcttcgacgagaaccggtcctggtacttgaccgagaatatacaaaggttccttcccaaccccgcaggcgttcagttggaagaccctgagtttcaggccagcaatattatgcactcaatcaacggctatgtgtttgatagtctccagctttctgtttgcctccatgaagtagcctattggtacatcttgtcaattggtgctcaaacagacttcctctccgtcttcttctccggctacacctttaagcacaagggcgtgtatgaggacactctcacactctttccattttctggagaaaccgtgttcatgagcatggagaatccaggcctttggatcttgggttgccacaacagtgattttcgcaatcggggaatgactgctctcctcaaagtcagcagctgtgattggaacacaggcgactatgaaggggattcttacgaggacataagtgcctactttgactccaagaataacgccattgagcccagatcattctcccagaatcctcccgtgcttaaaaggcatcagcgcgaaggtaccagaactactcttcagtctgatcaagaggagattgactatgacgacaccattagcgtggaaatgaagaaggaggatttcgatatctatgacgaagatgagaaccagtctccgcggagctttcagaagaagacgcgacactacttcattgcagcagtcgaaaggctttgggactacggtatgtcatcatcccctcatgtgttgcgcaatagagctcagagtggaagtgttccacagttcaagaaagtcgtctttcaagagtttacagatggcagcttcacacagcctctctatcggggcgagcttaacgaacatttgggactccttggtccctatatccgagccgaagtggaggacaacattatggttacctttaggaatcaagcctctcgcccctacagcttctactcctccctcatcagttatgaggaggatcagagacaaggcgctgaaccacggaagaactttgtgaaaccgaatgagacgaagacctacttctggaaagtacagcaccacatggcccccacaaaagacgaattcgattgcaaagcatgggcgtatttttcagacgttgacttggagaaagatgtacattcaggacttattggtcctttgttggtgtgtcacactaacactctcaatccagcccatggcaggcaggtgacagtccaggaattcgctcttttctttaccatctttgatgagaccaagtcctggtacttcacggaaaacatggagcgcaattgcagagccccctgtaacatacagatggaggaccctacctttaaggaaaattatcggttccacgcaatcaacggatacattatggatacactccctggccttgtgatggctcaggaccaacgaatcaggtggtacctcctcagcatgggttctaatgagaacatacactccattcacttttcaggacatgtgttcactgtccggaaggcggaagagtataagatggccctctacaatttgtatccaggcgtgtttgagaccgttgaaatgcttccctctaaagctggcatctggagagtagagtgcttgatcggagaacatcttcacgcaggtatgagcaccttgttcctcgtgtacagcaacaaatgtcagaatccacttggcatggccagtggacacattcgcgactttcagatcacagcatctggccagtatggacaatgggccccaaagttggctcgcctccattactccggtagcataaatgcgtggtccactaaagaacctttcagctggattaaggtcgatcttcttgcccccatgatcatccacggcattaagacacagggagcgaggcagaaattctcctccctctacatctcacagttcattattatgtatagtttggacggcaagaagtggcaaacttatagaggtaacagtactggaacagacatggtgttcttcggcaacgttgatagctctggcatcaaacacaacatctttaatcctcccataatagctcggtacatcagattgcatccgacccactacagcattaggagtacactccgaatggagcttatgggttgcgacttgaattcctgttcaatgccactcggaatggagtctaaagccatctctgatgcacagataaccgccagtagctactttacgaacatgtttgctacgtggtcaccctctaaggcaaggcttcatttgcaaggccggtctaatgcctggagacctcaggtgaacaacccgaaagaatggctccaggtggactttcagaagaccatgaaagtaacaggtgtcactactcagggagttaagtccttggatactagcatgtatgtgaaggagttccttatttcctcatcacaagatggccaccagtggaccctcttctttcagaatggtaaggtcaaagtgtttcagggcaatcaagacagcttcacacccgtggtgaacagtcttgatcctccactcttgacacgataccttcgaatccatccacagtcttgggagcaccagattgcattgcgcatggaagtacttggatgcgaggctcaggacctctac

SEQ ID NO: 2268 - protein, 1457 aa, synthetic construct
  REGION 1..1457: note = Variant of human B-domain deleted Factor VIII
MQIELSTCFFLCLLRFCFSATRRYYLGAVELSWDYMQSDLGELPVDARFPPRVPKSFPFNTSQVYKKTLFVEFTDHLFNIAKPRPPWMGLLGPTIQAEVYDTVVITLKNMASHPVSLHAVGVSYWKASEGAEYDDQTSQREKEDDKVFPGGSHTYVWQVLKENGPMASDPPCLTYSYLSHVDLVKDLNSGLIGALLVCREGSLAKEKTQTLAKFILLFAVFDEGKSWHSETKNSLMQDRDAASARAWPKMHTVNGYVNRTLPGLIGCHRKSVYWHVIGMGTTPEVHSIFLEGHTFLVRNHRQASLGISPITFLTAQTGLRDLGQFLLFCHIPSHQHDGMEAYVKVDSCPEEPQLRMKNNEEAEDYDDDLTDSEMDVVRFDDDNSPSIIQARSGAKKHPKTWVHYIAAEEEDWDYAPLVLAPDDRSYKSQYLNNGPQRIGRKYKKVRFMAYTDETFKTREAIQHESGILGPLLYGEVGDTLLIIFKNQASRPYNIYPHGITDVRPLYSRRLPKGVKHLKDFPILPGEIFKYKWTITVEDGPTKPDPRCLTRYYSSFVNWERDLASGLIGPLLICYKESVDQRGNQIMSDKRNVILFSVFDENRSWYLTENIQRFLPNPAGVQLEDPEFQASNIMHSINGYVFDSLQLSVCLHEVAYWYILSIGAQTDFLSVFFSGYTFKHKGVYEDTLTLFPFSGETVFMSMENPGLWILGCHNSDFRNRGMTALLKVSSCDWNTGDYEGDSYEDISAYFDSKNNAIEPRSFSQNPPVLKRHQREGTRTTLQSDQEEIDYDDTISVEMKKEDFDIYDEDENQSPRSFQKKTRHYFIAAVERLWDYGMSSSPHVLRNRAQSGSVPQFKKVVFQEFTDGSFTQPLYRGELNEHLGLLGPYIRAEVEDNIMVTFRNQASRPYSFYSSLISYEEDQRQGAEPRKNFVKPNETKTYFWKVQHHMAPTKDEFDCKAWAYFSDVDLEKDVHSGLIGPLLVCHTNTLNPAHGRQVTVQEFALFFTIFDETKSWYFTENMERNCRAPCNIQMEDPTFKENYRFHAINGYIMDTLPGLVMAQDQRIRWYLLSMGSNENIHSIHFSGHVFTVRKAEEYKMALYNLYPGVFETVEMLPSKAGIWRVECLIGEHLHAGMSTLFLVYSNKCQNPLGMASGHIRDFQITASGQYGQWAPKLARLHYSGSINAWSTKEPFSWIKVDLLAPMIIHGIKTQGARQKFSSLYISQFIIMYSLDGKKWQTYRGNSTGTDMVFFGNVDSSGIKHNIFNPPIIARYIRLHPTHYSIRSTLRMELMGCDLNSCSMPLGMESKAISDAQITASSYFTNMFATWSPSKARLHLQGRSNAWRPQVNNPKEWLQVDFQKTMKVTGVTTQGVKSLDTSMYVKEFLISSSQDGHQWTLFFQNGKVKVFQGNQDSFTPVVNSLDPPLLTRYLRIHPQSWEHQIALRMEVLGCEAQDLY

SEQ ID NO: 2269 - DNA, 4371 bp, synthetic construct
  misc_feature 1..4371: note = Variant of human B-domain deleted Factor VIII
  source 1..4371: mol_type = other DNA
atgcagattgaactgtctacctgcttcttcctctgtttgctgaggttctgctttagcgccactagacggtactaccttggcgctgtggagctgtcctgggactatatgcagagtgatttgggagagcttcccgtcgacgcacgatttcctcctcgcgttccaaagtcatttccctttaacacaagccaggtgtacaagaagacgctcttcgtcgaattcaccgatcacctgttcaatatcgccaaacccagaccaccatggatgggtcttttggggcctaccatacaagcggaggtgtatgacacagttgttatcactctcaagaacatggcttctcatccggtaagtcttcacgcagtgggcgtgtcctactggaaagcttcagaaggagccgagtatgatgatcagacatcccagagggagaaagaagacgacaaggtatttccaggtgggtctcatacctatgtgtggcaagtgctcaaagagaatggccctatggcaagcgatccgccgtgtttgacttacagctacctttcacacgttgacctcgtcaaggacctcaactccgggttgattggagccttgttggtatgcagggaaggatctcttgccaaagagaagacacagaccctggccaagtttatccttctctttgctgtgttcgatgagggcaaaagttggcatagcgaaacgaagaattccctcatgcaggatcgcgacgcagccagcgccagagcttggcccaagatgcacactgtgaacggatatgtcaataggacgcttcctggcttgattgggtgtcatcggaaaagtgtctactggcacgtgatcggaatggggacaacaccagaggtccactccatatttctcgaaggccataccttccttgttcgaaaccacagacaggcatccttggggatctctcccattacctttctcactgcccaaacgggtcttcgtgacttgggtcagttccttctcttttgccatatcccgtcacaccagcatgatggtatggaagcttatgtgaaagtcgacagttgtcctgaggagccacagttgcgcatgaagaataatgaagaagccgaggattacgacgacgatctcaccgattctgagatggacgtggtgaggtttgatgacgacaactctccctccatcattcaagctcggagcggggcgaagaaacaccccaagacttgggtccactatatagcggcggaagaggaggattgggattacgctcctcttgtattggcaccagatgaccgctcatacaaaagccagtacctcaacaacggaccgcagagaattggccggaagtataagaaagtgcgatttatggcctatacagacgaaacctttaagacaagggaggccatccagcatgagagtgggattttgggacctcttctttacggcgaagttggtgataccctcctcatcatcttcaagaatcaagcttctcgcccctataacatttacccacacgggatcactgacgttaggcctttgtatagcagaagacttcccaaaggcgtgaagcatctcaaagacttccccattttgccaggcgagatctttaagtacaaatggaccattacagtggaagatggaccgactaaaccggaccctcgatgccttacgcggtactattcctccttcgtgaattgggagagagatttggcaagcggactcataggaccactcctcatctgttacaaggaatctgtagaccagaggggtaaccagattatgagtgataaacgcaatgtgatcctttttagcgtcttcgacgagaaccggtcctggtacttgaccgagaatatacaaaggttccttcccaaccccgcaggcgttcagttggaagaccctgagtttcaggccagcaatattatgcactcaatcaacggctatgtgtttgatagtctccagctttctgtttgcctccatgaagtagcctattggtacatcttgtcaattggtgctcaaacagacttcctctccgtcttcttctccggctacacctttaagcacaagggcgtgtatgaggacactctcacactctttccattttctggagaaaccgtgttcatgagcatggagaatccaggcctttggatcttgggttgccacaacagtgattttcgcaatcggggaatgactgctctcctcaaagtcagcagctgtgattggaacacaggcgactatgaggaagattcttacgaggacataagtgcctactttgactccaaaaataacgccattgagcccagatcattctcccagaatcctcccgtgcttaaaaggcatcagcgcgaaggtaccagaactactcttcagtctgatcaagaggagattgactatgacgacaccattagcgtggaaatgaagaaggtggatttcgatatctatgacgaagatgagaaccagtctccgcggagctttcagaagaagacgcgacactacttcattgcagcagtcgaaaggctttgggactacggtatgtcatcatcccctcatgtgttgcgcaatagagctcagagtggaagtgttccacagttcaagaaagtcgtctttcaagagtttacagatggcagcttcacacagcctctctatcggggcgagcttaacgaacatttgggactccttggtccctatatccgagccgaagtggaggacaacattatggttacctttaggaatcaagcctctcgcccctacagcttctactcctccctcatcagttatgaggaggatcagagacaaggcgctgaaccacggaagaactttgtgaaaccgaatgagacgaagacctacttctggaaagtacagcaccacatggcccccacaaaagacgaattcgattgcaaagcatgggcgtatttttcagacgttgacttggagaaagatgtacattcaggacttattggtcctttgttggtgtgtcacactaacactctcaatccagcccatggcaggcaggtgacagtccaggaattcgctcttttctttaccatctttgatgagaccaagtcctggtacttcacggaaaacatggagcgcaattgcagagccccctgtaacatacagatggaggaccctacctttaaggaaaattatcggttccacgcaatcaacggatacattatggatacactccctggccttgtgatggctcaggaccaacgaatcaggtggtacctcctcagcatgggttctaatgagaacatacactccattcacttttcaggacatgtgttcactgtccggaagggtgaagagtataagatggccctctacaatttgtatccaggcgtgtttgagaccgttgaaatgcttcccatcaaagctggcatctggagagtagagtgcttgatcggagaacatcttcacgcaggtatgagcaccttgttcctcgtgtacagcaacaaatgtcagaatccacttggcatggccagtggacacattcgcgactttcagatcacagcatctggccagtatggacaatgggccccaaagttggctcgcctccattactccggtagcataaatgcgtggtccactaaagaacctttcagctggattaaggtcgatcttcttgcccccatgatcatccacggcattaagacacagggagcgaggcagaaattctcctccctctacatctcacagttcattattatgtatagtttggacggcaagaagtggcaaacttatagaggtaacagtactggaacagacatggtgttcttcggcaacgttgatagctctggcatcaaacacaacatctttaatcctcccataatagctcggtacatcagattgcatccgacccactacagcattaggagtacactccgaatggagcttatgggttgcgacttgaattcctgttcaatgccactcggaatggagtctaaagccatctctgatgcacagataaccgccagtagctactttacgaacatgtttgctacgtggtcaccctctaaggcaaggcttcatttgcaaggccggtctaatgcctggagacctcaggtgaacaacccgaaagaatggctccaggtggactttcagaagaccatgaaagtaacaggtgtcactactcagggagttaagtccttggatactagcatgtatgtgaaggagttccttatttcctcatcacaagatggccaccagtggaccctcttctttcagaatggtaaggtcaaagtgtttcagggcaatcaagacagcttcacacccgtggtgaacagtcttgatcctccactcttgacacgataccttcgaatccatccacagtcttgggagcaccagattgcattgcgcatggaagtacttggatgcgaggctcaggacctctac

SEQ ID NO: 2270 - protein, 1457 aa, synthetic construct
  REGION 1..1457: note = Variant of human B-domain deleted Factor VIII
MQIELSTCFFLCLLRFCFSATRRYYLGAVELSWDYMQSDLGELPVDARFPPRVPKSFPFNTSQVYKKTLFVEFTDHLFNIAKPRPPWMGLLGPTIQAEVYDTVVITLKNMASHPVSLHAVGVSYWKASEGAEYDDQTSQREKEDDKVFPGGSHTYVWQVLKENGPMASDPPCLTYSYLSHVDLVKDLNSGLIGALLVCREGSLAKEKTQTLAKFILLFAVFDEGKSWHSETKNSLMQDRDAASARAWPKMHTVNGYVNRTLPGLIGCHRKSVYWHVIGMGTTPEVHSIFLEGHTFLVRNHRQASLGISPITFLTAQTGLRDLGQFLLFCHIPSHQHDGMEAYVKVDSCPEEPQLRMKNNEEAEDYDDDLTDSEMDVVRFDDDNSPSIIQARSGAKKHPKTWVHYIAAEEEDWDYAPLVLAPDDRSYKSQYLNNGPQRIGRKYKKVRFMAYTDETFKTREAIQHESGILGPLLYGEVGDTLLIIFKNQASRPYNIYPHGITDVRPLYSRRLPKGVKHLKDFPILPGEIFKYKWTITVEDGPTKPDPRCLTRYYSSFVNWERDLASGLIGPLLICYKESVDQRGNQIMSDKRNVILFSVFDENRSWYLTENIQRFLPNPAGVQLEDPEFQASNIMHSINGYVFDSLQLSVCLHEVAYWYILSIGAQTDFLSVFFSGYTFKHKGVYEDTLTLFPFSGETVFMSMENPGLWILGCHNSDFRNRGMTALLKVSSCDWNTGDYEEDSYEDISAYFDSKNNAIEPRSFSQNPPVLKRHQREGTRTTLQSDQEEIDYDDTISVEMKKVDFDIYDEDENQSPRSFQKKTRHYFIAAVERLWDYGMSSSPHVLRNRAQSGSVPQFKKVVFQEFTDGSFTQPLYRGELNEHLGLLGPYIRAEVEDNIMVTFRNQASRPYSFYSSLISYEEDQRQGAEPRKNFVKPNETKTYFWKVQHHMAPTKDEFDCKAWAYFSDVDLEKDVHSGLIGPLLVCHTNTLNPAHGRQVTVQEFALFFTIFDETKSWYFTENMERNCRAPCNIQMEDPTFKENYRFHAINGYIMDTLPGLVMAQDQRIRWYLLSMGSNENIHSIHFSGHVFTVRKGEEYKMALYNLYPGVFETVEMLPIKAGIWRVECLIGEHLHAGMSTLFLVYSNKCQNPLGMASGHIRDFQITASGQYGQWAPKLARLHYSGSINAWSTKEPFSWIKVDLLAPMIIHGIKTQGARQKFSSLYISQFIIMYSLDGKKWQTYRGNSTGTDMVFFGNVDSSGIKHNIFNPPIIARYIRLHPTHYSIRSTLRMELMGCDLNSCSMPLGMESKAISDAQITASSYFTNMFATWSPSKARLHLQGRSNAWRPQVNNPKEWLQVDFQKTMKVTGVTTQGVKSLDTSMYVKEFLISSSQDGHQWTLFFQNGKVKVFQGNQDSFTPVVNSLDPPLLTRYLRIHPQSWEHQIALRMEVLGCEAQDLY

SEQ ID NO: 2271 - DNA, 4371 bp, synthetic construct
  misc_feature 1..4371: note = Variant of human B-domain deleted Factor VIII
  source 1..4371: mol_type = other DNA
atgcagattgaactgtctacctgcttcttcctctgtttgctgaggttctgctttagcgccactagacggtactaccttggcgctgtggagctgtcctgggactatatgcagagtgatttgggagagcttcccgtcgacgcacgatttcctcctcgcgttccaaagtcatttccctttaacacaagccaggtgtacaagaagacgctcttcgtcgaattcaccgatcacctgttcaatatcgccaaacccagaccaccatggatgggtcttttggggcctaccatacaagcggaggtgtatgacacagttgttatcactctcaagaacatggcttctcatccggtaagtcttcacgcagtgggcgtgtcctactggaaagcttcagaaggagccgagtatgatgatcagacatcccagagggagaaagaagacgacaaggtatttccaggtgggtctcatacctatgtgtggcaagtgctcaaagagaatggccctatggcaagcgatccgccgtgtttgacttacagctacctttcacacgttgacctcgtcaaggacctcaactccgggttgattggagccttgttggtatgcagggaaggatctcttgccaaagagaagacacagaccctggccaagtttatccttctctttgctgtgttcgatgagggcaaaagttggcatagcgaaacgaagaattccctcatgcaggatcgcgacgcagccagcgccagagcttggcccaagatgcacactgtgaacggatatgtcaataggacgcttcctggcttgattgggtgtcatcggaaaagtgtctactggcacgtgatcggaatggggacaacaccagaggtccactccatatttctcgaaggccataccttccttgttcgaaaccacagacaggcatccttggggatctctcccattacctttctcactgcccaaacgggtcttcgtgacttgggtcagttccttctcttttgccatatcccgtcacaccagcatgatggtatggaagcttatgtgaaagtcgacagttgtcctgaggagccacagttgcgcatgaagaataatgaagaagccgaggattacgacgacgatctcaccgattctgagatggacgtggtgaggtttgatgacgacaactctccctccatcattcaagctcggagcggggcgaagaaacaccccaagacttgggtccactatatagcggcggaagaggaggattgggattacgctcctcttgtattggcaccagatgaccgctcatacaaaagccagtacctcaacaacggaccgcagagaattggccggaagtataagaaagtgcgatttatggcctatacagacgaaacctttaagacaagggaggccatccagcatgagagtgggattttgggacctcttctttacggcgaagttggtgataccctcctcatcatcttcaagaatcaagcttctcgcccctataacatttacccacacgggatcactgacgttaggcctttgtatagcagaagacttcccaaaggcgtgaagcatctcaaagacttccccattttgccaggcgagatctttaagtacaaatggaccattacagtggaagatggaccgactaaaccggaccctcgatgccttacgcggtactattcctccttcgtgaattgggagagagatttggcaagcggactcataggaccactcctcatctgttacaaggaatctgtagaccagaggggtaaccagattatgagtgataaacgcaatgtgatcctttttagcgtcttcgacgagaaccggtcctggtacttgaccgagaatatacaaaggttccttcccaaccccgcaggcgttcagttggaagaccctgagtttcaggccagcaatattatgcactcaatcaacggctatgtgtttgatagtctccagctttctgtttgcctccatgaagtagcctattggtacatcttgtcaattggtgctcaaacagacttcctctccgtcttcttctccggctacacctttaagcacaagggcgtgtatgaggacactctcacactctttccattttctggagaaaccgtgttcatgagcatggagaatccaggcctttggatcttgggttgccacaacagtgattttcgcaatcggggaatgactgctctcctcaaagtcagcagctgtgattggaacacaggcgactatgaggaagattcttacgaggacataagtgcctactttgactccaagaataacgccattgagcccagatcattctcccagaatcctcccgtgcttaaaaggcatcagcgcgaaggtaccagaactactcttcagtctgatcaagaggagattgactatgacgacaccattagcgtggaaatgaagaaggaggatttcgatatctatgacgaggatgggaaccagtctccgcggagctttcagaagaagacgcgacactacttcattgcagcagtcgaaaggctttgggactacggtatgtcatcatcccctcatgtgttgcgcaatagagctcagagtggaagtgttccacagttcaagaaagtcgtctttcaagagtttacagatggcagcttcacacagcctctctatcggggcgagcttaacgaacatttgggactccttggtccctatatccgagccgaagtggaggacaacattatggttacctttaggaatcaagcctctcgcccctacagcttctactcctccctcatcagttatgaggaggatcagagacaaggcgctgaaccacggaagaactttgtgaaaccgaatgagacgaagacctacttctggaaagtacagcaccacatggcccccacaaaagacgaattcgattgcaaagcatgggcgtatttttcagacgttgacttggagaaagatgtacattcaggacttattggtcctttgttggtgtgtcacactaacactctcaatccagcccatggcaggcaggtgacagtccaggaattcgctcttttctttaccatctttgatgagaccaagtcctggtacttcacggaaaacatggagcgcaattgcagagccccctgtaacatacagatggaggaccctacctttaaggaaaattatcggttccacgcaatcaacggatacattatggatacactccctggccttgtgatggctcaggaccaacgaatcaggtggtacctcctcagcatgggttctaatgagaacatacactccattcacttttcaggacatgtgttcactgtccggaagggtgaagagtataagatggccctctacaatttgtatccaggcgtgtttgagaccgttgaaatgcttcccagcaaagctggcatctggagagtagagtgcttgatcggagaacatcttcacgcaggtatgagcaccttgttcctcgtgtacagcaacaaatgtcagaatccacttggcatggccagtggacacattcgcgactttcagatcacagcatctggccagtatggacaatgggccccaaagttggctcgcctccattactccggtagcataaatgcgtggtccactaaagaacctttcagctggattaaggtcgatcttcttgcccccatgatcatccacggcattaagacacagggagcgaggcagaaattctcctccctctacatctcacagttcattattatgtatagtttggacggcaagaagtggcaaacttatagaggtaacagtactggaacagacatggtgttcttcggcaacgttgatagctctggcatcaaacacaacatctttaatcctcccataatagctcggtacatcagattgcatccgacccactacagcattaggagtacactccgaatggagcttatgggttgcgacttgaattcctgttcaatgccactcggaatggagtctaaagccatctctgatgcacagataaccgccagtagctactttacgaacatgtttgctacgtggtcaccctctaaggcaaggcttcatttgcaaggccggtctaatgcctggagacctcaggtgaacaacccgaaagaatggctccaggtggactttcagaagaccatgaaagtaacaggtgtcactactcagggagttaagtccttggatactagcatgtatgtgaaggagttccttatttcctcatcacaagatggccaccagtggaccctcttctttcagaatggtaaggtcaaagtgtttcagggcaatcaagacagcttcacacccgtggtgaacagtcttgatcctccactcttgacacgataccttcgaatccatccacagtcttgggagcaccagattgcattgcgcatggaagtacttggatgcgaggctcaggacctctac

SEQ ID NO: 2272 - protein, 1457 aa, synthetic construct
  REGION 1..1457: note = Variant of human B-domain deleted Factor VIII
MQIELSTCFFLCLLRFCFSATRRYYLGAVELSWDYMQSDLGELPVDARFPPRVPKSFPFNTSQVYKKTLFVEFTDHLFNIAKPRPPWMGLLGPTIQAEVYDTVVITLKNMASHPVSLHAVGVSYWKASEGAEYDDQTSQREKEDDKVFPGGSHTYVWQVLKENGPMASDPPCLTYSYLSHVDLVKDLNSGLIGALLVCREGSLAKEKTQTLAKFILLFAVFDEGKSWHSETKNSLMQDRDAASARAWPKMHTVNGYVNRTLPGLIGCHRKSVYWHVIGMGTTPEVHSIFLEGHTFLVRNHRQASLGISPITFLTAQTGLRDLGQFLLFCHIPSHQHDGMEAYVKVDSCPEEPQLRMKNNEEAEDYDDDLTDSEMDVVRFDDDNSPSIIQARSGAKKHPKTWVHYIAAEEEDWDYAPLVLAPDDRSYKSQYLNNGPQRIGRKYKKVRFMAYTDETFKTREAIQHESGILGPLLYGEVGDTLLIIFKNQASRPYNIYPHGITDVRPLYSRRLPKGVKHLKDFPILPGEIFKYKWTITVEDGPTKPDPRCLTRYYSSFVNWERDLASGLIGPLLICYKESVDQRGNQIMSDKRNVILFSVFDENRSWYLTENIQRFLPNPAGVQLEDPEFQASNIMHSINGYVFDSLQLSVCLHEVAYWYILSIGAQTDFLSVFFSGYTFKHKGVYEDTLTLFPFSGETVFMSMENPGLWILGCHNSDFRNRGMTALLKVSSCDWNTGDYEEDSYEDISAYFDSKNNAIEPRSFSQNPPVLKRHQREGTRTTLQSDQEEIDYDDTISVEMKKEDFDIYDEDGNQSPRSFQKKTRHYFIAAVERLWDYGMSSSPHVLRNRAQSGSVPQFKKVVFQEFTDGSFTQPLYRGELNEHLGLLGPYIRAEVEDNIMVTFRNQASRPYSFYSSLISYEEDQRQGAEPRKNFVKPNETKTYFWKVQHHMAPTKDEFDCKAWAYFSDVDLEKDVHSGLIGPLLVCHTNTLNPAHGRQVTVQEFALFFTIFDETKSWYFTENMERNCRAPCNIQMEDPTFKENYRFHAINGYIMDTLPGLVMAQDQRIRWYLLSMGSNENIHSIHFSGHVFTVRKGEEYKMALYNLYPGVFETVEMLPSKAGIWRVECLIGEHLHAGMSTLFLVYSNKCQNPLGMASGHIRDFQITASGQYGQWAPKLARLHYSGSINAWSTKEPFSWIKVDLLAPMIIHGIKTQGARQKFSSLYISQFIIMYSLDGKKWQTYRGNSTGTDMVFFGNVDSSGIKHNIFNPPIIARYIRLHPTHYSIRSTLRMELMGCDLNSCSMPLGMESKAISDAQITASSYFTNMFATWSPSKARLHLQGRSNAWRPQVNNPKEWLQVDFQKTMKVTGVTTQGVKSLDTSMYVKEFLISSSQDGHQWTLFFQNGKVKVFQGNQDSFTPVVNSLDPPLLTRYLRIHPQSWEHQIALRMEVLGCEAQDLY

SEQ ID NO: 2273 - DNA, 4371 bp, synthetic construct
  misc_feature 1..4371: note = Variant of human B-domain deleted Factor VIII
  source 1..4371: mol_type = other DNA
atgcagattgaactgtctacctgcttcttcctctgtttgctgaggttctgctttagcgccactagacggtactaccttggcgctgtggagctgtcctgggactatatgcagagtgatttgggagagcttcccgtcgacgcacgatttcctcctcgcgttccaaagtcatttccctttaacacaagccaggtgtacaagaagacgctcttcgtcgaattcaccgatcacctgttcaatatcgccaaacccagaccaccatggatgggtcttttggggcctaccatacaagcggaggtgtatgacacagttgttatcactctcaagaacatggcttctcatccggtaagtcttcacgcagtgggcgtgtcctactggaaagcttcagaaggagccgagtatgatgatcagacatcccagagggagaaagaagacgacaaggtatttccaggtgggtctcatacctatgtgtggcaagtgctcaaagagaatggccctatggcaagcgatccgccgtgtttgacttacagctacctttcacacgttgacctcgtcaaggacctcaactccgggttgattggagccttgttggtatgcagggaaggatctcttgccaaagagaagacacagaccctggccaagtttatccttctctttgctgtgttcgatgagggcaaaagttggcatagcgaaacgaagaattccctcatgcaggatcgcgacgcagccagcgccagagcttggcccaagatgcacactgtgaacggatatgtcaataggacgcttcctggcttgattgggtgtcatcggaaaagtgtctactggcacgtgatcggaatggggacaacaccagaggtccactccatatttctcgaaggccataccttccttgttcgaaaccacagacaggcatccttggggatctctcccattacctttctcactgcccaaacgggtcttcgtgacttgggtcagttccttctcttttgccatatcccgtcacaccagcatgatggtatggaagcttatgtgaaagtcgacagttgtcctgaggagccacagttgcgcatgaagaataatgaagaagccgaggattacgacgacgatctcaccgattctgagatggacgtggtgaggtttgatgacgacaactctccctccatcattcaagctcggagcggggcgaagaaacaccccaagacttgggtccactatatagcggcggaagaggaggattgggattacgctcctcttgtattggcaccagatgaccgctcatacaaaagccagtacctcaacaacggaccgcagagaattggccggaagtataagaaagtgcgatttatggcctatacagacgaaacctttaagacaagggaggccatccagcatgagagtgggattttgggacctcttctttacggcgaagttggtgataccctcctcatcatcttcaagaatcaagcttctcgcccctataacatttacccacacgggatcactgacgttaggcctttgtatagcagaagacttcccaaaggcgtgaagcatctcaaagacttccccattttgccaggcgagatctttaagtacaaatggaccattacagtggaagatggaccgactaaaccggaccctcgatgccttacgcggtactattcctccttcgtgaattgggagagagatttggcaagcggactcataggaccactcctcatctgttacaaggaatctgtagaccagaggggtaaccagattatgagtgataaacgcaatgtgatcctttttagcgtcttcgacgagaaccggtcctggtacttgaccgagaatatacaaaggttccttcccaaccccgcaggcgttcagttggaagaccctgagtttcaggccagcaatattatgcactcaatcaacggctatgtgtttgatagtctccagctttctgtttgcctccatgaagtagcctattggtacatcttgtcaattggtgctcaaacagacttcctctccgtcttcttctccggctacacctttaagcacaagggggtgtatgaggacactctcacactctttccattttctggagaaaccgtgttcatgagcatggagaatccaggcctttggatcttgggttgccacaacagtgattttcgcaatcggggaatgactgctctcctcaaagtcagcagctgtgattggaacacaggcgactatgaggaagattcttacgaggacataagtgcctactttgactccaaaaataacgccattgagcccagatcattctcccagaatcctcccgtgcttaaaaggcatcagcgcgaaggtaccagaactactcttcagtctgatcaagaggagattgactatgacgacaccattagcgtggaaatgaagaaggaggatttcgatatctatgacgaggatgggaaccagtctccgcggagctttcagaagaagacgcgacactacttcattgcagcagtcgaaaggctttgggactacggtatgtcatcatcccctcatgtgttgcgcaatagagctcagagtggaagtgttccacagttcaagaaagtcgtctttcaagagtttacagatggcagcttcacacagcctctctatcggggcgagcttaacgaacatttgggactccttggtccctatatccgagccgaagtggaggacaacattatggttacctttaggaatcaagcctctcgcccctacagcttctactcctccctcatcagttatgaggaggatcagagacaaggcgctgaaccacggaagaactttgtgaaaccgaatgagacgaagacctacttctggaaagtacagcaccacatggcccccacaaaagacgaattcgattgcaaagcatgggcgtatttttcagacgttgacttggagaaagatgtacattcaggacttattggtcctttgttggtgtgtcacactaacactctcaatccagcccatggcaggcaggtgacagtccaggaattcgctcttttctttaccatctttgatgagaccaagtcctggtacttcacggaaaacatggagcgcaattgcagagccccctgtaacatacagatggaggaccctacctttaaggaaaattatcggttccacgcaatcaacggatacattatggatacactccctggccttgtgatggctcaggaccaacgaatcaggtggtacctcctcagcatgggttctaatgagaacatacactccattcacttttcaggacatgtgttcactgtccggaagggtgaagagtataagatggccctctacaatttgtatccaggcgtgtttgagaccgttgaaatgcttcccatcaaagctggcatctggagagtagagtgcttgatcggagaacatcttcacgcaggtatgagcaccttgttcctcgtgtacagcaacaaatgtcagaatccacttggcatggccagtggacacattcgcgactttcagatcacagcatctggccagtatggacaatgggccccaaagttggctcgcctccattactccggtagcataaatgcgtggtccactaaagaacctttcagctggattaaggtcgatcttcttgcccccatgatcatccacggcattaagacacagggagcgaggcagaaattctcctccctctacatctcacagttcattattatgtatagtttggacggcaagaagtggcaaacttatagaggtaacagtactggaacagacatggtgttcttcggcaacgttgatagctctggcatcaaacacaacatctttaatcctcccataatagctcggtacatcagattgcatccgacccactacagcattaggagtacactccgaatggagcttatgggttgcgacttgaattcctgttcaatgccactcggaatggagtctaaagccatctctgatgcacagataaccgccagtagctactttacgaacatgtttgctacgtggtcaccctctaaggcaaggcttcatttgcaaggccggtctaatgcctggagacctcaggtgaacaacccgaaagaatggctccaggtggactttcagaagaccatgaaagtaacaggtgtcactactcagggagttaagtccttggatactagcatgtatgtgaaggagttccttatttcctcatcacaagatggccaccagtggaccctcttctttcagaatggtaaggtcaaagtgtttcagggcaatcaagacagcttcacacccgtggtgaacagtcttgatcctccactcttgacacgataccttcgaatccatccacagtcttgggagcaccagattgcattgcgcatggaagtacttggatgcgaggctcaggacctctac

SEQ ID NO: 2274 - protein, 1457 aa, synthetic construct
  REGION 1..1457: note = Variant of human B-domain deleted Factor VIII
MQIELSTCFFLCLLRFCFSATRRYYLGAVELSWDYMQSDLGELPVDARFPPRVPKSFPFNTSQVYKKTLFVEFTDHLFNIAKPRPPWMGLLGPTIQAEVYDTVVITLKNMASHPVSLHAVGVSYWKASEGAEYDDQTSQREKEDDKVFPGGSHTYVWQVLKENGPMASDPPCLTYSYLSHVDLVKDLNSGLIGALLVCREGSLAKEKTQTLAKFILLFAVFDEGKSWHSETKNSLMQDRDAASARAWPKMHTVNGYVNRTLPGLIGCHRKSVYWHVIGMGTTPEVHSIFLEGHTFLVRNHRQASLGISPITFLTAQTGLRDLGQFLLFCHIPSHQHDGMEAYVKVDSCPEEPQLRMKNNEEAEDYDDDLTDSEMDVVRFDDDNSPSIIQARSGAKKHPKTWVHYIAAEEEDWDYAPLVLAPDDRSYKSQYLNNGPQRIGRKYKKVRFMAYTDETFKTREAIQHESGILGPLLYGEVGDTLLIIFKNQASRPYNIYPHGITDVRPLYSRRLPKGVKHLKDFPILPGEIFKYKWTITVEDGPTKPDPRCLTRYYSSFVNWERDLASGLIGPLLICYKESVDQRGNQIMSDKRNVILFSVFDENRSWYLTENIQRFLPNPAGVQLEDPEFQASNIMHSINGYVFDSLQLSVCLHEVAYWYILSIGAQTDFLSVFFSGYTFKHKGVYEDTLTLFPFSGETVFMSMENPGLWILGCHNSDFRNRGMTALLKVSSCDWNTGDYEEDSYEDISAYFDSKNNAIEPRSFSQNPPVLKRHQREGTRTTLQSDQEEIDYDDTISVEMKKEDFDIYDEDGNQSPRSFQKKTRHYFIAAVERLWDYGMSSSPHVLRNRAQSGSVPQFKKVVFQEFTDGSFTQPLYRGELNEHLGLLGPYIRAEVEDNIMVTFRNQASRPYSFYSSLISYEEDQRQGAEPRKNFVKPNETKTYFWKVQHHMAPTKDEFDCKAWAYFSDVDLEKDVHSGLIGPLLVCHTNTLNPAHGRQVTVQEFALFFTIFDETKSWYFTENMERNCRAPCNIQMEDPTFKENYRFHAINGYIMDTLPGLVMAQDQRIRWYLLSMGSNENIHSIHFSGHVFTVRKGEEYKMALYNLYPGVFETVEMLPIKAGIWRVECLIGEHLHAGMSTLFLVYSNKCQNPLGMASGHIRDFQITASGQYGQWAPKLARLHYSGSINAWSTKEPFSWIKVDLLAPMIIHGIKTQGARQKFSSLYISQFIIMYSLDGKKWQTYRGNSTGTDMVFFGNVDSSGIKHNIFNPPIIARYIRLHPTHYSIRSTLRMELMGCDLNSCSMPLGMESKAISDAQITASSYFTNMFATWSPSKARLHLQGRSNAWRPQVNNPKEWLQVDFQKTMKVTGVTTQGVKSLDTSMYVKEFLISSSQDGHQWTLFFQNGKVKVFQGNQDSFTPVVNSLDPPLLTRYLRIHPQSWEHQIALRMEVLGCEAQDLY

SEQ ID NO: 2275 - DNA, 4371 bp, synthetic construct
  misc_feature 1..4371: note = Variant of human B-domain deleted Factor VIII
  source 1..4371: mol_type = other DNA
atgcagattgaactgtctacctgcttcttcctctgtttgctgaggttctgctttagcgccactagacggtactaccttggcgctgtggagctgtcctgggactatatgcagagtgatttgggagagcttcccgtcgacgcacgatttcctcctcgcgttccaaagtcatttccctttaacacaagccaggtgtacaagaagacgctcttcgtcgaattcaccgatcacctgttcaatatcgccaaacccagaccaccatggatgggtcttttggggcctaccatacaagcggaggtgtatgacacagttgttatcactctcaagaacatggcttctcatccggtaagtcttcacgcagtgggcgtgtcctactggaaagcttcagaaggagccgagtatgatgatcagacatcccagagggagaaagaagacgacaaggtatttccaggtgggtctcatacctatgtgtggcaagtgctcaaagagaatggccctatggcaagcgatccgccgtgtttgacttacagctacctttcacacgttgacctcgtcaaggacctcaactccgggttgattggagccttgttggtatgcagggaaggatctcttgccaaagagaagacacagaccctggccaagtttatccttctctttgctgtgttcgatgagggcaaaagttggcatagcgaaacgaagaattccctcatgcaggatcgcgacgcagccagcgccagagcttggcccaagatgcacactgtgaacggatatgtcaataggacgcttcctggcttgattgggtgtcatcggaaaagtgtctactggcacgtgatcggaatggggacaacaccagaggtccactccatatttctcgaaggccataccttccttgttcgaaaccacagacaggcatccttggggatctctcccattacctttctcactgcccaaacgggtcttcgtgacttgggtcagttccttctcttttgccatatcccgtcacaccagcatgatggtatggaagcttatgtgaaagtcgacagttgtcctgaggagccacagttgcgcatgaagaataatgaagaagccgaggattacgacgacgatctcaccgattctgagatggacgtggtgaggtttgatgacgacaactctccctccatcattcaagctcggagcggggcgaagaaacaccccaagacttgggtccactatatagcggcggaagaggaggattgggattacgctcctcttgtattggcaccagatgaccgctcatacaaaagccagtacctcaacaacggaccgcagagaattggccggaagtataagaaagtgcgatttatggcctatacagacgaaacctttaagacaagggaggccatccagcatgagagtgggattttgggacctcttctttacggcgaagttggtgataccctcctcatcatcttcaagaatcaagcttctcgcccctataacatttacccacacgggatcactgacgttaggcctttgtatagcagaagacttcccaaaggcgtgaagcatctcaaagacttccccattttgccaggcgagatctttaagtacaaatggaccattacagtggaagatggaccgactaaaccggaccctcgatgccttacgcggtactattcctccttcgtgaattgggagagagatttggcaagcggactcataggaccactcctcatctgttacaaggaatctgtagaccagaggggtaaccagattatgagtgataaacgcaatgtgatcctttttagcgtcttcgacgagaaccggtcctggtacttgaccgagaatatacaaaggttccttcccaaccccgcaggcgttcagttggaagaccctgagtttcaggccagcaatattatgcactcaatcaacggctatgtgtttgatagtctccagctttctgtttgcctccatgaagtagcctattggtacatcttgtcaattggtgctcaaacagacttcctctccgtcttcttctccggctacacctttaagcacaagaacgtgtatgaggacactctcacactctttccattttctggagaaaccgtgttcatgagcatggagaatccaggcctttggatcttgggttgccacaacagtgattttcgcaatcggggaatgactgctctcctcaaagtcagcagctgtgattggaacacaggcgactattacggggattcttacgaggacataagtgcctactttgactccgaaaataacgccattgagcccagatcattctcccagaatcctcccgtgcttaaaaggcatcagcgcgaaggtaccagaactactcttcagtctgatcaagaggagattgactatgacgacaccattagcgtggaaatgaagaaggaggatttcgatatctatgacgaggatgggaaccagtctccgcggagctttcagaagaagacgcgacactacttcattgcagcagtcgaaaggctttgggactacggtatgtcatcatcccctcatgtgttgcgcaatagagctcagagtggaagtgttccacagttcaagaaagtcgtctttcaagagtttacagatggcagcttcacacagcctctctatcggggcgagcttaacgaacatttgggactccttggtccctatatccgagccgaagtggaggacaacattatggttacctttaggaatcaagcctctcgcccctacagcttctactcctccctcatcagttatgaggaggatcagagacaaggcgctgaaccacggaagaactttgtgaaaccgaatgagacgaagacctacttctggaaagtacagcaccacatggcccccacaaaagacgaattcgattgcaaagcatgggcgtatttttcagacgttgacttggagaaagatgtacattcaggacttattggtcctttgttggtgtgtcacactaacactctcaatccagcccatggcaggcaggtgacagtccaggaattcgctcttttctttaccatctttgatgagaccaagtcctggtacttcacggaaaacatggagcgcaattgcagagccccctgtaacatacagatggaggaccctacctttaaggaaaattatcggttccacgcaatcaacggatacattatggatacactccctggccttgtgatggctcaggaccaacgaatcaggtggtacctcctcagcatgggttctaatgagaacatacactccattcacttttcaggacatgtgttcactgtccggaagggtgaagagtataagatggccctctacaatttgtatccaggcgtgtttgagaccgttgaaatgcttcccagcaaagctggcatctggagagtagagtgcttgatcggagaacatcttcacgcaggtatgagcaccttgttcctcgtgtacagcaacaaatgtcagaatccacttggcatggccagtggacacattcgcgactttcagatcacagcatctggccagtatggacaatgggccccaaagttggctcgcctccattactccggtagcataaatgcgtggtccactaaagaacctttcagctggattaaggtcgatcttcttgcccccatgatcatccacggcattaagacacagggagcgaggcagaaattctcctccctctacatctcacagttcattattatgtatagtttggacggcaagaagtggcaaacttatagaggtaacagtactggaacagacatggtgttcttcggcaacgttgatagctctggcatcaaacacaacatctttaatcctcccataatagctcggtacatcagattgcatccgacccactacagcattaggagtacactccgaatggagcttatgggttgcgacttgaattcctgttcaatgccactcggaatggagtctaaagccatctctgatgcacagataaccgccagtagctactttacgaacatgtttgctacgtggtcaccctctaaggcaaggcttcatttgcaaggccggtctaatgcctggagacctcaggtgaacaacccgaaagaatggctccaggtggactttcagaagaccatgaaagtaacaggtgtcactactcagggagttaagtccttggatactagcatgtatgtgaaggagttccttatttcctcatcacaagatggccaccagtggaccctcttctttcagaatggtaaggtcaaagtgtttcagggcaatcaagacagcttcacacccgtggtgaacagtcttgatcctccactcttgacacgataccttcgaatccatccacagtcttgggagcaccagattgcattgcgcatggaagtacttggatgcgaggctcaggacctctac

SEQ ID NO: 2276 - protein, 1457 aa, synthetic construct
  REGION 1..1457: note = Variant of human B-domain deleted Factor VIII
MQIELSTCFFLCLLRFCFSATRRYYLGAVELSWDYMQSDLGELPVDARFPPRVPKSFPFNTSQVYKKTLFVEFTDHLFNIAKPRPPWMGLLGPTIQAEVYDTVVITLKNMASHPVSLHAVGVSYWKASEGAEYDDQTSQREKEDDKVFPGGSHTYVWQVLKENGPMASDPPCLTYSYLSHVDLVKDLNSGLIGALLVCREGSLAKEKTQTLAKFILLFAVFDEGKSWHSETKNSLMQDRDAASARAWPKMHTVNGYVNRTLPGLIGCHRKSVYWHVIGMGTTPEVHSIFLEGHTFLVRNHRQASLGISPITFLTAQTGLRDLGQFLLFCHIPSHQHDGMEAYVKVDSCPEEPQLRMKNNEEAEDYDDDLTDSEMDVVRFDDDNSPSIIQARSGAKKHPKTWVHYIAAEEEDWDYAPLVLAPDDRSYKSQYLNNGPQRIGRKYKKVRFMAYTDETFKTREAIQHESGILGPLLYGEVGDTLLIIFKNQASRPYNIYPHGITDVRPLYSRRLPKGVKHLKDFPILPGEIFKYKWTITVEDGPTKPDPRCLTRYYSSFVNWERDLASGLIGPLLICYKESVDQRGNQIMSDKRNVILFSVFDENRSWYLTENIQRFLPNPAGVQLEDPEFQASNIMHSINGYVFDSLQLSVCLHEVAYWYILSIGAQTDFLSVFFSGYTFKHKNVYEDTLTLFPFSGETVFMSMENPGLWILGCHNSDFRNRGMTALLKVSSCDWNTGDYYGDSYEDISAYFDSENNAIEPRSFSQNPPVLKRHQREGTRTTLQSDQEEIDYDDTISVEMKKEDFDIYDEDGNQSPRSFQKKTRHYFIAAVERLWDYGMSSSPHVLRNRAQSGSVPQFKKVVFQEFTDGSFTQPLYRGELNEHLGLLGPYIRAEVEDNIMVTFRNQASRPYSFYSSLISYEEDQRQGAEPRKNFVKPNETKTYFWKVQHHMAPTKDEFDCKAWAYFSDVDLEKDVHSGLIGPLLVCHTNTLNPAHGRQVTVQEFALFFTIFDETKSWYFTENMERNCRAPCNIQMEDPTFKENYRFHAINGYIMDTLPGLVMAQDQRIRWYLLSMGSNENIHSIHFSGHVFTVRKGEEYKMALYNLYPGVFETVEMLPSKAGIWRVECLIGEHLHAGMSTLFLVYSNKCQNPLGMASGHIRDFQITASGQYGQWAPKLARLHYSGSINAWSTKEPFSWIKVDLLAPMIIHGIKTQGARQKFSSLYISQFIIMYSLDGKKWQTYRGNSTGTDMVFFGNVDSSGIKHNIFNPPIIARYIRLHPTHYSIRSTLRMELMGCDLNSCSMPLGMESKAISDAQITASSYFTNMFATWSPSKARLHLQGRSNAWRPQVNNPKEWLQVDFQKTMKVTGVTTQGVKSLDTSMYVKEFLISSSQDGHQWTLFFQNGKVKVFQGNQDSFTPVVNSLDPPLLTRYLRIHPQSWEHQIALRMEVLGCEAQDLY

SEQ ID NO: 2277 - DNA, 4371 bp, synthetic construct
  misc_feature 1..4371: note = Variant of human B-domain deleted Factor VIII
  source 1..4371: mol_type = other DNA
atgcagattgaactgtctacctgcttcttcctctgtttgctgaggttctgctttagcgccactagacggtactaccttggcgctgtggagctgtcctgggactatatgcagagtgatttgggagagcttcccgtcgacgcacgatttcctcctcgcgttccaaagtcatttccctttaacacaagccaggtgtacaagaagacgctcttcgtcgaattcaccgatcacctgttcaatatcgccaaacccagaccaccatggatgggtcttttggggcctaccatacaagcggaggtgtatgacacagttgttatcactctcaagaacatggcttctcatccggtaagtcttcacgcagtgggcgtgtcctactggaaagcttcagaaggagccgagtatgatgatcagacatcccagagggagaaagaagacgacaaggtatttccaggtgggtctcatacctatgtgtggcaagtgctcaaagagaatggccctatggcaagcgatccgccgtgtttgacttacagctacctttcacacgttgacctcgtcaaggacctcaactccgggttgattggagccttgttggtatgcagggaaggatctcttgccaaagagaagacacagaccctggccaagtttatccttctctttgctgtgttcgatgagggcaaaagttggcatagcgaaacgaagaattccctcatgcaggatcgcgacgcagccagcgccagagcttggcccaagatgcacactgtgaacggatatgtcaataggacgcttcctggcttgattgggtgtcatcggaaaagtgtctactggcacgtgatcggaatggggacaacaccagaggtccactccatatttctcgaaggccataccttccttgttcgaaaccacagacaggcatccttggggatctctcccattacctttctcactgcccaaacgggtcttcgtgacttgggtcagttccttctcttttgccatatcccgtcacaccagcatgatggtatggaagcttatgtgaaagtcgacagttgtcctgaggagccacagttgcgcatgaagaataatgaagaagccgaggattacgacgacgatctcaccgattctgagatggacgtggtgaggtttgatgacgacaactctccctccatcattcaagctcggagcggggcgaagaaacaccccaagacttgggtccactatatagcggcggaagaggaggattgggattacgctcctcttgtattggcaccagatgaccgctcatacaaaagccagtacctcaacaacggaccgcagagaattggccggaagtataagaaagtgcgatttatggcctatacagacgaaacctttaagacaagggaggccatccagcatgagagtgggattttgggacctcttctttacggcgaagttggtgataccctcctcatcatcttcaagaatcaagcttctcgcccctataacatttacccacacgggatcactgacgttaggcctttgtatagcagaagacttcccaaaggcgtgaagcatctcaaagacttccccattttgccaggcgagatctttaagtacaaatggaccattacagtggaagatggaccgactaaaccggaccctcgatgccttacgcggtactattcctccttcgtgaattgggagagagatttggcaagcggactcataggaccactcctcatctgttacaaggaatctgtagaccagaggggtaaccagattatgagtgataaacgcaatgtgatcctttttagcgtcttcgacgagaaccggtcctggtacttgaccgagaatatacaaaggttccttcccaaccccgcaggcgttcagttggaagaccctgagtttcaggccagcaatattatgcactcaatcaacggctatgtgtttgatagtctccagctttctgtttgcctccatgaagtagcctattggtacatcttgtcaattggtgctcaaacagacttcctctccgtcttcttctccggctacacctttaagcacaagaacgtgtatgaggacactctcacactctttccattttctggagaaaccgtgttcatgagcatggagaatccaggcctttggatcttgggttgccacaacagtgattttcgcaatcggggaatgactgctctcctcaaagtcagcagctgtgattggaacacaggcgactattacggggattcttacgaggacataagtgcctactttgactccgaaaataacgccattgagcccagatcattctcccagaatcctcccgtgcttaaaaggcatcagcgcgaaggtaccagaactactcttcagtctgatcaagaggagattgactatgacgacaccattagcgtggaaatgaagaaggaggatttcgatatctatgacgaagatgagaaccagtctccgcggagctttcagaagaagacgcgacactacttcattgcagcagtcgaaaggctttgggactacggtatgtcatcatcccctcatgtgttgcgcaatagagctcagagtggaagtgttccacagttcaagaaagtcgtctttcaagagtttacagatggcagcttcacacagcctctctatcggggcgagcttaacgaacatttgggactccttggtccctatatccgagccgaagtggaggacaacattatggttacctttaggaatcaagcctctcgcccctacagcttctactcctccctcatcagttatgaggaggatcagagacaaggcgctgaaccacggaagaactttgtgaaaccgaatgagacgaagacctacttctggaaagtacagcaccacatggcccccacaaaagacgaattcgattgcaaagcatgggcgtatttttcagacgttgacttggagaaagatgtacattcaggacttattggtcctttgttggtgtgtcacactaacactctcaatccagcccatggcaggcaggtgacagtccaggaattcgctcttttctttaccatctttgatgagaccaagtcctggtacttcacggaaaacatggagcgcaattgcagagccccctgtaacatacagatggaggaccctacctttaaggaaaattatcggttccacgcaatcaacggatacattatggatacactccctggccttgtgatggctcaggaccaacgaatcaggtggtacctcctcagcatgggttctaatgagaacatacactccattcacttttcaggacatgtgttcactgtccggaagggtgaagagtataagatggccctctacaatttgtatccaggcgtgtttgagaccgttgaaatgcttccctctaaagctggcatctggagagtagagtgcttgatcggagaacatcttcacgcaggtatgagcaccttgttcctcgtgtacagcaacaaatgtcagaatccacttggcatggccagtggacacattcgcgactttcagatcacagcatctggccagtatggacaatgggccccaaagttggctcgcctccattactccggtagcataaatgcgtggtccactaaagaacctttcagctggattaaggtcgatcttcttgcccccatgatcatccacggcattaagacacagggagcgaggcagaaattctcctccctctacatctcacagttcattattatgtatagtttggacggcaagaagtggcaaacttatagaggtaacagtactggaacagacatggtgttcttcggcaacgttgatagctctggcatcaaacacaacatctttaatcctcccataatagctcggtacatcagattgcatccgacccactacagcattaggagtacactccgaatggagcttatgggttgcgacttgaattcctgttcaatgccactcggaatggagtctaaagccatctctgatgcacagataaccgccagtagctactttacgaacatgtttgctacgtggtcaccctctaaggcaaggcttcatttgcaaggccggtctaatgcctggagacctcaggtgaacaacccgaaagaatggctccaggtggactttcagaagaccatgaaagtaacaggtgtcactactcagggagttaagtccttggatactagcatgtatgtgaaggagttccttatttcctcatcacaagatggccaccagtggaccctcttctttcagaatggtaaggtcaaagtgtttcagggcaatcaagacagcttcacacccgtggtgaacagtcttgatcctccactcttgacacgataccttcgaatccatccacagtcttgggagcaccagattgcattgcgcatggaagtacttggatgcgaggctcaggacctctac

SEQ ID NO: 2278 - protein, 1457 aa, synthetic construct
  REGION 1..1457: note = Variant of human B-domain deleted Factor VIII
MQIELSTCFFLCLLRFCFSATRRYYLGAVELSWDYMQSDLGELPVDARFPPRVPKSFPFNTSQVYKKTLFVEFTDHLFNIAKPRPPWMGLLGPTIQAEVYDTVVITLKNMASHPVSLHAVGVSYWKASEGAEYDDQTSQREKEDDKVFPGGSHTYVWQVLKENGPMASDPPCLTYSYLSHVDLVKDLNSGLIGALLVCREGSLAKEKTQTLAKFILLFAVFDEGKSWHSETKNSLMQDRDAASARAWPKMHTVNGYVNRTLPGLIGCHRKSVYWHVIGMGTTPEVHSIFLEGHTFLVRNHRQASLGISPITFLTAQTGLRDLGQFLLFCHIPSHQHDGMEAYVKVDSCPEEPQLRMKNNEEAEDYDDDLTDSEMDVVRFDDDNSPSIIQARSGAKKHPKTWVHYIAAEEEDWDYAPLVLAPDDRSYKSQYLNNGPQRIGRKYKKVRFMAYTDETFKTREAIQHESGILGPLLYGEVGDTLLIIFKNQASRPYNIYPHGITDVRPLYSRRLPKGVKHLKDFPILPGEIFKYKWTITVEDGPTKPDPRCLTRYYSSFVNWERDLASGLIGPLLICYKESVDQRGNQIMSDKRNVILFSVFDENRSWYLTENIQRFLPNPAGVQLEDPEFQASNIMHSINGYVFDSLQLSVCLHEVAYWYILSIGAQTDFLSVFFSGYTFKHKNVYEDTLTLFPFSGETVFMSMENPGLWILGCHNSDFRNRGMTALLKVSSCDWNTGDYYGDSYEDISAYFDSENNAIEPRSFSQNPPVLKRHQREGTRTTLQSDQEEIDYDDTISVEMKKEDFDIYDEDENQSPRSFQKKTRHYFIAAVERLWDYGMSSSPHVLRNRAQSGSVPQFKKVVFQEFTDGSFTQPLYRGELNEHLGLLGPYIRAEVEDNIMVTFRNQASRPYSFYSSLISYEEDQRQGAEPRKNFVKPNETKTYFWKVQHHMAPTKDEFDCKAWAYFSDVDLEKDVHSGLIGPLLVCHTNTLNPAHGRQVTVQEFALFFTIFDETKSWYFTENMERNCRAPCNIQMEDPTFKENYRFHAINGYIMDTLPGLVMAQDQRIRWYLLSMGSNENIHSIHFSGHVFTVRKGEEYKMALYNLYPGVFETVEMLPSKAGIWRVECLIGEHLHAGMSTLFLVYSNKCQNPLGMASGHIRDFQITASGQYGQWAPKLARLHYSGSINAWSTKEPFSWIKVDLLAPMIIHGIKTQGARQKFSSLYISQFIIMYSLDGKKWQTYRGNSTGTDMVFFGNVDSSGIKHNIFNPPIIARYIRLHPTHYSIRSTLRMELMGCDLNSCSMPLGMESKAISDAQITASSYFTNMFATWSPSKARLHLQGRSNAWRPQVNNPKEWLQVDFQKTMKVTGVTTQGVKSLDTSMYVKEFLISSSQDGHQWTLFFQNGKVKVFQGNQDSFTPVVNSLDPPLLTRYLRIHPQSWEHQIALRMEVLGCEAQDLY

SEQ ID NO: 2279 - DNA, 4371 bp, synthetic construct
  misc_feature 1..4371: note = Variant of human B-domain deleted Factor VIII
  source 1..4371: mol_type = other DNA
atgcagattgaactgtctacctgcttcttcctctgtttgctgaggttctgctttagcgccactagacggtactaccttggcgctgtggagctgtcctgggactatatgcagagtgatttgggagagcttcccgtcgacgcacgatttcctcctcgcgttccaaagtcatttccctttaacacaagccaggtgtacaagaagacgctcttcgtcgaattcaccgatcacctgttcaatatcgccaaacccagaccaccatggatgggtcttttggggcctaccatacaagcggaggtgtatgacacagttgttatcactctcaagaacatggcttctcatccggtaagtcttcacgcagtgggcgtgtcctactggaaagcttcagaaggagccgagtatgatgatcagacatcccagagggagaaagaagacgacaaggtatttccaggtgggtctcatacctatgtgtggcaagtgctcaaagagaatggccctatggccagcgatccgccgtgtttgacttacagctacctgtcacacgttgacctcgtcaaggacctcaactccgggttgattggagccttgttggtatgcagggaaggatctcttgccaaagagaagacacagaccctggccaagtttatccttctctttgctgtgttcgatgagggcaaaagttggcatagcgaaacgaagaattccctcatgcaggatcgcgacgcagccagcgccagagcttggcccaagatgcacactgtgaacggatatgtcaataggacgcttcctggcttgattgggtgtcatcggaaaagtgtctactggcacgtgatcggaatggggacaacaccagaggtccactccatatttctcgaaggccataccttccttgttcgaaaccacagacaggcatccttggggatctctcccattacctttctcactgcccaaacgggtcttcgtgacttgggtcagttccttctcttttgccatatcccgtcacaccagcatgatggtatggaagcttatgtgaaagtcgacagttgtcctgaggagccacagttgcgcatgaagaataatgaagaagccgaggattacgacgacgatctcaccgattctgagatggacgtggtgaggtttgatgacgacaactctccctccatcattcaagctcggagcggggcgaagaaacaccccaagacttgggtccactatatagcggcggaagaggaggattgggattacgctcctcttgtattggcaccagatgaccgctcatacaaaagccagtacctcaacaacggaccgcagagaattggccggaagtataagaaagtgcgatttatggcctatacagacgaaacctttaagacaagggaggccatccagcatgagagtgggattttgggacctcttctttacggcgaagttggtgataccctcctcatcatcttcaagaatcaagcttctcgcccctataacatttacccacacgggatcactgacgttaggcctttgtatagcagaagacttcccaaaggcgtgaagcatctcaaagacttccccattttgccaggcgagatctttaagtacaaatggaccattacagtggaagatggaccgactaaaccggaccctcgatgccttacgcggtactattcctccttcgtgaattgggagagagatttggcaagcggactcataggaccactcctcatctgttacaaggaatctgtagaccagaggggtaaccagattatgagtgataaacgcaatgtgatcctttttagcgtcttcgacgagaaccggtcctggtacttgaccgagaatatacaaaggttccttcccaaccccgcaggcgttcagttggaagaccctgagtttcaggccagcaatattatgcactcaatcaacggctatgtgtttgatagtctccagctttctgtttgcctccatgaagtagcctattggtacatcttgtcaattggtgctcaaacagacttcctctccgtcttcttctccggctacacctttaagcacaagaacgtgtatgaggacactctcacactctttccattttctggagaaaccgtgttcatgagtatggagaatccaggcctttggatcttgggttgccacaacagtgattttcgcaatcggggaatgactgctctcctcaaagtcagcagctgtgattggaacacaggcgactatgaaggggattcttacgaggacataagtgcctactttgactccgagaataacgccattgagcccagatcattctcccagaatcctcccgtgcttaaaaggcatcagcgcgaaggtaccagaactactcttcagtctgatcaagaggagattgactatgacgacaccattagcgtggaaatgaagaaggtagatttcgatatccaggacgaggacgggaaccagtctccgcggagctttcagaagaagacgcgacactacttcattgcagcagtcgaaaggctttgggactacggtatgtcatcatcccctcatgtgttgcgcaatagagctcagagtggaagtgttccacagttcaagaaagtcgtctttcaagagtttacagatggcagcttcacacagcctctctatcggggcgagcttaacgaacatttgggactccttggtccctatatccgagccgaagtggaggacaacattatggttacctttaggaatcaagcctctcgcccctacagcttctactcctccctcatcagttatgaggaggatcagagacaaggcgctgaaccacggaagaactttgtgaaaccgaatgagacgaagacctacttctggaaagtacagcaccacatggcccccacaaaagacgaattcgattgcaaagcatgggcgtatttttcagacgttgacttggagaaagatgtacattcaggacttattggtcctttgttggtgtgtcacactaacactctcaatccagcccatggcaggcaggtgacagtccaggaattcgctcttttctttaccatctttgatgagaccaagtcctggtacttcacggaaaacatggagcgcaattgcagagccccctgtaacatacagatggaggaccctacctttaaggaaaattatcggttccacgcaatcaacggatacattatggatacactccctggccttgtgatggctcaggaccaacgaatcaggtggtacctcctcagcatgggttctaatgaaaacatacactccattcacttttcaggacatgtgttcactgtccggaagggggaagagtataagatggccctctacaatttgtatccaggcgtgtttgagaccgttgaaatgcttccctctaaagctggcatctggagagtagagtgcttgatcggagaacatcttcacgcaggtatgagcaccttgttcctcgtgtacagcaacaaatgtcagaatccacttggcatggccagtggacacattcgcgactttcagatcacagcatctggccagtatggacaatgggccccaaagttggctcgcctccattactccggtagcataaatgcgtggtccactaaagaacctttcagctggattaaggtcgatcttcttgcccccatgatcatccacggcattaagacacagggagcgaggcagaaattctcctccctctacatctcacagttcattattatgtatagtttggacggcaagaagtggcaaacttatagaggtaacagtactggaacagacatggtgttcttcggcaacgttgatagctctggcatcaaacacaacatctttaatcctcccataatagctcggtacatcagattgcatccgacccactacagcattaggagtacactccgaatggagcttatgggttgcgacttgaattcctgttcaatgccactcggaatggagtctaaagccatctctgatgcacagataaccgccagtagctactttacgaacatgtttgctacgtggtcaccctctaaggcaaggcttcatttgcaaggccggtctaatgcctggagacctcaggtgaacaacccgaaagaatggctccaggtggactttcagaagaccatgaaagtaacaggtgtcactactcagggagttaagtccttggatactagcatgtatgtgaaggagttccttatttcctcatcacaagatggccaccagtggaccctcttctttcagaatggtaaggtcaaagtgtttcagggcaatcaagacagcttcacacccgtggtgaacagtcttgatcctccactcttgacacgataccttcgaatccatccacagtcttgggagcaccagattgcattgcgcatggaagtacttggatgcgaggctcaggacctctac

SEQ ID NO: 2280 - protein, 1457 aa, synthetic construct
  REGION 1..1457: note = Variant of human B-domain deleted Factor VIII
MQIELSTCFFLCLLRFCFSATRRYYLGAVELSWDYMQSDLGELPVDARFPPRVPKSFPFNTSQVYKKTLFVEFTDHLFNIAKPRPPWMGLLGPTIQAEVYDTVVITLKNMASHPVSLHAVGVSYWKASEGAEYDDQTSQREKEDDKVFPGGSHTYVWQVLKENGPMASDPPCLTYSYLSHVDLVKDLNSGLIGALLVCREGSLAKEKTQTLAKFILLFAVFDEGKSWHSETKNSLMQDRDAASARAWPKMHTVNGYVNRTLPGLIGCHRKSVYWHVIGMGTTPEVHSIFLEGHTFLVRNHRQASLGISPITFLTAQTGLRDLGQFLLFCHIPSHQHDGMEAYVKVDSCPEEPQLRMKNNEEAEDYDDDLTDSEMDVVRFDDDNSPSIIQARSGAKKHPKTWVHYIAAEEEDWDYAPLVLAPDDRSYKSQYLNNGPQRIGRKYKKVRFMAYTDETFKTREAIQHESGILGPLLYGEVGDTLLIIFKNQASRPYNIYPHGITDVRPLYSRRLPKGVKHLKDFPILPGEIFKYKWTITVEDGPTKPDPRCLTRYYSSFVNWERDLASGLIGPLLICYKESVDQRGNQIMSDKRNVILFSVFDENRSWYLTENIQRFLPNPAGVQLEDPEFQASNIMHSINGYVFDSLQLSVCLHEVAYWYILSIGAQTDFLSVFFSGYTFKHKNVYEDTLTLFPFSGETVFMSMENPGLWILGCHNSDFRNRGMTALLKVSSCDWNTGDYEGDSYEDISAYFDSENNAIEPRSFSQNPPVLKRHQREGTRTTLQSDQEEIDYDDTISVEMKKVDFDIQDEDGNQSPRSFQKKTRHYFIAAVERLWDYGMSSSPHVLRNRAQSGSVPQFKKVVFQEFTDGSFTQPLYRGELNEHLGLLGPYIRAEVEDNIMVTFRNQASRPYSFYSSLISYEEDQRQGAEPRKNFVKPNETKTYFWKVQHHMAPTKDEFDCKAWAYFSDVDLEKDVHSGLIGPLLVCHTNTLNPAHGRQVTVQEFALFFTIFDETKSWYFTENMERNCRAPCNIQMEDPTFKENYRFHAINGYIMDTLPGLVMAQDQRIRWYLLSMGSNENIHSIHFSGHVFTVRKGEEYKMALYNLYPGVFETVEMLPSKAGIWRVECLIGEHLHAGMSTLFLVYSNKCQNPLGMASGHIRDFQITASGQYGQWAPKLARLHYSGSINAWSTKEPFSWIKVDLLAPMIIHGIKTQGARQKFSSLYISQFIIMYSLDGKKWQTYRGNSTGTDMVFFGNVDSSGIKHNIFNPPIIARYIRLHPTHYSIRSTLRMELMGCDLNSCSMPLGMESKAISDAQITASSYFTNMFATWSPSKARLHLQGRSNAWRPQVNNPKEWLQVDFQKTMKVTGVTTQGVKSLDTSMYVKEFLISSSQDGHQWTLFFQNGKVKVFQGNQDSFTPVVNSLDPPLLTRYLRIHPQSWEHQIALRMEVLGCEAQDLY

SEQ ID NO: 2281 - DNA, 4371 bp, synthetic construct
  misc_feature 1..4371: note = Variant of human B-domain deleted Factor VIII
  source 1..4371: mol_type = other DNA
atgcagattgaactgtctacctgcttcttcctctgtttgctgaggttctgctttagcgccactagacggtactaccttggcgctgtggagctgtcctgggactatatgcagagtgatttgggagagcttcccgtcgacgcacgatttcctcctcgcgttccaaagtcatttccctttaacacaagccaggtgtacaagaagacgctcttcgtcgaattcaccgatcacctgttcaatatcgccaaacccagaccaccatggatgggtcttttggggcctaccatacaagcggaggtgtatgacacagttgttatcactctcaagaacatggcttctcatccggtaagtcttcacgcagtgggcgtgtcctactggaaagcttcagaaggagccgagtatgatgatcagacatcccagagggagaaagaagacgacaaggtatttccaggtgggtctcatacctatgtgtggcaagtgctcaaagagaatggccctatggcaagcgatccgccgtgtttgacttacagctacctttcacacgttgacctcgtcaaggacctcaactccgggttgattggagccttgttggtatgcagggaaggatctcttgccaaagagaagacacagaccctggccaagtttatccttctctttgctgtgttcgatgagggcaaaagttggcatagcgaaacgaagaattccctcatgcaggatcgcgacgcagccagcgccagagcttggcccaagatgcacactgtgaacggatatgtcaataggacgcttcctggcttgattgggtgtcatcggaaaagtgtctactggcacgtgatcggaatggggacaacaccagaggtccactccatatttctcgaaggccataccttccttgttcgaaaccacagacaggcatccttggggatctctcccattacctttctcactgcccaaacgggtcttcgtgacttgggtcagttccttctcttttgccatatcccgtcacaccagcatgatggtatggaagcttatgtgaaagtcgacagttgtcctgaggagccacagttgcgcatgaagaataatgaagaagccgaggattacgacgacgatctcaccgattctgagatggacgtggtgaggtttgatgacgacaactctccctccatcattcaagctcggagcggggcgaagaaacaccccaagacttgggtccactatatagcggcggaagaggaggattgggattacgctcctcttgtattggcaccagatgaccgctcatacaaaagccagtacctcaacaacggaccgcagagaattggccggaagtataagaaagtgcgatttatggcctatacagacgaaacctttaagacaagggaggccatccagcatgagagtgggattttgggacctcttctttacggcgaagttggtgataccctcctcatcatcttcaagaatcaagcttctcgcccctataacatttacccacacgggatcactgacgttaggcctttgtatagcagaagacttcccaaaggcgtgaagcatctcaaagacttccccattttgccaggcgagatctttaagtacaaatggaccattacagtggaagatggaccgactaaaccggaccctcgatgccttacgcggtactattcctccttcgtgaattgggagagagatttggcaagcggactcataggaccactcctcatctgttacaaggaatctgtagaccagaggggtaaccagattatgagtgataaacgcaatgtgatcctttttagcgtcttcgacgagaaccggtcctggtacttgaccgagaatatacaaaggttccttcccaaccccgcaggcgttcagttggaagaccctgagtttcaggccagcaatattatgcactcaatcaacggctatgtgtttgatagtctccagctttctgtttgcctccatgaagtagcctattggtacatcttgtcaattggtgctcaaacagacttcctctccgtcttcttctccggctacacctttaagcacaagaacgtgtatgaggacactctcacactctttccattttctggagaaaccgtgttcatggagatggagaatccaggcctttggatcttgggttgccacaacagtgattttcgcaatcggggaatgactgctctcctcaaagtcagcagctgtgattggaacacaggcgactattacggggattcttacgaggacataagtgcctactttgactccaaaaataacgccattgagcccagatcattctcccagaatcctcccgtgcttaaaaggcatcagcgcgaaggtaccagaactactcttcagtctgatcaagaggagattgactatgacgacaccattagcgtggaaatgaagaaggtggatttcgatatctatgacgaagatgagaaccagtctccgcggagctttcagaagaagacgcgacactacttcattgcagcagtcgaaaggctttgggactacggtatgtcatcatcccctcatgtgttgcgcaatagagctcagagtggaagtgttccacagttcaagaaagtcgtctttcaagagtttacagatggcagcttcacacagcctctctatcggggcgagcttaacgaacatttgggactccttggtccctatatccgagccgaagtggaggacaacattatggttacctttaggaatcaagcctctcgcccctacagcttctactcctccctcatcagttatgaggaggatcagagacaaggcgctgaaccacggaagaactttgtgaaaccgaatgagacgaagacctacttctggaaagtacagcaccacatggcccccacaaaagacgaattcgattgcaaagcatgggcgtatttttcagacgttgacttggagaaagatgtacattcaggacttattggtcctttgttggtgtgtcacactaacactctcaatccagcccatggcaggcaggtgacagtccaggaattcgctcttttctttaccatctttgatgagaccaagtcctggtacttcacggaaaacatggagcgcaattgcagagccccctgtaacatacagatggaggaccctacctttaaggaaaattatcggttccacgcaatcaacggatacattatggatacactccctggccttgtgatggctcaggaccaacgaatcaggtggtacctcctcagcatgggttctaatgagaacatacactccattcacttttcaggacatgtgttcactgtccggaagggtgaagagtataagatggccctctacaatttgtatccaggcgtgtttgagaccgttgaaatgcttcccatcaaagctggcatctggagagtagagtgcttgatcggagaacatcttcacgcaggtatgagcaccttgttcctcgtgtacagcaacaaatgtcagaatccacttggcatggccagtggacacattcgcgactttcagatcacagcatctggccagtatggacaatgggccccaaagttggctcgcctccattactccggtagcataaatgcgtggtccactaaagaacctttcagctggattaaggtcgatcttcttgcccccatgatcatccacggcattaagacacagggagcgaggcagaaattctcctccctctacatctcacagttcattattatgtatagtttggacggcaagaagtggcaaacttatagaggtaacagtactggaacagacatggtgttcttcggcaacgttgatagctctggcatcaaacacaacatctttaatcctcccataatagctcggtacatcagattgcatccgacccactacagcattaggagtacactccgaatggagcttatgggttgcgacttgaattcctgttcaatgccactcggaatggagtctaaagccatctctgatgcacagataaccgccagtagctactttacgaacatgtttgctacgtggtcaccctctaaggcaaggcttcatttgcaaggccggtctaatgcctggagacctcaggtgaacaacccgaaagaatggctccaggtggactttcagaagaccatgaaagtaacaggtgtcactactcagggagttaagtccttggatactagcatgtatgtgaaggagttccttatttcctcatcacaagatggccaccagtggaccctcttctttcagaatggtaaggtcaaagtgtttcagggcaatcaagacagcttcacacccgtggtgaacagtcttgatcctccactcttgacacgataccttcgaatccatccacagtcttgggagcaccagattgcattgcgcatggaagtacttggatgcgaggctcaggacctctac

SEQ ID NO: 2282 - protein, 1457 aa, synthetic construct
  REGION 1..1457: note = Variant of human B-domain deleted Factor VIII
MQIELSTCFFLCLLRFCFSATRRYYLGAVELSWDYMQSDLGELPVDARFPPRVPKSFPFNTSQVYKKTLFVEFTDHLFNIAKPRPPWMGLLGPTIQAEVYDTVVITLKNMASHPVSLHAVGVSYWKASEGAEYDDQTSQREKEDDKVFPGGSHTYVWQVLKENGPMASDPPCLTYSYLSHVDLVKDLNSGLIGALLVCREGSLAKEKTQTLAKFILLFAVFDEGKSWHSETKNSLMQDRDAASARAWPKMHTVNGYVNRTLPGLIGCHRKSVYWHVIGMGTTPEVHSIFLEGHTFLVRNHRQASLGISPITFLTAQTGLRDLGQFLLFCHIPSHQHDGMEAYVKVDSCPEEPQLRMKNNEEAEDYDDDLTDSEMDVVRFDDDNSPSIIQARSGAKKHPKTWVHYIAAEEEDWDYAPLVLAPDDRSYKSQYLNNGPQRIGRKYKKVRFMAYTDETFKTREAIQHESGILGPLLYGEVGDTLLIIFKNQASRPYNIYPHGITDVRPLYSRRLPKGVKHLKDFPILPGEIFKYKWTITVEDGPTKPDPRCLTRYYSSFVNWERDLASGLIGPLLICYKESVDQRGNQIMSDKRNVILFSVFDENRSWYLTENIQRFLPNPAGVQLEDPEFQASNIMHSINGYVFDSLQLSVCLHEVAYWYILSIGAQTDFLSVFFSGYTFKHKNVYEDTLTLFPFSGETVFMEMENPGLWILGCHNSDFRNRGMTALLKVSSCDWNTGDYYGDSYEDISAYFDSKNNAIEPRSFSQNPPVLKRHQREGTRTTLQSDQEEIDYDDTISVEMKKVDFDIYDEDENQSPRSFQKKTRHYFIAAVERLWDYGMSSSPHVLRNRAQSGSVPQFKKVVFQEFTDGSFTQPLYRGELNEHLGLLGPYIRAEVEDNIMVTFRNQASRPYSFYSSLISYEEDQRQGAEPRKNFVKPNETKTYFWKVQHHMAPTKDEFDCKAWAYFSDVDLEKDVHSGLIGPLLVCHTNTLNPAHGRQVTVQEFALFFTIFDETKSWYFTENMERNCRAPCNIQMEDPTFKENYRFHAINGYIMDTLPGLVMAQDQRIRWYLLSMGSNENIHSIHFSGHVFTVRKGEEYKMALYNLYPGVFETVEMLPIKAGIWRVECLIGEHLHAGMSTLFLVYSNKCQNPLGMASGHIRDFQITASGQYGQWAPKLARLHYSGSINAWSTKEPFSWIKVDLLAPMIIHGIKTQGARQKFSSLYISQFIIMYSLDGKKWQTYRGNSTGTDMVFFGNVDSSGIKHNIFNPPIIARYIRLHPTHYSIRSTLRMELMGCDLNSCSMPLGMESKAISDAQITASSYFTNMFATWSPSKARLHLQGRSNAWRPQVNNPKEWLQVDFQKTMKVTGVTTQGVKSLDTSMYVKEFLISSSQDGHQWTLFFQNGKVKVFQGNQDSFTPVVNSLDPPLLTRYLRIHPQSWEHQIALRMEVLGCEAQDLY

SEQ ID NO: 2283 - DNA, 4371 bp, synthetic construct
  misc_feature 1..4371: note = Variant of human B-domain deleted Factor VIII
  source 1..4371: mol_type = other DNA
atgcagattgaactgtctacctgcttcttcctctgtttgctgaggttctgctttagcgccactagacggtactaccttggcgctgtggagctgtcctgggactatatgcagagtgatttgggagagcttcccgtcgacgcacgatttcctcctcgcgttccaaagtcatttccctttaacacaagccaggtgtacaagaagacgctcttcgtcgaattcaccgatcacctgttcaatatcgccaaacccagaccaccatggatgggtcttttggggcctaccatacaagcggaggtgtatgacacagttgttatcactctcaagaacatggcttctcatccggtaagtcttcacgcagtgggcgtgtcctactggaaagcttcagaaggagccgagtatgatgatcagacatcccagagggagaaagaagacgacaaggtatttccaggtgggtctcatacctatgtgtggcaagtgctcaaagagaatggccctatggccagcgatccgccgtgtttgacttacagctacctttcacacgttgacctcgtcaaggacctcaactccgggttgattggagccttgttggtatgcagggaaggatctcttgccaaagagaagacacagaccctggccaagtttatccttctctttgctgtgttcgatgagggcaaaagttggcatagcgaaacgaagaattccctcatgcaggatcgcgacgcagccagcgccagagcttggcccaagatgcacactgtgaacggatatgtcaataggacgcttcctggcttgattgggtgtcatcggaaaagtgtctactggcacgtgatcggaatggggacaacaccagaggtccactccatatttctcgaaggccataccttccttgttcgaaaccacagacaggcatccttggggatctctcccattacctttctcactgcccaaacgggtcttcgtgacttgggtcagttccttctcttttgccatatcccgtcacaccagcatgatggtatggaagcttatgtgaaagtcgacagttgtcctgaggagccacagttgcgcatgaagaataatgaagaagccgaggattacgacgacgatctcaccgattctgagatggacgtggtgaggtttgatgacgacaactctccctccatcattcaagctcggagcggggcgaagaaacaccccaagacttgggtccactatatagcggcggaagaggaggattgggattacgctcctcttgtattggcaccagatgaccgctcatacaaaagccagtacctcaacaacggaccgcagagaattggccggaagtataagaaagtgcgatttatggcctatacagacgaaacctttaagacaagggaggccatccagcatgagagtgggattttgggacctcttctttacggcgaagttggtgataccctcctcatcatcttcaagaatcaagcttctcgcccctataacatttacccacacgggatcactgacgttaggcctttgtatagcagaagacttcccaaaggcgtgaagcatctcaaagacttccccattttgccaggcgagatctttaagtacaaatggaccattacagtggaagatggaccgactaaaccggaccctcgatgccttacgcggtactattcctccttcgtgaattgggagagagatttggcaagcggactcataggaccactcctcatctgttacaaggaatctgtagaccagaggggtaaccagattatgagtgataaacgcaatgtgatcctttttagcgtcttcgacgagaaccggtcctggtacttgaccgagaatatacaaaggttccttcccaaccccgcaggcgttcagttggaagaccctgagtttcaggccagcaatattatgcactcaatcaacggctatgtgtttgatagtctccagctttctgtttgcctccatgaagtagcctattggtacatcttgtcaattggtgctcaaacagacttcctctccgtcttcttctccggctacacctttaagcacaagaacgtgtatgaggacactctcacactctttccattttctggagaaaccgtgttcatggaaatggagaatccaggcctttggatcttgggttgccacaacagtgattttcgcaatcggggaatgactgctctcctcaaagtcagcagctgtgattggaacacaggcgactattatggggattcttacgaggacataagtgcctactttgactccaagaataacgccattgagcccagatcattctcccagaatcctcccgtgcttaaaaggcatcagcgcgaaggtaccagaactactcttcagtctgatcaagaggagattgactatgacgacaccattagcgtggaaatgaagaaggaagatttcgatatccaggacgagtcggggaaccagtctccgcggagctttcagaagaagacgcgacactacttcattgcagcagtcgaaaggctttgggactacggtatgtcatcatcccctcatgtgttgcgcaatagagctcagagtggaagtgttccacagttcaagaaagtcgtctttcaagagtttacagatggcagcttcacacagcctctctatcggggcgagcttaacgaacatttgggactccttggtccctatatccgagccgaagtggaggacaacattatggttacctttaggaatcaagcctctcgcccctacagcttctactcctccctcatcagttatgaggaggatcagagacaaggcgctgaaccacggaagaactttgtgaaaccgaatgagacgaagacctacttctggaaagtacagcaccacatggcccccacaaaagacgaattcgattgcaaagcatgggcgtatttttcagacgttgacttggagaaagatgtacattcaggacttattggtcctttgttggtgtgtcacactaacactctcaatccagcccatggcaggcaggtgacagtccaggaattcgctcttttctttaccatctttgatgagaccaagtcctggtacttcacggaaaacatggagcgcaattgcagagccccctgtaacatacagatggaggaccctacctttaaggaaaattatcggttccacgcaatcaacggatacattatggatacactccctggccttgtgatggctcaggaccaacgaatcaggtggtacctcctcagcatgggttctaatgaaaacatacactccattcacttttcaggacatgtgttcactgtccggaagaaagaagagtataagatggccctctacaatttgtatccaggcgtgtttgagaccgttgaaatgcttccctctaaagctggcatctggagagtagagtgcttgatcggagaacatcttcacgcaggtatgagcaccttgttcctcgtgtacagcaacaaatgtcagaatccacttggcatggccagtggacacattcgcgactttcagatcacagcatctggccagtatggacaatgggccccaaagttggctcgcctccattactccggtagcataaatgcgtggtccactaaagaacctttcagctggattaaggtcgatcttcttgcccccatgatcatccacggcattaagacacagggagcgaggcagaaattctcctccctctacatctcacagttcattattatgtatagtttggacggcaagaagtggcaaacttatagaggtaacagtactggaacagacatggtgttcttcggcaacgttgatagctctggcatcaaacacaacatctttaatcctcccataatagctcggtacatcagattgcatccgacccactacagcattaggagtacactccgaatggagcttatgggttgcgacttgaattcctgttcaatgccactcggaatggagtctaaagccatctctgatgcacagataaccgccagtagctactttacgaacatgtttgctacgtggtcaccctctaaggcaaggcttcatttgcaaggccggtctaatgcctggagacctcaggtgaacaacccgaaagaatggctccaggtggactttcagaagaccatgaaagtaacaggtgtcactactcagggagttaagtccttggatactagcatgtatgtgaaggagttccttatttcctcatcacaagatggccaccagtggaccctcttctttcagaatggtaaggtcaaagtgtttcagggcaatcaagacagcttcacacccgtggtgaacagtcttgatcctccactcttgacacgataccttcgaatccatccacagtcttgggagcaccagattgcattgcgcatggaagtacttggatgcgaggctcaggacctctac

SEQ ID NO: 2284 - protein, 1457 aa, synthetic construct
  REGION 1..1457: note = Variant of human B-domain deleted Factor VIII
MQIELSTCFFLCLLRFCFSATRRYYLGAVELSWDYMQSDLGELPVDARFPPRVPKSFPFNTSQVYKKTLFVEFTDHLFNIAKPRPPWMGLLGPTIQAEVYDTVVITLKNMASHPVSLHAVGVSYWKASEGAEYDDQTSQREKEDDKVFPGGSHTYVWQVLKENGPMASDPPCLTYSYLSHVDLVKDLNSGLIGALLVCREGSLAKEKTQTLAKFILLFAVFDEGKSWHSETKNSLMQDRDAASARAWPKMHTVNGYVNRTLPGLIGCHRKSVYWHVIGMGTTPEVHSIFLEGHTFLVRNHRQASLGISPITFLTAQTGLRDLGQFLLFCHIPSHQHDGMEAYVKVDSCPEEPQLRMKNNEEAEDYDDDLTDSEMDVVRFDDDNSPSIIQARSGAKKHPKTWVHYIAAEEEDWDYAPLVLAPDDRSYKSQYLNNGPQRIGRKYKKVRFMAYTDETFKTREAIQHESGILGPLLYGEVGDTLLIIFKNQASRPYNIYPHGITDVRPLYSRRLPKGVKHLKDFPILPGEIFKYKWTITVEDGPTKPDPRCLTRYYSSFVNWERDLASGLIGPLLICYKESVDQRGNQIMSDKRNVILFSVFDENRSWYLTENIQRFLPNPAGVQLEDPEFQASNIMHSINGYVFDSLQLSVCLHEVAYWYILSIGAQTDFLSVFFSGYTFKHKNVYEDTLTLFPFSGETVFMEMENPGLWILGCHNSDFRNRGMTALLKVSSCDWNTGDYYGDSYEDISAYFDSKNNAIEPRSFSQNPPVLKRHQREGTRTTLQSDQEEIDYDDTISVEMKKEDFDIQDESGNQSPRSFQKKTRHYFIAAVERLWDYGMSSSPHVLRNRAQSGSVPQFKKVVFQEFTDGSFTQPLYRGELNEHLGLLGPYIRAEVEDNIMVTFRNQASRPYSFYSSLISYEEDQRQGAEPRKNFVKPNETKTYFWKVQHHMAPTKDEFDCKAWAYFSDVDLEKDVHSGLIGPLLVCHTNTLNPAHGRQVTVQEFALFFTIFDETKSWYFTENMERNCRAPCNIQMEDPTFKENYRFHAINGYIMDTLPGLVMAQDQRIRWYLLSMGSNENIHSIHFSGHVFTVRKKEEYKMALYNLYPGVFETVEMLPSKAGIWRVECLIGEHLHAGMSTLFLVYSNKCQNPLGMASGHIRDFQITASGQYGQWAPKLARLHYSGSINAWSTKEPFSWIKVDLLAPMIIHGIKTQGARQKFSSLYISQFIIMYSLDGKKWQTYRGNSTGTDMVFFGNVDSSGIKHNIFNPPIIARYIRLHPTHYSIRSTLRMELMGCDLNSCSMPLGMESKAISDAQITASSYFTNMFATWSPSKARLHLQGRSNAWRPQVNNPKEWLQVDFQKTMKVTGVTTQGVKSLDTSMYVKEFLISSSQDGHQWTLFFQNGKVKVFQGNQDSFTPVVNSLDPPLLTRYLRIHPQSWEHQIALRMEVLGCEAQDLY

SEQ ID NO: 2285 - DNA, 4371 bp, synthetic construct
  misc_feature 1..4371: note = Variant of human B-domain deleted Factor VIII
  source 1..4371: mol_type = other DNA
atgcagattgaactgtctacctgcttcttcctctgtttgctgaggttctgctttagcgccactagacggtactaccttggcgctgtggagctgtcctgggactatatgcagagtgatttgggagagcttcccgtcgacgcacgatttcctcctcgcgttccaaagtcatttccctttaacacaagccaggtgtacaagaagacgctcttcgtcgaattcaccgatcacctgttcaatatcgccaaacccagaccaccatggatgggtcttttggggcctaccatacaagcggaggtgtatgacacagttgttatcactctcaagaacatggcttctcatccggtaagtcttcacgcagtgggcgtgtcctactggaaagcttcagaaggagccgagtatgatgatcagacatcccagagggagaaagaagacgacaaggtatttccaggtgggtctcatacctatgtgtggcaagtgctcaaagagaatggccctatggcaagcgatccgccgtgtttgacttacagctacctttcacacgttgacctcgtcaaggacctcaactccgggttgattggagccttgttggtatgcagggaaggatctcttgccaaagagaagacacagaccctggccaagtttatccttctctttgctgtgttcgatgagggcaaaagttggcatagcgaaacgaagaattccctcatgcaggatcgcgacgcagccagcgccagagcttggcccaagatgcacactgtgaacggatatgtcaataggacgcttcctggcttgattgggtgtcatcggaaaagtgtctactggcacgtgatcggaatggggacaacaccagaggtccactccatatttctcgaaggccataccttccttgttcgaaaccacagacaggcatccttggggatctctcccattacctttctcactgcccaaacgggtcttcgtgacttgggtcagttccttctcttttgccatatcccgtcacaccagcatgatggtatggaagcttatgtgaaagtcgacagttgtcctgaggagccacagttgcgcatgaagaataatgaagaagccgaggattacgacgacgatctcaccgattctgagatggacgtggtgaggtttgatgacgacaactctccctccatcattcaagctcggagcggggcgaagaaacaccccaagacttgggtccactatatagcggcggaagaggaggattgggattacgctcctcttgtattggcaccagatgaccgctcatacaaaagccagtacctcaacaacggaccgcagagaattggccggaagtataagaaagtgcgatttatggcctatacagacgaaacctttaagacaagggaggccatccagcatgagagtgggattttgggacctcttctttacggcgaagttggtgataccctcctcatcatcttcaagaatcaagcttctcgcccctataacatttacccacacgggatcactgacgttaggcctttgtatagcagaagacttcccaaaggcgtgaagcatctcaaagacttccccattttgccaggcgagatctttaagtacaaatggaccattacagtggaagatggaccgactaaaccggaccctcgatgccttacgcggtactattcctccttcgtgaattgggagagagatttggcaagcggactcataggaccactcctcatctgttacaaggaatctgtagaccagaggggtaaccagattatgagtgataaacgcaatgtgatcctttttagcgtcttcgacgagaaccggtcctggtacttgaccgagaatatacaaaggttccttcccaaccccgcaggcgttcagttggaagaccctgagtttcaggccagcaatattatgcactcaatcaacggctatgtgtttgatagtctccagctttctgtttgcctccatgaagtagcctattggtacatcttgtcaattggtgctcaaacagacttcctctccgtcttcttctccggctacacctttaagcacaagaacgtgtatgaggacactctcacactctttccattttctggagaaaccgtgttcatggagatggagaatccaggcctttggatcttgggttgccacaacagtgattttcgcaatcggggaatgactgctctcctcaaagtcagcagctgtgattggaacacaggcgactatgaggaagattcttacgaggacataagtgcctactttgactccgaaaataacgccattgagcccagatcattctcccagaatcctcccgtgcttaaaaggcatcagcgcgaaggtaccagaactactcttcagtctgatcaagaggagattgactatgacgacaccattagcgtggaaatgaagaaggaggatttcgatatctatgacgaagatgagaaccagtctccgcggagctttcagaagaagacgcgacactacttcattgcagcagtcgaaaggctttgggactacggtatgtcatcatcccctcatgtgttgcgcaatagagctcagagtggaagtgttccacagttcaagaaagtcgtctttcaagagtttacagatggcagcttcacacagcctctctatcggggcgagcttaacgaacatttgggactccttggtccctatatccgagccgaagtggaggacaacattatggttacctttaggaatcaagcctctcgcccctacagcttctactcctccctcatcagttatgaggaggatcagagacaaggcgctgaaccacggaagaactttgtgaaaccgaatgagacgaagacctacttctggaaagtacagcaccacatggcccccacaaaagacgaattcgattgcaaagcatgggcgtatttttcagacgttgacttggagaaagatgtacattcaggacttattggtcctttgttggtgtgtcacactaacactctcaatccagcccatggcaggcaggtgacagtccaggaattcgctcttttctttaccatctttgatgagaccaagtcctggtacttcacggaaaacatggagcgcaattgcagagccccctgtaacatacagatggaggaccctacctttaaggaaaattatcggttccacgcaatcaacggatacattatggatacactccctggccttgtgatggctcaggaccaacgaatcaggtggtacctcctcagcatgggttctaatgagaacatacactccattcacttttcaggacatgtgttcactgtccggaagaaagaagagtataagatggccctctacaatttgtatccaggcgtgtttgagaccgttgaaatgcttcccagcaaagctggcatctggagagtagagtgcttgatcggagaacatcttcacgcaggtatgagcaccttgttcctcgtgtacagcaacaaatgtcagaatccacttggcatggccagtggacacattcgcgactttcagatcacagcatctggccagtatggacaatgggccccaaagttggctcgcctccattactccggtagcataaatgcgtggtccactaaagaacctttcagctggattaaggtcgatcttcttgcccccatgatcatccacggcattaagacacagggagcgaggcagaaattctcctccctctacatctcacagttcattattatgtatagtttggacggcaagaagtggcaaacttatagaggtaacagtactggaacagacatggtgttcttcggcaacgttgatagctctggcatcaaacacaacatctttaatcctcccataatagctcggtacatcagattgcatccgacccactacagcattaggagtacactccgaatggagcttatgggttgcgacttgaattcctgttcaatgccactcggaatggagtctaaagccatctctgatgcacagataaccgccagtagctactttacgaacatgtttgctacgtggtcaccctctaaggcaaggcttcatttgcaaggccggtctaatgcctggagacctcaggtgaacaacccgaaagaatggctccaggtggactttcagaagaccatgaaagtaacaggtgtcactactcagggagttaagtccttggatactagcatgtatgtgaaggagttccttatttcctcatcacaagatggccaccagtggaccctcttctttcagaatggtaaggtcaaagtgtttcagggcaatcaagacagcttcacacccgtggtgaacagtcttgatcctccactcttgacacgataccttcgaatccatccacagtcttgggagcaccagattgcattgcgcatggaagtacttggatgcgaggctcaggacctctac

SEQ ID NO: 2286 - protein, 1457 aa, synthetic construct
  REGION 1..1457: note = Variant of human B-domain deleted Factor VIII
MQIELSTCFFLCLLRFCFSATRRYYLGAVELSWDYMQSDLGELPVDARFPPRVPKSFPFNTSQVYKKTLFVEFTDHLFNIAKPRPPWMGLLGPTIQAEVYDTVVITLKNMASHPVSLHAVGVSYWKASEGAEYDDQTSQREKEDDKVFPGGSHTYVWQVLKENGPMASDPPCLTYSYLSHVDLVKDLNSGLIGALLVCREGSLAKEKTQTLAKFILLFAVFDEGKSWHSETKNSLMQDRDAASARAWPKMHTVNGYVNRTLPGLIGCHRKSVYWHVIGMGTTPEVHSIFLEGHTFLVRNHRQASLGISPITFLTAQTGLRDLGQFLLFCHIPSHQHDGMEAYVKVDSCPEEPQLRMKNNEEAEDYDDDLTDSEMDVVRFDDDNSPSIIQARSGAKKHPKTWVHYIAAEEEDWDYAPLVLAPDDRSYKSQYLNNGPQRIGRKYKKVRFMAYTDETFKTREAIQHESGILGPLLYGEVGDTLLIIFKNQASRPYNIYPHGITDVRPLYSRRLPKGVKHLKDFPILPGEIFKYKWTITVEDGPTKPDPRCLTRYYSSFVNWERDLASGLIGPLLICYKESVDQRGNQIMSDKRNVILFSVFDENRSWYLTENIQRFLPNPAGVQLEDPEFQASNIMHSINGYVFDSLQLSVCLHEVAYWYILSIGAQTDFLSVFFSGYTFKHKNVYEDTLTLFPFSGETVFMEMENPGLWILGCHNSDFRNRGMTALLKVSSCDWNTGDYEEDSYEDISAYFDSENNAIEPRSFSQNPPVLKRHQREGTRTTLQSDQEEIDYDDTISVEMKKEDFDIYDEDENQSPRSFQKKTRHYFIAAVERLWDYGMSSSPHVLRNRAQSGSVPQFKKVVFQEFTDGSFTQPLYRGELNEHLGLLGPYIRAEVEDNIMVTFRNQASRPYSFYSSLISYEEDQRQGAEPRKNFVKPNETKTYFWKVQHHMAPTKDEFDCKAWAYFSDVDLEKDVHSGLIGPLLVCHTNTLNPAHGRQVTVQEFALFFTIFDETKSWYFTENMERNCRAPCNIQMEDPTFKENYRFHAINGYIMDTLPGLVMAQDQRIRWYLLSMGSNENIHSIHFSGHVFTVRKKEEYKMALYNLYPGVFETVEMLPSKAGIWRVECLIGEHLHAGMSTLFLVYSNKCQNPLGMASGHIRDFQITASGQYGQWAPKLARLHYSGSINAWSTKEPFSWIKVDLLAPMIIHGIKTQGARQKFSSLYISQFIIMYSLDGKKWQTYRGNSTGTDMVFFGNVDSSGIKHNIFNPPIIARYIRLHPTHYSIRSTLRMELMGCDLNSCSMPLGMESKAISDAQITASSYFTNMFATWSPSKARLHLQGRSNAWRPQVNNPKEWLQVDFQKTMKVTGVTTQGVKSLDTSMYVKEFLISSSQDGHQWTLFFQNGKVKVFQGNQDSFTPVVNSLDPPLLTRYLRIHPQSWEHQIALRMEVLGCEAQDLY

SEQ ID NO: 2287 - DNA, 4371 bp, synthetic construct
  misc_feature 1..4371: note = Variant of human B-domain deleted Factor VIII
  source 1..4371: mol_type = other DNA
atgcagattgaactgtctacctgcttcttcctctgtttgctgaggttctgctttagcgccactagacggtactaccttggcgctgtggagctgtcctgggactatatgcagagtgatttgggagagcttcccgtcgacgcacgatttcctcctcgcgttccaaagtcatttccctttaacacaagccaggtgtacaagaagacgctcttcgtcgaattcaccgatcacctgttcaatatcgccaaacccagaccaccatggatgggtcttttggggcctaccatacaagcggaggtgtatgacacagttgttatcactctcaagaacatggcttctcatccggtaagtcttcacgcagtgggcgtgtcctactggaaagcttcagaaggagccgagtatgatgatcagacatcccagagggagaaagaagacgacaaggtatttccaggtgggtctcatacctatgtgtggcaagtgctcaaagagaatggccctatggcaagcgatccgccgtgtttgacttacagctacctttcacacgttgacctcgtcaaggacctcaactccgggttgattggagccttgttggtatgcagggaaggatctcttgccaaagagaagacacagaccctggccaagtttatccttctctttgctgtgttcgatgagggcaaaagttggcatagcgaaacgaagaattccctcatgcaggatcgcgacgcagccagcgccagagcttggcccaagatgcacactgtgaacggatatgtcaataggacgcttcctggcttgattgggtgtcatcggaaaagtgtctactggcacgtgatcggaatggggacaacaccagaggtccactccatatttctcgaaggccataccttccttgttcgaaaccacagacaggcatccttggggatctctcccattacctttctcactgcccaaacgggtcttcgtgacttgggtcagttccttctcttttgccatatcccgtcacaccagcatgatggtatggaagcttatgtgaaagtcgacagttgtcctgaggagccacagttgcgcatgaagaataatgaagaagccgaggattacgacgacgatctcaccgattctgagatggacgtggtgaggtttgatgacgacaactctccctccatcattcaagctcggagcggggcgaagaaacaccccaagacttgggtccactatatagcggcggaagaggaggattgggattacgctcctcttgtattggcaccagatgaccgctcatacaaaagccagtacctcaacaacggaccgcagagaattggccggaagtataagaaagtgcgatttatggcctatacagacgaaacctttaagacaagggaggccatccagcatgagagtgggattttgggacctcttctttacggcgaagttggtgataccctcctcatcatcttcaagaatcaagcttctcgcccctataacatttacccacacgggatcactgacgttaggcctttgtatagcagaagacttcccaaaggcgtgaagcatctcaaagacttccccattttgccaggcgagatctttaagtacaaatggaccattacagtggaagatggaccgactaaaccggaccctcgatgccttacgcggtactattcctccttcgtgaattgggagagagatttggcaagcggactcataggaccactcctcatctgttacaaggaatctgtagaccagaggggtaaccagattatgagtgataaacgcaatgtgatcctttttagcgtcttcgacgagaaccggtcctggtacttgaccgagaatatacaaaggttccttcccaaccccgcaggcgttcagttggaagaccctgagtttcaggccagcaatattatgcactcaatcaacggctatgtgtttgatagtctccagctttctgtttgcctccatgaagtagcctattggtacatcttgtcaattggtgctcaaacagacttcctctccgtcttcttctccggctacacctttaagcacaagaacgtgtatgaggacactctcacactctttccattttctggagaaaccgtgttcatggagatggagaatccaggcctttggatcttgggttgccacaacagtgattttcgcaatcggggaatgactgctctcctcaaagtcagcagctgtgattggaacacaggcgactatgaggaagattcttacgaggacataagtgcctactttgactccgaaaataacgccattgagcccagatcattctcccagaatcctcccgtgcttaaaaggcatcagcgcgaaggtaccagaactactcttcagtctgatcaagaggagattgactatgacgacaccattagcgtggaaatgaagaaggaggatttcgatatctatgacgaggatgggaaccagtctccgcggagctttcagaagaagacgcgacactacttcattgcagcagtcgaaaggctttgggactacggtatgtcatcatcccctcatgtgttgcgcaatagagctcagagtggaagtgttccacagttcaagaaagtcgtctttcaagagtttacagatggcagcttcacacagcctctctatcggggcgagcttaacgaacatttgggactccttggtccctatatccgagccgaagtggaggacaacattatggttacctttaggaatcaagcctctcgcccctacagcttctactcctccctcatcagttatgaggaggatcagagacaaggcgctgaaccacggaagaactttgtgaaaccgaatgagacgaagacctacttctggaaagtacagcaccacatggcccccacaaaagacgaattcgattgcaaagcatgggcgtatttttcagacgttgacttggagaaagatgtacattcaggacttattggtcctttgttggtgtgtcacactaacactctcaatccagcccatggcaggcaggtgacagtccaggaattcgctcttttctttaccatctttgatgagaccaagtcctggtacttcacggaaaacatggagcgcaattgcagagccccctgtaacatacagatggaggaccctacctttaaggaaaattatcggttccacgcaatcaacggatacattatggatacactccctggccttgtgatggctcaggaccaacgaatcaggtggtacctcctcagcatgggttctaatgagaacatacactccattcacttttcaggacatgtgttcactgtccggaagggtgaagagtataagatggccctctacaatttgtatccaggcgtgtttgagaccgttgaaatgcttccctctaaagctggcatctggagagtagagtgcttgatcggagaacatcttcacgcaggtatgagcaccttgttcctcgtgtacagcaacaaatgtcagaatccacttggcatggccagtggacacattcgcgactttcagatcacagcatctggccagtatggacaatgggccccaaagttggctcgcctccattactccggtagcataaatgcgtggtccactaaagaacctttcagctggattaaggtcgatcttcttgcccccatgatcatccacggcattaagacacagggagcgaggcagaaattctcctccctctacatctcacagttcattattatgtatagtttggacggcaagaagtggcaaacttatagaggtaacagtactggaacagacatggtgttcttcggcaacgttgatagctctggcatcaaacacaacatctttaatcctcccataatagctcggtacatcagattgcatccgacccactacagcattaggagtacactccgaatggagcttatgggttgcgacttgaattcctgttcaatgccactcggaatggagtctaaagccatctctgatgcacagataaccgccagtagctactttacgaacatgtttgctacgtggtcaccctctaaggcaaggcttcatttgcaaggccggtctaatgcctggagacctcaggtgaacaacccgaaagaatggctccaggtggactttcagaagaccatgaaagtaacaggtgtcactactcagggagttaagtccttggatactagcatgtatgtgaaggagttccttatttcctcatcacaagatggccaccagtggaccctcttctttcagaatggtaaggtcaaagtgtttcagggcaatcaagacagcttcacacccgtggtgaacagtcttgatcctccactcttgacacgataccttcgaatccatccacagtcttgggagcaccagattgcattgcgcatggaagtacttggatgcgaggctcaggacctctac

SEQ ID NO: 2288 - protein, 1457 aa, synthetic construct
  REGION 1..1457: note = Variant of human B-domain deleted Factor VIII
MQIELSTCFFLCLLRFCFSATRRYYLGAVELSWDYMQSDLGELPVDARFPPRVPKSFPFNTSQVYKKTLFVEFTDHLFNIAKPRPPWMGLLGPTIQAEVYDTVVITLKNMASHPVSLHAVGVSYWKASEGAEYDDQTSQREKEDDKVFPGGSHTYVWQVLKENGPMASDPPCLTYSYLSHVDLVKDLNSGLIGALLVCREGSLAKEKTQTLAKFILLFAVFDEGKSWHSETKNSLMQDRDAASARAWPKMHTVNGYVNRTLPGLIGCHRKSVYWHVIGMGTTPEVHSIFLEGHTFLVRNHRQASLGISPITFLTAQTGLRDLGQFLLFCHIPSHQHDGMEAYVKVDSCPEEPQLRMKNNEEAEDYDDDLTDSEMDVVRFDDDNSPSIIQARSGAKKHPKTWVHYIAAEEEDWDYAPLVLAPDDRSYKSQYLNNGPQRIGRKYKKVRFMAYTDETFKTREAIQHESGILGPLLYGEVGDTLLIIFKNQASRPYNIYPHGITDVRPLYSRRLPKGVKHLKDFPILPGEIFKYKWTITVEDGPTKPDPRCLTRYYSSFVNWERDLASGLIGPLLICYKESVDQRGNQIMSDKRNVILFSVFDENRSWYLTENIQRFLPNPAGVQLEDPEFQASNIMHSINGYVFDSLQLSVCLHEVAYWYILSIGAQTDFLSVFFSGYTFKHKNVYEDTLTLFPFSGETVFMEMENPGLWILGCHNSDFRNRGMTALLKVSSCDWNTGDYEEDSYEDISAYFDSENNAIEPRSFSQNPPVLKRHQREGTRTTLQSDQEEIDYDDTISVEMKKEDFDIYDEDGNQSPRSFQKKTRHYFIAAVERLWDYGMSSSPHVLRNRAQSGSVPQFKKVVFQEFTDGSFTQPLYRGELNEHLGLLGPYIRAEVEDNIMVTFRNQASRPYSFYSSLISYEEDQRQGAEPRKNFVKPNETKTYFWKVQHHMAPTKDEFDCKAWAYFSDVDLEKDVHSGLIGPLLVCHTNTLNPAHGRQVTVQEFALFFTIFDETKSWYFTENMERNCRAPCNIQMEDPTFKENYRFHAINGYIMDTLPGLVMAQDQRIRWYLLSMGSNENIHSIHFSGHVFTVRKGEEYKMALYNLYPGVFETVEMLPSKAGIWRVECLIGEHLHAGMSTLFLVYSNKCQNPLGMASGHIRDFQITASGQYGQWAPKLARLHYSGSINAWSTKEPFSWIKVDLLAPMIIHGIKTQGARQKFSSLYISQFIIMYSLDGKKWQTYRGNSTGTDMVFFGNVDSSGIKHNIFNPPIIARYIRLHPTHYSIRSTLRMELMGCDLNSCSMPLGMESKAISDAQITASSYFTNMFATWSPSKARLHLQGRSNAWRPQVNNPKEWLQVDFQKTMKVTGVTTQGVKSLDTSMYVKEFLISSSQDGHQWTLFFQNGKVKVFQGNQDSFTPVVNSLDPPLLTRYLRIHPQSWEHQIALRMEVLGCEAQDLY

SEQ ID NO: 2289 - DNA, 4371 bp, synthetic construct
  misc_feature 1..4371: note = Variant of human B-domain deleted Factor VIII
  source 1..4371: mol_type = other DNA
atgcagattgaactgtctacctgcttcttcctctgtttgctgaggttctgctttagcgccactagacggtactaccttggcgctgtggagctgtcctgggactatatgcagagtgatttgggagagcttcccgtcgacgcacgatttcctcctcgcgttccaaagtcatttccctttaacacaagccaggtgtacaagaagacgctcttcgtcgaattcaccgatcacctgttcaatatcgccaaacccagaccaccatggatgggtcttttggggcctaccatacaagcggaggtgtatgacacagttgttatcactctcaagaacatggcttctcatccggtaagtcttcacgcagtgggcgtgtcctactggaaagcttcagaaggagccgagtatgatgatcagacatcccagagggagaaagaagacgacaaggtatttccaggtgggtctcatacctatgtgtggcaagtgctcaaagagaatggccctatggcaagcgatccgccgtgtttgacttacagctacctttcacacgttgacctcgtcaaggacctcaactccgggttgattggagccttgttggtatgcagggaaggatctcttgccaaagagaagacacagaccctggccaagtttatccttctctttgctgtgttcgatgagggcaaaagttggcatagcgaaacgaagaattccctcatgcaggatcgcgacgcagccagcgccagagcttggcccaagatgcacactgtgaacggatatgtcaataggacgcttcctggcttgattgggtgtcatcggaaaagtgtctactggcacgtgatcggaatggggacaacaccagaggtccactccatatttctcgaaggccataccttccttgttcgaaaccacagacaggcatccttggggatctctcccattacctttctcactgcccaaacgggtcttcgtgacttgggtcagttccttctcttttgccatatcccgtcacaccagcatgatggtatggaagcttatgtgaaagtcgacagttgtcctgaggagccacagttgcgcatgaagaataatgaagaagccgaggattacgacgacgatctcaccgattctgagatggacgtggtgaggtttgatgacgacaactctccctccatcattcaagctcggagcggggcgaagaaacaccccaagacttgggtccactatatagcggcggaagaggaggattgggattacgctcctcttgtattggcaccagatgaccgctcatacaaaagccagtacctcaacaacggaccgcagagaattggccggaagtataagaaagtgcgatttatggcctatacagacgaaacctttaagacaagggaggccatccagcatgagagtgggattttgggacctcttctttacggcgaagttggtgataccctcctcatcatcttcaagaatcaagcttctcgcccctataacatttacccacacgggatcactgacgttaggcctttgtatagcagaagacttcccaaaggcgtgaagcatctcaaagacttccccattttgccaggcgagatctttaagtacaaatggaccattacagtggaagatggaccgactaaaccggaccctcgatgccttacgcggtactattcctccttcgtgaattgggagagagatttggcaagcggactcataggaccactcctcatctgttacaaggaatctgtagaccagaggggtaaccagattatgagtgataaacgcaatgtgatcctttttagcgtcttcgacgagaaccggtcctggtacttgaccgagaatatacaaaggttccttcccaaccccgcaggcgttcagttggaagaccctgagtttcaggccagcaatattatgcactcaatcaacggctatgtgtttgatagtctccagctttctgtttgcctccatgaagtagcctattggtacatcttgtcaattggtgctcaaacagacttcctctccgtcttcttctccggctacacctttaagcacaagggggtgtatgaggacactctcacactctttccattttctggagaaaccgtgttcatgagcatggagaatccaggcctttggatcttgggttgccacaacagtgattttcgcaatcggggaatgactgctctcctcaaagtcagcagctgtgattggaacacaggcgactatgaggaagattcttacgaggacataagtgcctactttgactccaagaataacgccattgagcccagatcattctcccagaatcctcccgtgcttaaaaggcatcagcgcgaaggtaccagaactactcttcagtctgatcaagaggagattgactatgacgacaccattagcgtggaaatgaagaaggaggatttcgatatctatgacgaagatgagaaccagtctccgcggagctttcagaagaagacgcgacactacttcattgcagcagtcgaaaggctttgggactacggtatgtcatcatcccctcatgtgttgcgcaatagagctcagagtggaagtgttccacagttcaagaaagtcgtctttcaagagtttacagatggcagcttcacacagcctctctatcggggcgagcttaacgaacatttgggactccttggtccctatatccgagccgaagtggaggacaacattatggttacctttaggaatcaagcctctcgcccctacagcttctactcctccctcatcagttatgaggaggatcagagacaaggcgctgaaccacggaagaactttgtgaaaccgaatgagacgaagacctacttctggaaagtacagcaccacatggcccccacaaaagacgaattcgattgcaaagcatgggcgtatttttcagacgttgacttggagaaagatgtacattcaggacttattggtcctttgttggtgtgtcacactaacactctcaatccagcccatggcaggcaggtgacagtccaggaattcgctcttttctttaccatctttgatgagaccaagtcctggtacttcacggaaaacatggagcgcaattgcagagccccctgtaacatacagatggaggaccctacctttaaggaaaattatcggttccacgcaatcaacggatacattatggatacactccctggccttgtgatggctcaggaccaacgaatcaggtggtacctcctcagcatgggttctaatgagaacatacactccattcacttttcaggacatgtgttcactgtccggaagggtgaagagtataagatggccctctacaatttgtatccaggcgtgtttgagaccgttgaaatgcttccctctaaagctggcatctggagagtagagtgcttgatcggagaacatcttcacgcaggtatgagcaccttgttcctcgtgtacagcaacaaatgtcagaatccacttggcatggccagtggacacattcgcgactttcagatcacagcatctggccagtatggacaatgggccccaaagttggctcgcctccattactccggtagcataaatgcgtggtccactaaagaacctttcagctggattaaggtcgatcttcttgcccccatgatcatccacggcattaagacacagggagcgaggcagaaattctcctccctctacatctcacagttcattattatgtatagtttggacggcaagaagtggcaaacttatagaggtaacagtactggaacagacatggtgttcttcggcaacgttgatagctctggcatcaaacacaacatctttaatcctcccataatagctcggtacatcagattgcatccgacccactacagcattaggagtacactccgaatggagcttatgggttgcgacttgaattcctgttcaatgccactcggaatggagtctaaagccatctctgatgcacagataaccgccagtagctactttacgaacatgtttgctacgtggtcaccctctaaggcaaggcttcatttgcaaggccggtctaatgcctggagacctcaggtgaacaacccgaaagaatggctccaggtggactttcagaagaccatgaaagtaacaggtgtcactactcagggagttaagtccttggatactagcatgtatgtgaaggagttccttatttcctcatcacaagatggccaccagtggaccctcttctttcagaatggtaaggtcaaagtgtttcagggcaatcaagacagcttcacacccgtggtgaacagtcttgatcctccactcttgacacgataccttcgaatccatccacagtcttgggagcaccagattgcattgcgcatggaagtacttggatgcgaggctcaggacctctac

SEQ ID NO: 2290 - protein, 1457 aa, synthetic construct
  REGION 1..1457: note = Variant of human B-domain deleted Factor VIII
MQIELSTCFFLCLLRFCFSATRRYYLGAVELSWDYMQSDLGELPVDARFPPRVPKSFPFNTSQVYKKTLFVEFTDHLFNIAKPRPPWMGLLGPTIQAEVYDTVVITLKNMASHPVSLHAVGVSYWKASEGAEYDDQTSQREKEDDKVFPGGSHTYVWQVLKENGPMASDPPCLTYSYLSHVDLVKDLNSGLIGALLVCREGSLAKEKTQTLAKFILLFAVFDEGKSWHSETKNSLMQDRDAASARAWPKMHTVNGYVNRTLPGLIGCHRKSVYWHVIGMGTTPEVHSIFLEGHTFLVRNHRQASLGISPITFLTAQTGLRDLGQFLLFCHIPSHQHDGMEAYVKVDSCPEEPQLRMKNNEEAEDYDDDLTDSEMDVVRFDDDNSPSIIQARSGAKKHPKTWVHYIAAEEEDWDYAPLVLAPDDRSYKSQYLNNGPQRIGRKYKKVRFMAYTDETFKTREAIQHESGILGPLLYGEVGDTLLIIFKNQASRPYNIYPHGITDVRPLYSRRLPKGVKHLKDFPILPGEIFKYKWTITVEDGPTKPDPRCLTRYYSSFVNWERDLASGLIGPLLICYKESVDQRGNQIMSDKRNVILFSVFDENRSWYLTENIQRFLPNPAGVQLEDPEFQASNIMHSINGYVFDSLQLSVCLHEVAYWYILSIGAQTDFLSVFFSGYTFKHKGVYEDTLTLFPFSGETVFMSMENPGLWILGCHNSDFRNRGMTALLKVSSCDWNTGDYEEDSYEDISAYFDSKNNAIEPRSFSQNPPVLKRHQREGTRTTLQSDQEEIDYDDTISVEMKKEDFDIYDEDENQSPRSFQKKTRHYFIAAVERLWDYGMSSSPHVLRNRAQSGSVPQFKKVVFQEFTDGSFTQPLYRGELNEHLGLLGPYIRAEVEDNIMVTFRNQASRPYSFYSSLISYEEDQRQGAEPRKNFVKPNETKTYFWKVQHHMAPTKDEFDCKAWAYFSDVDLEKDVHSGLIGPLLVCHTNTLNPAHGRQVTVQEFALFFTIFDETKSWYFTENMERNCRAPCNIQMEDPTFKENYRFHAINGYIMDTLPGLVMAQDQRIRWYLLSMGSNENIHSIHFSGHVFTVRKGEEYKMALYNLYPGVFETVEMLPSKAGIWRVECLIGEHLHAGMSTLFLVYSNKCQNPLGMASGHIRDFQITASGQYGQWAPKLARLHYSGSINAWSTKEPFSWIKVDLLAPMIIHGIKTQGARQKFSSLYISQFIIMYSLDGKKWQTYRGNSTGTDMVFFGNVDSSGIKHNIFNPPIIARYIRLHPTHYSIRSTLRMELMGCDLNSCSMPLGMESKAISDAQITASSYFTNMFATWSPSKARLHLQGRSNAWRPQVNNPKEWLQVDFQKTMKVTGVTTQGVKSLDTSMYVKEFLISSSQDGHQWTLFFQNGKVKVFQGNQDSFTPVVNSLDPPLLTRYLRIHPQSWEHQIALRMEVLGCEAQDLY

SEQ ID NO: 2291 - DNA, 4371 bp, synthetic construct
  misc_feature 1..4371: note = Variant of human B-domain deleted Factor VIII
  source 1..4371: mol_type = other DNA
atgcagattgaactgtctacctgcttcttcctctgtttgctgaggttctgctttagcgccactagacggtactaccttggcgctgtggagctgtcctgggactatatgcagagtgatttgggagagcttcccgtcgacgcacgatttcctcctcgcgttccaaagtcatttccctttaacacaagccaggtgtacaagaagacgctcttcgtcgaattcaccgatcacctgttcaatatcgccaaacccagaccaccatggatgggtcttttggggcctaccatacaagcggaggtgtatgacacagttgttatcactctcaagaacatggcttctcatccggtaagtcttcacgcagtgggcgtgtcctactggaaagcttcagaaggagccgagtatgatgatcagacatcccagagggagaaagaagacgacaaggtatttccaggtgggtctcatacctatgtgtggcaagtgctcaaagagaatggccctatggcaagcgatccgccgtgtttgacttacagctacctttcacacgttgacctcgtcaaggacctcaactccgggttgattggagccttgttggtatgcagggaaggatctcttgccaaagagaagacacagaccctggccaagtttatccttctctttgctgtgttcgatgagggcaaaagttggcatagcgaaacgaagaattccctcatgcaggatcgcgacgcagccagcgccagagcttggcccaagatgcacactgtgaacggatatgtcaataggacgcttcctggcttgattgggtgtcatcggaaaagtgtctactggcacgtgatcggaatggggacaacaccagaggtccactccatatttctcgaaggccataccttccttgttcgaaaccacagacaggcatccttggggatctctcccattacctttctcactgcccaaacgggtcttcgtgacttgggtcagttccttctcttttgccatatcccgtcacaccagcatgatggtatggaagcttatgtgaaagtcgacagttgtcctgaggagccacagttgcgcatgaagaataatgaagaagccgaggattacgacgacgatctcaccgattctgagatggacgtggtgaggtttgatgacgacaactctccctccatcattcaagctcggagcggggcgaagaaacaccccaagacttgggtccactatatagcggcggaagaggaggattgggattacgctcctcttgtattggcaccagatgaccgctcatacaaaagccagtacctcaacaacggaccgcagagaattggccggaagtataagaaagtgcgatttatggcctatacagacgaaacctttaagacaagggaggccatccagcatgagagtgggattttgggacctcttctttacggcgaagttggtgataccctcctcatcatcttcaagaatcaagcttctcgcccctataacatttacccacacgggatcactgacgttaggcctttgtatagcagaagacttcccaaaggcgtgaagcatctcaaagacttccccattttgccaggcgagatctttaagtacaaatggaccattacagtggaagatggaccgactaaaccggaccctcgatgccttacgcggtactattcctccttcgtgaattgggagagagatttggcaagcggactcataggaccactcctcatctgttacaaggaatctgtagaccagaggggtaaccagattatgagtgataaacgcaatgtgatcctttttagcgtcttcgacgagaaccggtcctggtacttgaccgagaatatacaaaggttccttcccaaccccgcaggcgttcagttggaagaccctgagtttcaggccagcaatattatgcactcaatcaacggctatgtgtttgatagtctccagctttctgtttgcctccatgaagtagcctattggtacatcttgtcaattggtgctcaaacagacttcctctccgtcttcttctccggctacacctttaagcacaagggcgtgtatgaggacactctcacactctttccattttctggagaaaccgtgttcatggagatggagaatccaggcctttggatcttgggttgccacaacagtgattttcgcaatcggggaatgactgctctcctcaaagtcagcagctgtgattggaacacaggcgactatgaggaagattcttacgaggacataagtgcctactttgactccaagaataacgccattgagcccagatcattctcccagaatcctcccgtgcttaaaaggcatcagcgcgaaggtaccagaactactcttcagtctgatcaagaggagattgactatgacgacaccattagcgtggaaatgaagaaggaggatttcgatatctatgacgaagatgagaaccagtctccgcggagctttcagaagaagacgcgacactacttcattgcagcagtcgaaaggctttgggactacggtatgtcatcatcccctcatgtgttgcgcaatagagctcagagtggaagtgttccacagttcaagaaagtcgtctttcaagagtttacagatggcagcttcacacagcctctctatcggggcgagcttaacgaacatttgggactccttggtccctatatccgagccgaagtggaggacaacattatggttacctttaggaatcaagcctctcgcccctacagcttctactcctccctcatcagttatgaggaggatcagagacaaggcgctgaaccacggaagaactttgtgaaaccgaatgagacgaagacctacttctggaaagtacagcaccacatggcccccacaaaagacgaattcgattgcaaagcatgggcgtatttttcagacgttgacttggagaaagatgtacattcaggacttattggtcctttgttggtgtgtcacactaacactctcaatccagcccatggcaggcaggtgacagtccaggaattcgctcttttctttaccatctttgatgagaccaagtcctggtacttcacggaaaacatggagcgcaattgcagagccccctgtaacatacagatggaggaccctacctttaaggaaaattatcggttccacgcaatcaacggatacattatggatacactccctggccttgtgatggctcaggaccaacgaatcaggtggtacctcctcagcatgggttctaatgagaacatacactccattcacttttcaggacatgtgttcactgtccggaagaaagaagagtataagatggccctctacaatttgtatccaggcgtgtttgagaccgttgaaatgcttccctctaaagctggcatctggagagtagagtgcttgatcggagaacatcttcacgcaggtatgagcaccttgttcctcgtgtacagcaacaaatgtcagaatccacttggcatggccagtggacacattcgcgactttcagatcacagcatctggccagtatggacaatgggccccaaagttggctcgcctccattactccggtagcataaatgcgtggtccactaaagaacctttcagctggattaaggtcgatcttcttgcccccatgatcatccacggcattaagacacagggagcgaggcagaaattctcctccctctacatctcacagttcattattatgtatagtttggacggcaagaagtggcaaacttatagaggtaacagtactggaacagacatggtgttcttcggcaacgttgatagctctggcatcaaacacaacatctttaatcctcccataatagctcggtacatcagattgcatccgacccactacagcattaggagtacactccgaatggagcttatgggttgcgacttgaattcctgttcaatgccactcggaatggagtctaaagccatctctgatgcacagataaccgccagtagctactttacgaacatgtttgctacgtggtcaccctctaaggcaaggcttcatttgcaaggccggtctaatgcctggagacctcaggtgaacaacccgaaagaatggctccaggtggactttcagaagaccatgaaagtaacaggtgtcactactcagggagttaagtccttggatactagcatgtatgtgaaggagttccttatttcctcatcacaagatggccaccagtggaccctcttctttcagaatggtaaggtcaaagtgtttcagggcaatcaagacagcttcacacccgtggtgaacagtcttgatcctccactcttgacacgataccttcgaatccatccacagtcttgggagcaccagattgcattgcgcatggaagtacttggatgcgaggctcaggacctctac

SEQ ID NO: 2292 - protein, 1457 aa, synthetic construct
  REGION 1..1457: note = Variant of human B-domain deleted Factor VIII
MQIELSTCFFLCLLRFCFSATRRYYLGAVELSWDYMQSDLGELPVDARFPPRVPKSFPFNTSQVYKKTLFVEFTDHLFNIAKPRPPWMGLLGPTIQAEVYDTVVITLKNMASHPVSLHAVGVSYWKASEGAEYDDQTSQREKEDDKVFPGGSHTYVWQVLKENGPMASDPPCLTYSYLSHVDLVKDLNSGLIGALLVCREGSLAKEKTQTLAKFILLFAVFDEGKSWHSETKNSLMQDRDAASARAWPKMHTVNGYVNRTLPGLIGCHRKSVYWHVIGMGTTPEVHSIFLEGHTFLVRNHRQASLGISPITFLTAQTGLRDLGQFLLFCHIPSHQHDGMEAYVKVDSCPEEPQLRMKNNEEAEDYDDDLTDSEMDVVRFDDDNSPSIIQARSGAKKHPKTWVHYIAAEEEDWDYAPLVLAPDDRSYKSQYLNNGPQRIGRKYKKVRFMAYTDETFKTREAIQHESGILGPLLYGEVGDTLLIIFKNQASRPYNIYPHGITDVRPLYSRRLPKGVKHLKDFPILPGEIFKYKWTITVEDGPTKPDPRCLTRYYSSFVNWERDLASGLIGPLLICYKESVDQRGNQIMSDKRNVILFSVFDENRSWYLTENIQRFLPNPAGVQLEDPEFQASNIMHSINGYVFDSLQLSVCLHEVAYWYILSIGAQTDFLSVFFSGYTFKHKGVYEDTLTLFPFSGETVFMEMENPGLWILGCHNSDFRNRGMTALLKVSSCDWNTGDYEEDSYEDISAYFDSKNNAIEPRSFSQNPPVLKRHQREGTRTTLQSDQEEIDYDDTISVEMKKEDFDIYDEDENQSPRSFQKKTRHYFIAAVERLWDYGMSSSPHVLRNRAQSGSVPQFKKVVFQEFTDGSFTQPLYRGELNEHLGLLGPYIRAEVEDNIMVTFRNQASRPYSFYSSLISYEEDQRQGAEPRKNFVKPNETKTYFWKVQHHMAPTKDEFDCKAWAYFSDVDLEKDVHSGLIGPLLVCHTNTLNPAHGRQVTVQEFALFFTIFDETKSWYFTENMERNCRAPCNIQMEDPTFKENYRFHAINGYIMDTLPGLVMAQDQRIRWYLLSMGSNENIHSIHFSGHVFTVRKKEEYKMALYNLYPGVFETVEMLPSKAGIWRVECLIGEHLHAGMSTLFLVYSNKCQNPLGMASGHIRDFQITASGQYGQWAPKLARLHYSGSINAWSTKEPFSWIKVDLLAPMIIHGIKTQGARQKFSSLYISQFIIMYSLDGKKWQTYRGNSTGTDMVFFGNVDSSGIKHNIFNPPIIARYIRLHPTHYSIRSTLRMELMGCDLNSCSMPLGMESKAISDAQITASSYFTNMFATWSPSKARLHLQGRSNAWRPQVNNPKEWLQVDFQKTMKVTGVTTQGVKSLDTSMYVKEFLISSSQDGHQWTLFFQNGKVKVFQGNQDSFTPVVNSLDPPLLTRYLRIHPQSWEHQIALRMEVLGCEAQDLY

SEQ ID NO: 2293 - DNA, 4371 bp, synthetic construct
  misc_feature 1..4371: note = Variant of human B-domain deleted Factor VIII
  source 1..4371: mol_type = other DNA
atgcagattgaactgtctacctgcttcttcctctgtttgctgaggttctgctttagcgccactagacggtactaccttggcgctgtggagctgtcctgggactatatgcagagtgatttgggagagcttcccgtcgacgcacgatttcctcctcgcgttccaaagtcatttccctttaacacaagccaggtgtacaagaagacgctcttcgtcgaattcaccgatcacctgttcaatatcgccaaacccagaccaccatggatgggtcttttggggcctaccatacaagcggaggtgtatgacacagttgttatcactctcaagaacatggcttctcatccggtaagtcttcacgcagtgggcgtgtcctactggaaagcttcagaaggagccgagtatgatgatcagacatcccagagggagaaagaagacgacaaggtatttccaggtgggtctcatacctatgtgtggcaagtgctcaaagagaatggccctatggcaagcgatccgccgtgtttgacttacagctacctttcacacgttgacctcgtcaaggacctcaactccgggttgattggagccttgttggtatgcagggaaggatctcttgccaaagagaagacacagaccctggccaagtttatccttctctttgctgtgttcgatgagggcaaaagttggcatagcgaaacgaagaattccctcatgcaggatcgcgacgcagccagcgccagagcttggcccaagatgcacactgtgaacggatatgtcaataggacgcttcctggcttgattgggtgtcatcggaaaagtgtctactggcacgtgatcggaatggggacaacaccagaggtccactccatatttctcgaaggccataccttccttgttcgaaaccacagacaggcatccttggggatctctcccattacctttctcactgcccaaacgggtcttcgtgacttgggtcagttccttctcttttgccatatcccgtcacaccagcatgatggtatggaagcttatgtgaaagtcgacagttgtcctgaggagccacagttgcgcatgaagaataatgaagaagccgaggattacgacgacgatctcaccgattctgagatggacgtggtgaggtttgatgacgacaactctccctccatcattcaagctcggagcggggcgaagaaacaccccaagacttgggtccactatatagcggcggaagaggaggattgggattacgctcctcttgtattggcaccagatgaccgctcatacaaaagccagtacctcaacaacggaccgcagagaattggccggaagtataagaaagtgcgatttatggcctatacagacgaaacctttaagacaagggaggccatccagcatgagagtgggattttgggacctcttctttacggcgaagttggtgataccctcctcatcatcttcaagaatcaagcttctcgcccctataacatttacccacacgggatcactgacgttaggcctttgtatagcagaagacttcccaaaggcgtgaagcatctcaaagacttccccattttgccaggcgagatctttaagtacaaatggaccattacagtggaagatggaccgactaaaccggaccctcgatgccttacgcggtactattcctccttcgtgaattgggagagagatttggcaagcggactcataggaccactcctcatctgttacaaggaatctgtagaccagaggggtaaccagattatgagtgataaacgcaatgtgatcctttttagcgtcttcgacgagaaccggtcctggtacttgaccgagaatatacaaaggttccttcccaaccccgcaggcgttcagttggaagaccctgagtttcaggccagcaatattatgcactcaatcaacggctatgtgtttgatagtctccagctttctgtttgcctccatgaagtagcctattggtacatcttgtcaattggtgctcaaacagacttcctctccgtcttcttctccggctacacctttaagcacaagggggtgtatgaggacactctcacactctttccattttctggagaaaccgtgttcatggagatggagaatccaggcctttggatcttgggttgccacaacagtgattttcgcaatcggggaatgactgctctcctcaaagtcagcagctgtgattggaacacaggcgactattacggggattcttacgaggacataagtgcctactttgactccgaaaataacgccattgagcccagatcattctcccagaatcctcccgtgcttaaaaggcatcagcgcgaaggtaccagaactactcttcagtctgatcaagaggagattgactatgacgacaccattagcgtggaaatgaagaaggtggatttcgatatctatgacgaagatgagaaccagtctccgcggagctttcagaagaagacgcgacactacttcattgcagcagtcgaaaggctttgggactacggtatgtcatcatcccctcatgtgttgcgcaatagagctcagagtggaagtgttccacagttcaagaaagtcgtctttcaagagtttacagatggcagcttcacacagcctctctatcggggcgagcttaacgaacatttgggactccttggtccctatatccgagccgaagtggaggacaacattatggttacctttaggaatcaagcctctcgcccctacagcttctactcctccctcatcagttatgaggaggatcagagacaaggcgctgaaccacggaagaactttgtgaaaccgaatgagacgaagacctacttctggaaagtacagcaccacatggcccccacaaaagacgaattcgattgcaaagcatgggcgtatttttcagacgttgacttggagaaagatgtacattcaggacttattggtcctttgttggtgtgtcacactaacactctcaatccagcccatggcaggcaggtgacagtccaggaattcgctcttttctttaccatctttgatgagaccaagtcctggtacttcacggaaaacatggagcgcaattgcagagccccctgtaacatacagatggaggaccctacctttaaggaaaattatcggttccacgcaatcaacggatacattatggatacactccctggccttgtgatggctcaggaccaacgaatcaggtggtacctcctcagcatgggttctaatgagaacatacactccattcacttttcaggacatgtgttcactgtccggaagggtgaagagtataagatggccctctacaatttgtatccaggcgtgtttgagaccgttgaaatgcttcccatcaaagctggcatctggagagtagagtgcttgatcggagaacatcttcacgcaggtatgagcaccttgttcctcgtgtacagcaacaaatgtcagaatccacttggcatggccagtggacacattcgcgactttcagatcacagcatctggccagtatggacaatgggccccaaagttggctcgcctccattactccggtagcataaatgcgtggtccactaaagaacctttcagctggattaaggtcgatcttcttgcccccatgatcatccacggcattaagacacagggagcgaggcagaaattctcctccctctacatctcacagttcattattatgtatagtttggacggcaagaagtggcaaacttatagaggtaacagtactggaacagacatggtgttcttcggcaacgttgatagctctggcatcaaacacaacatctttaatcctcccataatagctcggtacatcagattgcatccgacccactacagcattaggagtacactccgaatggagcttatgggttgcgacttgaattcctgttcaatgccactcggaatggagtctaaagccatctctgatgcacagataaccgccagtagctactttacgaacatgtttgctacgtggtcaccctctaaggcaaggcttcatttgcaaggccggtctaatgcctggagacctcaggtgaacaacccgaaagaatggctccaggtggactttcagaagaccatgaaagtaacaggtgtcactactcagggagttaagtccttggatactagcatgtatgtgaaggagttccttatttcctcatcacaagatggccaccagtggaccctcttctttcagaatggtaaggtcaaagtgtttcagggcaatcaagacagcttcacacccgtggtgaacagtcttgatcctccactcttgacacgataccttcgaatccatccacagtcttgggagcaccagattgcattgcgcatggaagtacttggatgcgaggctcaggacctctac

SEQ ID NO: 2294 - protein, 1457 aa, synthetic construct
  REGION 1..1457: note = Variant of human B-domain deleted Factor VIII
MQIELSTCFFLCLLRFCFSATRRYYLGAVELSWDYMQSDLGELPVDARFPPRVPKSFPFNTSQVYKKTLFVEFTDHLFNIAKPRPPWMGLLGPTIQAEVYDTVVITLKNMASHPVSLHAVGVSYWKASEGAEYDDQTSQREKEDDKVFPGGSHTYVWQVLKENGPMASDPPCLTYSYLSHVDLVKDLNSGLIGALLVCREGSLAKEKTQTLAKFILLFAVFDEGKSWHSETKNSLMQDRDAASARAWPKMHTVNGYVNRTLPGLIGCHRKSVYWHVIGMGTTPEVHSIFLEGHTFLVRNHRQASLGISPITFLTAQTGLRDLGQFLLFCHIPSHQHDGMEAYVKVDSCPEEPQLRMKNNEEAEDYDDDLTDSEMDVVRFDDDNSPSIIQARSGAKKHPKTWVHYIAAEEEDWDYAPLVLAPDDRSYKSQYLNNGPQRIGRKYKKVRFMAYTDETFKTREAIQHESGILGPLLYGEVGDTLLIIFKNQASRPYNIYPHGITDVRPLYSRRLPKGVKHLKDFPILPGEIFKYKWTITVEDGPTKPDPRCLTRYYSSFVNWERDLASGLIGPLLICYKESVDQRGNQIMSDKRNVILFSVFDENRSWYLTENIQRFLPNPAGVQLEDPEFQASNIMHSINGYVFDSLQLSVCLHEVAYWYILSIGAQTDFLSVFFSGYTFKHKGVYEDTLTLFPFSGETVFMEMENPGLWILGCHNSDFRNRGMTALLKVSSCDWNTGDYYGDSYEDISAYFDSENNAIEPRSFSQNPPVLKRHQREGTRTTLQSDQEEIDYDDTISVEMKKVDFDIYDEDENQSPRSFQKKTRHYFIAAVERLWDYGMSSSPHVLRNRAQSGSVPQFKKVVFQEFTDGSFTQPLYRGELNEHLGLLGPYIRAEVEDNIMVTFRNQASRPYSFYSSLISYEEDQRQGAEPRKNFVKPNETKTYFWKVQHHMAPTKDEFDCKAWAYFSDVDLEKDVHSGLIGPLLVCHTNTLNPAHGRQVTVQEFALFFTIFDETKSWYFTENMERNCRAPCNIQMEDPTFKENYRFHAINGYIMDTLPGLVMAQDQRIRWYLLSMGSNENIHSIHFSGHVFTVRKGEEYKMALYNLYPGVFETVEMLPIKAGIWRVECLIGEHLHAGMSTLFLVYSNKCQNPLGMASGHIRDFQITASGQYGQWAPKLARLHYSGSINAWSTKEPFSWIKVDLLAPMIIHGIKTQGARQKFSSLYISQFIIMYSLDGKKWQTYRGNSTGTDMVFFGNVDSSGIKHNIFNPPIIARYIRLHPTHYSIRSTLRMELMGCDLNSCSMPLGMESKAISDAQITASSYFTNMFATWSPSKARLHLQGRSNAWRPQVNNPKEWLQVDFQKTMKVTGVTTQGVKSLDTSMYVKEFLISSSQDGHQWTLFFQNGKVKVFQGNQDSFTPVVNSLDPPLLTRYLRIHPQSWEHQIALRMEVLGCEAQDLY

SEQ ID NO: 2295 - DNA, 4371 bp, synthetic construct
  misc_feature 1..4371: note = Variant of human B-domain deleted Factor VIII
  source 1..4371: mol_type = other DNA
atgcagattgaactgtctacctgcttcttcctctgtttgctgaggttctgctttagcgccactagacggtactaccttggcgctgtggagctgtcctgggactatatgcagagtgatttgggagagcttcccgtcgacgcacgatttcctcctcgcgttccaaagtcatttccctttaacacaagccaggtgtacaagaagacgctcttcgtcgaattcaccgatcacctgttcaatatcgccaaacccagaccaccatggatgggtcttttggggcctaccatacaagcggaggtgtatgacacagttgttatcactctcaagaacatggcttctcatccggtaagtcttcacgcagtgggcgtgtcctactggaaagcttcagaaggagccgagtatgatgatcagacatcccagagggagaaagaagacgacaaggtatttccaggtgggtctcatacctatgtgtggcaagtgctcaaagagaatggccctatggcaagcgatccgccgtgtttgacttacagctacctttcacacgttgacctcgtcaaggacctcaactccgggttgattggagccttgttggtatgcagggaaggatctcttgccaaagagaagacacagaccctggccaagtttatccttctctttgctgtgttcgatgagggcaaaagttggcatagcgaaacgaagaattccctcatgcaggatcgcgacgcagccagcgccagagcttggcccaagatgcacactgtgaacggatatgtcaataggacgcttcctggcttgattgggtgtcatcggaaaagtgtctactggcacgtgatcggaatggggacaacaccagaggtccactccatatttctcgaaggccataccttccttgttcgaaaccacagacaggcatccttggggatctctcccattacctttctcactgcccaaacgggtcttcgtgacttgggtcagttccttctcttttgccatatcccgtcacaccagcatgatggtatggaagcttatgtgaaagtcgacagttgtcctgaggagccacagttgcgcatgaagaataatgaagaagccgaggattacgacgacgatctcaccgattctgagatggacgtggtgaggtttgatgacgacaactctccctccatcattcaagctcggagcggggcgaagaaacaccccaagacttgggtccactatatagcggcggaagaggaggattgggattacgctcctcttgtattggcaccagatgaccgctcatacaaaagccagtacctcaacaacggaccgcagagaattggccggaagtataagaaagtgcgatttatggcctatacagacgaaacctttaagacaagggaggccatccagcatgagagtgggattttgggacctcttctttacggcgaagttggtgataccctcctcatcatcttcaagaatcaagcttctcgcccctataacatttacccacacgggatcactgacgttaggcctttgtatagcagaagacttcccaaaggcgtgaagcatctcaaagacttccccattttgccaggcgagatctttaagtacaaatggaccattacagtggaagatggaccgactaaaccggaccctcgatgccttacgcggtactattcctccttcgtgaattgggagagagatttggcaagcggactcataggaccactcctcatctgttacaaggaatctgtagaccagaggggtaaccagattatgagtgataaacgcaatgtgatcctttttagcgtcttcgacgagaaccggtcctggtacttgaccgagaatatacaaaggttccttcccaaccccgcaggcgttcagttggaagaccctgagtttcaggccagcaatattatgcactcaatcaacggctatgtgtttgatagtctccagctttctgtttgcctccatgaagtagcctattggtacatcttgtcaattggtgctcaaacagacttcctctccgtcttcttctccggctacacctttaagcacaagggggtgtatgaggacactctcacactctttccattttctggagaaaccgtgttcatggagatggagaatccaggcctttggatcttgggttgccacaacagtgattttcgcaatcggggaatgactgctctcctcaaagtcagcagctgtgattggaacacaggcgactatgaggaagattcttacgaggacataagtgcctactttgactccaaaaataacgccattgagcccagatcattctcccagaatcctcccgtgcttaaaaggcatcagcgcgaaggtaccagaactactcttcagtctgatcaagaggagattgactatgacgacaccattagcgtggaaatgaagaaggaggatttcgatatctatgacgaggatgggaaccagtctccgcggagctttcagaagaagacgcgacactacttcattgcagcagtcgaaaggctttgggactacggtatgtcatcatcccctcatgtgttgcgcaatagagctcagagtggaagtgttccacagttcaagaaagtcgtctttcaagagtttacagatggcagcttcacacagcctctctatcggggcgagcttaacgaacatttgggactccttggtccctatatccgagccgaagtggaggacaacattatggttacctttaggaatcaagcctctcgcccctacagcttctactcctccctcatcagttatgaggaggatcagagacaaggcgctgaaccacggaagaactttgtgaaaccgaatgagacgaagacctacttctggaaagtacagcaccacatggcccccacaaaagacgaattcgattgcaaagcatgggcgtatttttcagacgttgacttggagaaagatgtacattcaggacttattggtcctttgttggtgtgtcacactaacactctcaatccagcccatggcaggcaggtgacagtccaggaattcgctcttttctttaccatctttgatgagaccaagtcctggtacttcacggaaaacatggagcgcaattgcagagccccctgtaacatacagatggaggaccctacctttaaggaaaattatcggttccacgcaatcaacggatacattatggatacactccctggccttgtgatggctcaggaccaacgaatcaggtggtacctcctcagcatgggttctaatgagaacatacactccattcacttttcaggacatgtgttcactgtccggaagaaagaagagtataagatggccctctacaatttgtatccaggcgtgtttgagaccgttgaaatgcttccctctaaagctggcatctggagagtagagtgcttgatcggagaacatcttcacgcaggtatgagcaccttgttcctcgtgtacagcaacaaatgtcagaatccacttggcatggccagtggacacattcgcgactttcagatcacagcatctggccagtatggacaatgggccccaaagttggctcgcctccattactccggtagcataaatgcgtggtccactaaagaacctttcagctggattaaggtcgatcttcttgcccccatgatcatccacggcattaagacacagggagcgaggcagaaattctcctccctctacatctcacagttcattattatgtatagtttggacggcaagaagtggcaaacttatagaggtaacagtactggaacagacatggtgttcttcggcaacgttgatagctctggcatcaaacacaacatctttaatcctcccataatagctcggtacatcagattgcatccgacccactacagcattaggagtacactccgaatggagcttatgggttgcgacttgaattcctgttcaatgccactcggaatggagtctaaagccatctctgatgcacagataaccgccagtagctactttacgaacatgtttgctacgtggtcaccctctaaggcaaggcttcatttgcaaggccggtctaatgcctggagacctcaggtgaacaacccgaaagaatggctccaggtggactttcagaagaccatgaaagtaacaggtgtcactactcagggagttaagtccttggatactagcatgtatgtgaaggagttccttatttcctcatcacaagatggccaccagtggaccctcttctttcagaatggtaaggtcaaagtgtttcagggcaatcaagacagcttcacacccgtggtgaacagtcttgatcctccactcttgacacgataccttcgaatccatccacagtcttgggagcaccagattgcattgcgcatggaagtacttggatgcgaggctcaggacctctac

SEQ ID NO: 2296 - protein, 1457 aa, synthetic construct
  REGION 1..1457: note = Variant of human B-domain deleted Factor VIII
MQIELSTCFFLCLLRFCFSATRRYYLGAVELSWDYMQSDLGELPVDARFPPRVPKSFPFNTSQVYKKTLFVEFTDHLFNIAKPRPPWMGLLGPTIQAEVYDTVVITLKNMASHPVSLHAVGVSYWKASEGAEYDDQTSQREKEDDKVFPGGSHTYVWQVLKENGPMASDPPCLTYSYLSHVDLVKDLNSGLIGALLVCREGSLAKEKTQTLAKFILLFAVFDEGKSWHSETKNSLMQDRDAASARAWPKMHTVNGYVNRTLPGLIGCHRKSVYWHVIGMGTTPEVHSIFLEGHTFLVRNHRQASLGISPITFLTAQTGLRDLGQFLLFCHIPSHQHDGMEAYVKVDSCPEEPQLRMKNNEEAEDYDDDLTDSEMDVVRFDDDNSPSIIQARSGAKKHPKTWVHYIAAEEEDWDYAPLVLAPDDRSYKSQYLNNGPQRIGRKYKKVRFMAYTDETFKTREAIQHESGILGPLLYGEVGDTLLIIFKNQASRPYNIYPHGITDVRPLYSRRLPKGVKHLKDFPILPGEIFKYKWTITVEDGPTKPDPRCLTRYYSSFVNWERDLASGLIGPLLICYKESVDQRGNQIMSDKRNVILFSVFDENRSWYLTENIQRFLPNPAGVQLEDPEFQASNIMHSINGYVFDSLQLSVCLHEVAYWYILSIGAQTDFLSVFFSGYTFKHKGVYEDTLTLFPFSGETVFMEMENPGLWILGCHNSDFRNRGMTALLKVSSCDWNTGDYEEDSYEDISAYFDSKNNAIEPRSFSQNPPVLKRHQREGTRTTLQSDQEEIDYDDTISVEMKKEDFDIYDEDGNQSPRSFQKKTRHYFIAAVERLWDYGMSSSPHVLRNRAQSGSVPQFKKVVFQEFTDGSFTQPLYRGELNEHLGLLGPYIRAEVEDNIMVTFRNQASRPYSFYSSLISYEEDQRQGAEPRKNFVKPNETKTYFWKVQHHMAPTKDEFDCKAWAYFSDVDLEKDVHSGLIGPLLVCHTNTLNPAHGRQVTVQEFALFFTIFDETKSWYFTENMERNCRAPCNIQMEDPTFKENYRFHAINGYIMDTLPGLVMAQDQRIRWYLLSMGSNENIHSIHFSGHVFTVRKKEEYKMALYNLYPGVFETVEMLPSKAGIWRVECLIGEHLHAGMSTLFLVYSNKCQNPLGMASGHIRDFQITASGQYGQWAPKLARLHYSGSINAWSTKEPFSWIKVDLLAPMIIHGIKTQGARQKFSSLYISQFIIMYSLDGKKWQTYRGNSTGTDMVFFGNVDSSGIKHNIFNPPIIARYIRLHPTHYSIRSTLRMELMGCDLNSCSMPLGMESKAISDAQITASSYFTNMFATWSPSKARLHLQGRSNAWRPQVNNPKEWLQVDFQKTMKVTGVTTQGVKSLDTSMYVKEFLISSSQDGHQWTLFFQNGKVKVFQGNQDSFTPVVNSLDPPLLTRYLRIHPQSWEHQIALRMEVLGCEAQDLY

SEQ ID NO: 2297 - DNA, 4371 bp, synthetic construct
  misc_feature 1..4371: note = Variant of human B-domain deleted Factor VIII
  source 1..4371: mol_type = other DNA
atgcagattgaactgtctacctgcttcttcctctgtttgctgaggttctgctttagcgccactagacggtactaccttggcgctgtggagctgtcctgggactatatgcagagtgatttgggagagcttcccgtcgacgcacgatttcctcctcgcgttccaaagtcatttccctttaacacaagccaggtgtacaagaagacgctcttcgtcgaattcaccgatcacctgttcaatatcgccaaacccagaccaccatggatgggtcttttggggcctaccatacaagcggaggtgtatgacacagttgttatcactctcaagaacatggcttctcatccggtaagtcttcacgcagtgggcgtgtcctactggaaagcttcagaaggagccgagtatgatgatcagacatcccagagggagaaagaagacgacaaggtatttccaggtgggtctcatacctatgtgtggcaagtgctcaaagagaatggccctatggcaagcgatccgccgtgtttgacttacagctacctttcacacgttgacctcgtcaaggacctcaactccgggttgattggagccttgttggtatgcagggaaggatctcttgccaaagagaagacacagaccctggccaagtttatccttctctttgctgtgttcgatgagggcaaaagttggcatagcgaaacgaagaattccctcatgcaggatcgcgacgcagccagcgccagagcttggcccaagatgcacactgtgaacggatatgtcaataggacgcttcctggcttgattgggtgtcatcggaaaagtgtctactggcacgtgatcggaatggggacaacaccagaggtccactccatatttctcgaaggccataccttccttgttcgaaaccacagacaggcatccttggggatctctcccattacctttctcactgcccaaacgggtcttcgtgacttgggtcagttccttctcttttgccatatcccgtcacaccagcatgatggtatggaagcttatgtgaaagtcgacagttgtcctgaggagccacagttgcgcatgaagaataatgaagaagccgaggattacgacgacgatctcaccgattctgagatggacgtggtgaggtttgatgacgacaactctccctccatcattcaagctcggagcggggcgaagaaacaccccaagacttgggtccactatatagcggcggaagaggaggattgggattacgctcctcttgtattggcaccagatgaccgctcatacaaaagccagtacctcaacaacggaccgcagagaattggccggaagtataagaaagtgcgatttatggcctatacagacgaaacctttaagacaagggaggccatccagcatgagagtgggattttgggacctcttctttacggcgaagttggtgataccctcctcatcatcttcaagaatcaagcttctcgcccctataacatttacccacacgggatcactgacgttaggcctttgtatagcagaagacttcccaaaggcgtgaagcatctcaaagacttccccattttgccaggcgagatctttaagtacaaatggaccattacagtggaagatggaccgactaaaccggaccctcgatgccttacgcggtactattcctccttcgtgaattgggagagagatttggcaagcggactcataggaccactcctcatctgttacaaggaatctgtagaccagaggggtaaccagattatgagtgataaacgcaatgtgatcctttttagcgtcttcgacgagaaccggtcctggtacttgaccgagaatatacaaaggttccttcccaaccccgcaggcgttcagttggaagaccctgagtttcaggccagcaatattatgcactcaatcaacggctatgtgtttgatagtctccagctttctgtttgcctccatgaagtagcctattggtacatcttgtcaattggtgctcaaacagacttcctctccgtcttcttctccggctacacctttaagcacaagggggtgtatgaggacactctcacactctttccattttctggagaaaccgtgttcatggagatggagaatccaggcctttggatcttgggttgccacaacagtgattttcgcaatcggggaatgactgctctcctcaaagtcagcagctgtgattggaacacaggcgactatgaggaagattcttacgaggacataagtgcctactttgactccaagaataacgccattgagcccagatcattctcccagaatcctcccgtgcttaaaaggcatcagcgcgaaggtaccagaactactcttcagtctgatcaagaggagattgactatgacgacaccattagcgtggaaatgaagaaggaggatttcgatatctatgacgaagatgagaaccagtctccgcggagctttcagaagaagacgcgacactacttcattgcagcagtcgaaaggctttgggactacggtatgtcatcatcccctcatgtgttgcgcaatagagctcagagtggaagtgttccacagttcaagaaagtcgtctttcaagagtttacagatggcagcttcacacagcctctctatcggggcgagcttaacgaacatttgggactccttggtccctatatccgagccgaagtggaggacaacattatggttacctttaggaatcaagcctctcgcccctacagcttctactcctccctcatcagttatgaggaggatcagagacaaggcgctgaaccacggaagaactttgtgaaaccgaatgagacgaagacctacttctggaaagtacagcaccacatggcccccacaaaagacgaattcgattgcaaagcatgggcgtatttttcagacgttgacttggagaaagatgtacattcaggacttattggtcctttgttggtgtgtcacactaacactctcaatccagcccatggcaggcaggtgacagtccaggaattcgctcttttctttaccatctttgatgagaccaagtcctggtacttcacggaaaacatggagcgcaattgcagagccccctgtaacatacagatggaggaccctacctttaaggaaaattatcggttccacgcaatcaacggatacattatggatacactccctggccttgtgatggctcaggaccaacgaatcaggtggtacctcctcagcatgggttctaatgagaacatacactccattcacttttcaggacatgtgttcactgtccggaagggtgaagagtataagatggccctctacaatttgtatccaggcgtgtttgagaccgttgaaatgcttccctctaaagctggcatctggagagtagagtgcttgatcggagaacatcttcacgcaggtatgagcaccttgttcctcgtgtacagcaacaaatgtcagaatccacttggcatggccagtggacacattcgcgactttcagatcacagcatctggccagtatggacaatgggccccaaagttggctcgcctccattactccggtagcataaatgcgtggtccactaaagaacctttcagctggattaaggtcgatcttcttgcccccatgatcatccacggcattaagacacagggagcgaggcagaaattctcctccctctacatctcacagttcattattatgtatagtttggacggcaagaagtggcaaacttatagaggtaacagtactggaacagacatggtgttcttcggcaacgttgatagctctggcatcaaacacaacatctttaatcctcccataatagctcggtacatcagattgcatccgacccactacagcattaggagtacactccgaatggagcttatgggttgcgacttgaattcctgttcaatgccactcggaatggagtctaaagccatctctgatgcacagataaccgccagtagctactttacgaacatgtttgctacgtggtcaccctctaaggcaaggcttcatttgcaaggccggtctaatgcctggagacctcaggtgaacaacccgaaagaatggctccaggtggactttcagaagaccatgaaagtaacaggtgtcactactcagggagttaagtccttggatactagcatgtatgtgaaggagttccttatttcctcatcacaagatggccaccagtggaccctcttctttcagaatggtaaggtcaaagtgtttcagggcaatcaagacagcttcacacccgtggtgaacagtcttgatcctccactcttgacacgataccttcgaatccatccacagtcttgggagcaccagattgcattgcgcatggaagtacttggatgcgaggctcaggacctctac

SEQ ID NO: 2298 - protein, 1457 aa, synthetic construct
  REGION 1..1457: note = Variant of human B-domain deleted Factor VIII
MQIELSTCFFLCLLRFCFSATRRYYLGAVELSWDYMQSDLGELPVDARFPPRVPKSFPFNTSQVYKKTLFVEFTDHLFNIAKPRPPWMGLLGPTIQAEVYDTVVITLKNMASHPVSLHAVGVSYWKASEGAEYDDQTSQREKEDDKVFPGGSHTYVWQVLKENGPMASDPPCLTYSYLSHVDLVKDLNSGLIGALLVCREGSLAKEKTQTLAKFILLFAVFDEGKSWHSETKNSLMQDRDAASARAWPKMHTVNGYVNRTLPGLIGCHRKSVYWHVIGMGTTPEVHSIFLEGHTFLVRNHRQASLGISPITFLTAQTGLRDLGQFLLFCHIPSHQHDGMEAYVKVDSCPEEPQLRMKNNEEAEDYDDDLTDSEMDVVRFDDDNSPSIIQARSGAKKHPKTWVHYIAAEEEDWDYAPLVLAPDDRSYKSQYLNNGPQRIGRKYKKVRFMAYTDETFKTREAIQHESGILGPLLYGEVGDTLLIIFKNQASRPYNIYPHGITDVRPLYSRRLPKGVKHLKDFPILPGEIFKYKWTITVEDGPTKPDPRCLTRYYSSFVNWERDLASGLIGPLLICYKESVDQRGNQIMSDKRNVILFSVFDENRSWYLTENIQRFLPNPAGVQLEDPEFQASNIMHSINGYVFDSLQLSVCLHEVAYWYILSIGAQTDFLSVFFSGYTFKHKGVYEDTLTLFPFSGETVFMEMENPGLWILGCHNSDFRNRGMTALLKVSSCDWNTGDYEEDSYEDISAYFDSKNNAIEPRSFSQNPPVLKRHQREGTRTTLQSDQEEIDYDDTISVEMKKEDFDIYDEDENQSPRSFQKKTRHYFIAAVERLWDYGMSSSPHVLRNRAQSGSVPQFKKVVFQEFTDGSFTQPLYRGELNEHLGLLGPYIRAEVEDNIMVTFRNQASRPYSFYSSLISYEEDQRQGAEPRKNFVKPNETKTYFWKVQHHMAPTKDEFDCKAWAYFSDVDLEKDVHSGLIGPLLVCHTNTLNPAHGRQVTVQEFALFFTIFDETKSWYFTENMERNCRAPCNIQMEDPTFKENYRFHAINGYIMDTLPGLVMAQDQRIRWYLLSMGSNENIHSIHFSGHVFTVRKGEEYKMALYNLYPGVFETVEMLPSKAGIWRVECLIGEHLHAGMSTLFLVYSNKCQNPLGMASGHIRDFQITASGQYGQWAPKLARLHYSGSINAWSTKEPFSWIKVDLLAPMIIHGIKTQGARQKFSSLYISQFIIMYSLDGKKWQTYRGNSTGTDMVFFGNVDSSGIKHNIFNPPIIARYIRLHPTHYSIRSTLRMELMGCDLNSCSMPLGMESKAISDAQITASSYFTNMFATWSPSKARLHLQGRSNAWRPQVNNPKEWLQVDFQKTMKVTGVTTQGVKSLDTSMYVKEFLISSSQDGHQWTLFFQNGKVKVFQGNQDSFTPVVNSLDPPLLTRYLRIHPQSWEHQIALRMEVLGCEAQDLY

SEQ ID NO: 2299 - DNA, 4371 bp, synthetic construct
  misc_feature 1..4371: note = Variant of human B-domain deleted Factor VIII
  source 1..4371: mol_type = other DNA
atgcagattgaactgtctacctgcttcttcctctgtttgctgaggttctgctttagcgccactagacggtactaccttggcgctgtggagctgtcctgggactatatgcagagtgatttgggagagcttcccgtcgacgcacgatttcctcctcgcgttccaaagtcatttccctttaacacaagccaggtgtacaagaagacgctcttcgtcgaattcaccgatcacctgttcaatatcgccaaacccagaccaccatggatgggtcttttggggcctaccatacaagcggaggtgtatgacacagttgttatcactctcaagaacatggcttctcatccggtaagtcttcacgcagtgggcgtgtcctactggaaagcttcagaaggagccgagtatgatgatcagacatcccagagggagaaagaagacgacaaggtatttccaggtgggtctcatacctatgtgtggcaagtgctcaaagagaatggccctatggcaagcgatccgccgtgtttgacttacagctacctttcacacgttgacctcgtcaaggacctcaactccgggttgattggagccttgttggtatgcagggaaggatctcttgccaaagagaagacacagaccctggccaagtttatccttctctttgctgtgttcgatgagggcaaaagttggcatagcgaaacgaagaattccctcatgcaggatcgcgacgcagccagcgccagagcttggcccaagatgcacactgtgaacggatatgtcaataggacgcttcctggcttgattgggtgtcatcggaaaagtgtctactggcacgtgatcggaatggggacaacaccagaggtccactccatatttctcgaaggccataccttccttgttcgaaaccacagacaggcatccttggggatctctcccattacctttctcactgcccaaacgggtcttcgtgacttgggtcagttccttctcttttgccatatcccgtcacaccagcatgatggtatggaagcttatgtgaaagtcgacagttgtcctgaggagccacagttgcgcatgaagaataatgaagaagccgaggattacgacgacgatctcaccgattctgagatggacgtggtgaggtttgatgacgacaactctccctccatcattcaagctcggagcggggcgaagaaacaccccaagacttgggtccactatatagcggcggaagaggaggattgggattacgctcctcttgtattggcaccagatgaccgctcatacaaaagccagtacctcaacaacggaccgcagagaattggccggaagtataagaaagtgcgatttatggcctatacagacgaaacctttaagacaagggaggccatccagcatgagagtgggattttgggacctcttctttacggcgaagttggtgataccctcctcatcatcttcaagaatcaagcttctcgcccctataacatttacccacacgggatcactgacgttaggcctttgtatagcagaagacttcccaaaggcgtgaagcatctcaaagacttccccattttgccaggcgagatctttaagtacaaatggaccattacagtggaagatggaccgactaaaccggaccctcgatgccttacgcggtactattcctccttcgtgaattgggagagagatttggcaagcggactcataggaccactcctcatctgttacaaggaatctgtagaccagaggggtaaccagattatgagtgataaacgcaatgtgatcctttttagcgtcttcgacgagaaccggtcctggtacttgaccgagaatatacaaaggttccttcccaaccccgcaggcgttcagttggaagaccctgagtttcaggccagcaatattatgcactcaatcaacggctatgtgtttgatagtctccagctttctgtttgcctccatgaagtagcctattggtacatcttgtcaattggtgctcaaacagacttcctctccgtcttcttctccggctacacctttaagcacaagggcgtgtatgaggacactctcacactctttccattttctggagaaaccgtgttcatggagatggagaatccaggcctttggatcttgggttgccacaacagtgattttcgcaatcggggaatgactgctctcctcaaagtcagcagctgtgattggaacacaggcgactatgaggaagattcttacgaggacataagtgcctactttgactccgaaaataacgccattgagcccagatcattctcccagaatcctcccgtgcttaaaaggcatcagcgcgaaggtaccagaactactcttcagtctgatcaagaggagattgactatgacgacaccattagcgtggaaatgaagaaggaggatttcgatatctatgacgaagatgagaaccagtctccgcggagctttcagaagaagacgcgacactacttcattgcagcagtcgaaaggctttgggactacggtatgtcatcatcccctcatgtgttgcgcaatagagctcagagtggaagtgttccacagttcaagaaagtcgtctttcaagagtttacagatggcagcttcacacagcctctctatcggggcgagcttaacgaacatttgggactccttggtccctatatccgagccgaagtggaggacaacattatggttacctttaggaatcaagcctctcgcccctacagcttctactcctccctcatcagttatgaggaggatcagagacaaggcgctgaaccacggaagaactttgtgaaaccgaatgagacgaagacctacttctggaaagtacagcaccacatggcccccacaaaagacgaattcgattgcaaagcatgggcgtatttttcagacgttgacttggagaaagatgtacattcaggacttattggtcctttgttggtgtgtcacactaacactctcaatccagcccatggcaggcaggtgacagtccaggaattcgctcttttctttaccatctttgatgagaccaagtcctggtacttcacggaaaacatggagcgcaattgcagagccccctgtaacatacagatggaggaccctacctttaaggaaaattatcggttccacgcaatcaacggatacattatggatacactccctggccttgtgatggctcaggaccaacgaatcaggtggtacctcctcagcatgggttctaatgagaacatacactccattcacttttcaggacatgtgttcactgtccggaagaaagaagagtataagatggccctctacaatttgtatccaggcgtgtttgagaccgttgaaatgcttccctctaaagctggcatctggagagtagagtgcttgatcggagaacatcttcacgcaggtatgagcaccttgttcctcgtgtacagcaacaaatgtcagaatccacttggcatggccagtggacacattcgcgactttcagatcacagcatctggccagtatggacaatgggccccaaagttggctcgcctccattactccggtagcataaatgcgtggtccactaaagaacctttcagctggattaaggtcgatcttcttgcccccatgatcatccacggcattaagacacagggagcgaggcagaaattctcctccctctacatctcacagttcattattatgtatagtttggacggcaagaagtggcaaacttatagaggtaacagtactggaacagacatggtgttcttcggcaacgttgatagctctggcatcaaacacaacatctttaatcctcccataatagctcggtacatcagattgcatccgacccactacagcattaggagtacactccgaatggagcttatgggttgcgacttgaattcctgttcaatgccactcggaatggagtctaaagccatctctgatgcacagataaccgccagtagctactttacgaacatgtttgctacgtggtcaccctctaaggcaaggcttcatttgcaaggccggtctaatgcctggagacctcaggtgaacaacccgaaagaatggctccaggtggactttcagaagaccatgaaagtaacaggtgtcactactcagggagttaagtccttggatactagcatgtatgtgaaggagttccttatttcctcatcacaagatggccaccagtggaccctcttctttcagaatggtaaggtcaaagtgtttcagggcaatcaagacagcttcacacccgtggtgaacagtcttgatcctccactcttgacacgataccttcgaatccatccacagtcttgggagcaccagattgcattgcgcatggaagtacttggatgcgaggctcaggacctctac

SEQ ID NO: 2300 - protein, 1457 aa, synthetic construct
  REGION 1..1457: note = Variant of human B-domain deleted Factor VIII
MQIELSTCFFLCLLRFCFSATRRYYLGAVELSWDYMQSDLGELPVDARFPPRVPKSFPFNTSQVYKKTLFVEFTDHLFNIAKPRPPWMGLLGPTIQAEVYDTVVITLKNMASHPVSLHAVGVSYWKASEGAEYDDQTSQREKEDDKVFPGGSHTYVWQVLKENGPMASDPPCLTYSYLSHVDLVKDLNSGLIGALLVCREGSLAKEKTQTLAKFILLFAVFDEGKSWHSETKNSLMQDRDAASARAWPKMHTVNGYVNRTLPGLIGCHRKSVYWHVIGMGTTPEVHSIFLEGHTFLVRNHRQASLGISPITFLTAQTGLRDLGQFLLFCHIPSHQHDGMEAYVKVDSCPEEPQLRMKNNEEAEDYDDDLTDSEMDVVRFDDDNSPSIIQARSGAKKHPKTWVHYIAAEEEDWDYAPLVLAPDDRSYKSQYLNNGPQRIGRKYKKVRFMAYTDETFKTREAIQHESGILGPLLYGEVGDTLLIIFKNQASRPYNIYPHGITDVRPLYSRRLPKGVKHLKDFPILPGEIFKYKWTITVEDGPTKPDPRCLTRYYSSFVNWERDLASGLIGPLLICYKESVDQRGNQIMSDKRNVILFSVFDENRSWYLTENIQRFLPNPAGVQLEDPEFQASNIMHSINGYVFDSLQLSVCLHEVAYWYILSIGAQTDFLSVFFSGYTFKHKGVYEDTLTLFPFSGETVFMEMENPGLWILGCHNSDFRNRGMTALLKVSSCDWNTGDYEEDSYEDISAYFDSENNAIEPRSFSQNPPVLKRHQREGTRTTLQSDQEEIDYDDTISVEMKKEDFDIYDEDENQSPRSFQKKTRHYFIAAVERLWDYGMSSSPHVLRNRAQSGSVPQFKKVVFQEFTDGSFTQPLYRGELNEHLGLLGPYIRAEVEDNIMVTFRNQASRPYSFYSSLISYEEDQRQGAEPRKNFVKPNETKTYFWKVQHHMAPTKDEFDCKAWAYFSDVDLEKDVHSGLIGPLLVCHTNTLNPAHGRQVTVQEFALFFTIFDETKSWYFTENMERNCRAPCNIQMEDPTFKENYRFHAINGYIMDTLPGLVMAQDQRIRWYLLSMGSNENIHSIHFSGHVFTVRKKEEYKMALYNLYPGVFETVEMLPSKAGIWRVECLIGEHLHAGMSTLFLVYSNKCQNPLGMASGHIRDFQITASGQYGQWAPKLARLHYSGSINAWSTKEPFSWIKVDLLAPMIIHGIKTQGARQKFSSLYISQFIIMYSLDGKKWQTYRGNSTGTDMVFFGNVDSSGIKHNIFNPPIIARYIRLHPTHYSIRSTLRMELMGCDLNSCSMPLGMESKAISDAQITASSYFTNMFATWSPSKARLHLQGRSNAWRPQVNNPKEWLQVDFQKTMKVTGVTTQGVKSLDTSMYVKEFLISSSQDGHQWTLFFQNGKVKVFQGNQDSFTPVVNSLDPPLLTRYLRIHPQSWEHQIALRMEVLGCEAQDLY

SEQ ID NO: 2301 - DNA, 4371 bp, synthetic construct
  misc_feature 1..4371: note = Variant of human B-domain deleted Factor VIII
  source 1..4371: mol_type = other DNA
atgcagattgaactgtctacctgcttcttcctctgtttgctgaggttctgctttagcgccactagacggtactaccttggcgctgtggagctgtcctgggactatatgcagagtgatttgggagagcttcccgtcgacgcacgatttcctcctcgcgttccaaagtcatttccctttaacacaagccaggtgtacaagaagacgctcttcgtcgaattcaccgatcacctgttcaatatcgccaaacccagaccaccatggatgggtcttttggggcctaccatacaagcggaggtgtatgacacagttgttatcactctcaagaacatggcttctcatccggtaagtcttcacgcagtgggcgtgtcctactggaaagcttcagaaggagccgagtatgatgatcagacatcccagagggagaaagaagacgacaaggtatttccaggtgggtctcatacctatgtgtggcaagtgctcaaagagaatggccctatggcaagcgatccgccgtgtttgacttacagctacctttcacacgttgacctcgtcaaggacctcaactccgggttgattggagccttgttggtatgcagggaaggatctcttgccaaagagaagacacagaccctggccaagtttatccttctctttgctgtgttcgatgagggcaaaagttggcatagcgaaacgaagaattccctcatgcaggatcgcgacgcagccagcgccagagcttggcccaagatgcacactgtgaacggatatgtcaataggacgcttcctggcttgattgggtgtcatcggaaaagtgtctactggcacgtgatcggaatggggacaacaccagaggtccactccatatttctcgaaggccataccttccttgttcgaaaccacagacaggcatccttggggatctctcccattacctttctcactgcccaaacgggtcttcgtgacttgggtcagttccttctcttttgccatatcccgtcacaccagcatgatggtatggaagcttatgtgaaagtcgacagttgtcctgaggagccacagttgcgcatgaagaataatgaagaagccgaggattacgacgacgatctcaccgattctgagatggacgtggtgaggtttgatgacgacaactctccctccatcattcaagctcggagcggggcgaagaaacaccccaagacttgggtccactatatagcggcggaagaggaggattgggattacgctcctcttgtattggcaccagatgaccgctcatacaaaagccagtacctcaacaacggaccgcagagaattggccggaagtataagaaagtgcgatttatggcctatacagacgaaacctttaagacaagggaggccatccagcatgagagtgggattttgggacctcttctttacggcgaagttggtgataccctcctcatcatcttcaagaatcaagcttctcgcccctataacatttacccacacgggatcactgacgttaggcctttgtatagcagaagacttcccaaaggcgtgaagcatctcaaagacttccccattttgccaggcgagatctttaagtacaaatggaccattacagtggaagatggaccgactaaaccggaccctcgatgccttacgcggtactattcctccttcgtgaattgggagagagatttggcaagcggactcataggaccactcctcatctgttacaaggaatctgtagaccagaggggtaaccagattatgagtgataaacgcaatgtgatcctttttagcgtcttcgacgagaaccggtcctggtacttgaccgagaatatacaaaggttccttcccaaccccgcaggcgttcagttggaagaccctgagtttcaggccagcaatattatgcactcaatcaacggctatgtgtttgatagtctccagctttctgtttgcctccatgaagtagcctattggtacatcttgtcaattggtgctcaaacagacttcctctccgtcttcttctccggctacacctttaagcacaagggcgtgtatgaggacactctcacactctttccattttctggagaaaccgtgttcatggagatggagaatccaggcctttggatcttgggttgccacaacagtgattttcgcaatcggggaatgactgctctcctcaaagtcagcagctgtgattggaacacaggcgactatgaggaagattcttacgaggacataagtgcctactttgactccgaaaataacgccattgagcccagatcattctcccagaatcctcccgtgcttaaaaggcatcagcgcgaaggtaccagaactactcttcagtctgatcaagaggagattgactatgacgacaccattagcgtggaaatgaagaaggtggatttcgatatctatgacgaagatgagaaccagtctccgcggagctttcagaagaagacgcgacactacttcattgcagcagtcgaaaggctttgggactacggtatgtcatcatcccctcatgtgttgcgcaatagagctcagagtggaagtgttccacagttcaagaaagtcgtctttcaagagtttacagatggcagcttcacacagcctctctatcggggcgagcttaacgaacatttgggactccttggtccctatatccgagccgaagtggaggacaacattatggttacctttaggaatcaagcctctcgcccctacagcttctactcctccctcatcagttatgaggaggatcagagacaaggcgctgaaccacggaagaactttgtgaaaccgaatgagacgaagacctacttctggaaagtacagcaccacatggcccccacaaaagacgaattcgattgcaaagcatgggcgtatttttcagacgttgacttggagaaagatgtacattcaggacttattggtcctttgttggtgtgtcacactaacactctcaatccagcccatggcaggcaggtgacagtccaggaattcgctcttttctttaccatctttgatgagaccaagtcctggtacttcacggaaaacatggagcgcaattgcagagccccctgtaacatacagatggaggaccctacctttaaggaaaattatcggttccacgcaatcaacggatacattatggatacactccctggccttgtgatggctcaggaccaacgaatcaggtggtacctcctcagcatgggttctaatgagaacatacactccattcacttttcaggacatgtgttcactgtccggaagggtgaagagtataagatggccctctacaatttgtatccaggcgtgtttgagaccgttgaaatgcttccctctaaagctggcatctggagagtagagtgcttgatcggagaacatcttcacgcaggtatgagcaccttgttcctcgtgtacagcaacaaatgtcagaatccacttggcatggccagtggacacattcgcgactttcagatcacagcatctggccagtatggacaatgggccccaaagttggctcgcctccattactccggtagcataaatgcgtggtccactaaagaacctttcagctggattaaggtcgatcttcttgcccccatgatcatccacggcattaagacacagggagcgaggcagaaattctcctccctctacatctcacagttcattattatgtatagtttggacggcaagaagtggcaaacttatagaggtaacagtactggaacagacatggtgttcttcggcaacgttgatagctctggcatcaaacacaacatctttaatcctcccataatagctcggtacatcagattgcatccgacccactacagcattaggagtacactccgaatggagcttatgggttgcgacttgaattcctgttcaatgccactcggaatggagtctaaagccatctctgatgcacagataaccgccagtagctactttacgaacatgtttgctacgtggtcaccctctaaggcaaggcttcatttgcaaggccggtctaatgcctggagacctcaggtgaacaacccgaaagaatggctccaggtggactttcagaagaccatgaaagtaacaggtgtcactactcagggagttaagtccttggatactagcatgtatgtgaaggagttccttatttcctcatcacaagatggccaccagtggaccctcttctttcagaatggtaaggtcaaagtgtttcagggcaatcaagacagcttcacacccgtggtgaacagtcttgatcctccactcttgacacgataccttcgaatccatccacagtcttgggagcaccagattgcattgcgcatggaagtacttggatgcgaggctcaggacctctac

SEQ ID NO: 2302 - protein, 1457 aa, synthetic construct
  REGION 1..1457: note = Variant of human B-domain deleted Factor VIII
MQIELSTCFFLCLLRFCFSATRRYYLGAVELSWDYMQSDLGELPVDARFPPRVPKSFPFNTSQVYKKTLFVEFTDHLFNIAKPRPPWMGLLGPTIQAEVYDTVVITLKNMASHPVSLHAVGVSYWKASEGAEYDDQTSQREKEDDKVFPGGSHTYVWQVLKENGPMASDPPCLTYSYLSHVDLVKDLNSGLIGALLVCREGSLAKEKTQTLAKFILLFAVFDEGKSWHSETKNSLMQDRDAASARAWPKMHTVNGYVNRTLPGLIGCHRKSVYWHVIGMGTTPEVHSIFLEGHTFLVRNHRQASLGISPITFLTAQTGLRDLGQFLLFCHIPSHQHDGMEAYVKVDSCPEEPQLRMKNNEEAEDYDDDLTDSEMDVVRFDDDNSPSIIQARSGAKKHPKTWVHYIAAEEEDWDYAPLVLAPDDRSYKSQYLNNGPQRIGRKYKKVRFMAYTDETFKTREAIQHESGILGPLLYGEVGDTLLIIFKNQASRPYNIYPHGITDVRPLYSRRLPKGVKHLKDFPILPGEIFKYKWTITVEDGPTKPDPRCLTRYYSSFVNWERDLASGLIGPLLICYKESVDQRGNQIMSDKRNVILFSVFDENRSWYLTENIQRFLPNPAGVQLEDPEFQASNIMHSINGYVFDSLQLSVCLHEVAYWYILSIGAQTDFLSVFFSGYTFKHKGVYEDTLTLFPFSGETVFMEMENPGLWILGCHNSDFRNRGMTALLKVSSCDWNTGDYEEDSYEDISAYFDSENNAIEPRSFSQNPPVLKRHQREGTRTTLQSDQEEIDYDDTISVEMKKVDFDIYDEDENQSPRSFQKKTRHYFIAAVERLWDYGMSSSPHVLRNRAQSGSVPQFKKVVFQEFTDGSFTQPLYRGELNEHLGLLGPYIRAEVEDNIMVTFRNQASRPYSFYSSLISYEEDQRQGAEPRKNFVKPNETKTYFWKVQHHMAPTKDEFDCKAWAYFSDVDLEKDVHSGLIGPLLVCHTNTLNPAHGRQVTVQEFALFFTIFDETKSWYFTENMERNCRAPCNIQMEDPTFKENYRFHAINGYIMDTLPGLVMAQDQRIRWYLLSMGSNENIHSIHFSGHVFTVRKGEEYKMALYNLYPGVFETVEMLPSKAGIWRVECLIGEHLHAGMSTLFLVYSNKCQNPLGMASGHIRDFQITASGQYGQWAPKLARLHYSGSINAWSTKEPFSWIKVDLLAPMIIHGIKTQGARQKFSSLYISQFIIMYSLDGKKWQTYRGNSTGTDMVFFGNVDSSGIKHNIFNPPIIARYIRLHPTHYSIRSTLRMELMGCDLNSCSMPLGMESKAISDAQITASSYFTNMFATWSPSKARLHLQGRSNAWRPQVNNPKEWLQVDFQKTMKVTGVTTQGVKSLDTSMYVKEFLISSSQDGHQWTLFFQNGKVKVFQGNQDSFTPVVNSLDPPLLTRYLRIHPQSWEHQIALRMEVLGCEAQDLY

SEQ ID NO: 2303 - DNA, 4371 bp, synthetic construct
  misc_feature 1..4371: note = Variant of human B-domain deleted Factor VIII
  source 1..4371: mol_type = other DNA
atgcagattgaactgtctacctgcttcttcctctgtttgctgaggttctgctttagcgccactagacggtactaccttggcgctgtggagctgtcctgggactatatgcagagtgatttgggagagcttcccgtcgacgcacgatttcctcctcgcgttccaaagtcatttccctttaacacaagccaggtgtacaagaagacgctcttcgtcgaattcaccgatcacctgttcaatatcgccaaacccagaccaccatggatgggtcttttggggcctaccatacaagcggaggtgtatgacacagttgttatcactctcaagaacatggcttctcatccggtaagtcttcacgcagtgggcgtgtcctactggaaagcttcagaaggagccgagtatgatgatcagacatcccagagggagaaagaagacgacaaggtatttccaggtgggtctcatacctatgtgtggcaagtgctcaaagagaatggccctatggcaagcgatccgccgtgtttgacttacagctacctttcacacgttgacctcgtcaaggacctcaactccgggttgattggagccttgttggtatgcagggaaggatctcttgccaaagagaagacacagaccctggccaagtttatccttctctttgctgtgttcgatgagggcaaaagttggcatagcgaaacgaagaattccctcatgcaggatcgcgacgcagccagcgccagagcttggcccaagatgcacactgtgaacggatatgtcaataggacgcttcctggcttgattgggtgtcatcggaaaagtgtctactggcacgtgatcggaatggggacaacaccagaggtccactccatatttctcgaaggccataccttccttgttcgaaaccacagacaggcatccttggggatctctcccattacctttctcactgcccaaacgggtcttcgtgacttgggtcagttccttctcttttgccatatcccgtcacaccagcatgatggtatggaagcttatgtgaaagtcgacagttgtcctgaggagccacagttgcgcatgaagaataatgaagaagccgaggattacgacgacgatctcaccgattctgagatggacgtggtgaggtttgatgacgacaactctccctccatcattcaagctcggagcggggcgaagaaacaccccaagacttgggtccactatatagcggcggaagaggaggattgggattacgctcctcttgtattggcaccagatgaccgctcatacaaaagccagtacctcaacaacggaccgcagagaattggccggaagtataagaaagtgcgatttatggcctatacagacgaaacctttaagacaagggaggccatccagcatgagagtgggattttgggacctcttctttacggcgaagttggtgataccctcctcatcatcttcaagaatcaagcttctcgcccctataacatttacccacacgggatcactgacgttaggcctttgtatagcagaagacttcccaaaggcgtgaagcatctcaaagacttccccattttgccaggcgagatctttaagtacaaatggaccattacagtggaagatggaccgactaaaccggaccctcgatgccttacgcggtactattcctccttcgtgaattgggagagagatttggcaagcggactcataggaccactcctcatctgttacaaggaatctgtagaccagaggggtaaccagattatgagtgataaacgcaatgtgatcctttttagcgtcttcgacgagaaccggtcctggtacttgaccgagaatatacaaaggttccttcccaaccccgcaggcgttcagttggaagaccctgagtttcaggccagcaatattatgcactcaatcaacggctatgtgtttgatagtctccagctttctgtttgcctccatgaagtagcctattggtacatcttgtcaattggtgctcaaacagacttcctctccgtcttcttctccggctacacctttaagcacaagggggtgtatgaggacactctcacactctttccattttctggagaaaccgtgttcatggagatggagaatccaggcctttggatcttgggttgccacaacagtgattttcgcaatcggggaatgactgctctcctcaaagtcagcagctgtgattggaacacaggcgactatgaggaagattcttacgaggacataagtgcctactttgactccgaaaataacgccattgagcccagatcattctcccagaatcctcccgtgcttaaaaggcatcagcgcgaaggtaccagaactactcttcagtctgatcaagaggagattgactatgacgacaccattagcgtggaaatgaagaaggaggatttcgatatctatgacgaggatgggaaccagtctccgcggagctttcagaagaagacgcgacactacttcattgcagcagtcgaaaggctttgggactacggtatgtcatcatcccctcatgtgttgcgcaatagagctcagagtggaagtgttccacagttcaagaaagtcgtctttcaagagtttacagatggcagcttcacacagcctctctatcggggcgagcttaacgaacatttgggactccttggtccctatatccgagccgaagtggaggacaacattatggttacctttaggaatcaagcctctcgcccctacagcttctactcctccctcatcagttatgaggaggatcagagacaaggcgctgaaccacggaagaactttgtgaaaccgaatgagacgaagacctacttctggaaagtacagcaccacatggcccccacaaaagacgaattcgattgcaaagcatgggcgtatttttcagacgttgacttggagaaagatgtacattcaggacttattggtcctttgttggtgtgtcacactaacactctcaatccagcccatggcaggcaggtgacagtccaggaattcgctcttttctttaccatctttgatgagaccaagtcctggtacttcacggaaaacatggagcgcaattgcagagccccctgtaacatacagatggaggaccctacctttaaggaaaattatcggttccacgcaatcaacggatacattatggatacactccctggccttgtgatggctcaggaccaacgaatcaggtggtacctcctcagcatgggttctaatgagaacatacactccattcacttttcaggacatgtgttcactgtccggaagaaagaagagtataagatggccctctacaatttgtatccaggcgtgtttgagaccgttgaaatgcttcccatcaaagctggcatctggagagtagagtgcttgatcggagaacatcttcacgcaggtatgagcaccttgttcctcgtgtacagcaacaaatgtcagaatccacttggcatggccagtggacacattcgcgactttcagatcacagcatctggccagtatggacaatgggccccaaagttggctcgcctccattactccggtagcataaatgcgtggtccactaaagaacctttcagctggattaaggtcgatcttcttgcccccatgatcatccacggcattaagacacagggagcgaggcagaaattctcctccctctacatctcacagttcattattatgtatagtttggacggcaagaagtggcaaacttatagaggtaacagtactggaacagacatggtgttcttcggcaacgttgatagctctggcatcaaacacaacatctttaatcctcccataatagctcggtacatcagattgcatccgacccactacagcattaggagtacactccgaatggagcttatgggttgcgacttgaattcctgttcaatgccactcggaatggagtctaaagccatctctgatgcacagataaccgccagtagctactttacgaacatgtttgctacgtggtcaccctctaaggcaaggcttcatttgcaaggccggtctaatgcctggagacctcaggtgaacaacccgaaagaatggctccaggtggactttcagaagaccatgaaagtaacaggtgtcactactcagggagttaagtccttggatactagcatgtatgtgaaggagttccttatttcctcatcacaagatggccaccagtggaccctcttctttcagaatggtaaggtcaaagtgtttcagggcaatcaagacagcttcacacccgtggtgaacagtcttgatcctccactcttgacacgataccttcgaatccatccacagtcttgggagcaccagattgcattgcgcatggaagtacttggatgcgaggctcaggacctctac

SEQ ID NO: 2304 - protein, 1457 aa, synthetic construct
  REGION 1..1457: note = Variant of human B-domain deleted Factor VIII
MQIELSTCFFLCLLRFCFSATRRYYLGAVELSWDYMQSDLGELPVDARFPPRVPKSFPFNTSQVYKKTLFVEFTDHLFNIAKPRPPWMGLLGPTIQAEVYDTVVITLKNMASHPVSLHAVGVSYWKASEGAEYDDQTSQREKEDDKVFPGGSHTYVWQVLKENGPMASDPPCLTYSYLSHVDLVKDLNSGLIGALLVCREGSLAKEKTQTLAKFILLFAVFDEGKSWHSETKNSLMQDRDAASARAWPKMHTVNGYVNRTLPGLIGCHRKSVYWHVIGMGTTPEVHSIFLEGHTFLVRNHRQASLGISPITFLTAQTGLRDLGQFLLFCHIPSHQHDGMEAYVKVDSCPEEPQLRMKNNEEAEDYDDDLTDSEMDVVRFDDDNSPSIIQARSGAKKHPKTWVHYIAAEEEDWDYAPLVLAPDDRSYKSQYLNNGPQRIGRKYKKVRFMAYTDETFKTREAIQHESGILGPLLYGEVGDTLLIIFKNQASRPYNIYPHGITDVRPLYSRRLPKGVKHLKDFPILPGEIFKYKWTITVEDGPTKPDPRCLTRYYSSFVNWERDLASGLIGPLLICYKESVDQRGNQIMSDKRNVILFSVFDENRSWYLTENIQRFLPNPAGVQLEDPEFQASNIMHSINGYVFDSLQLSVCLHEVAYWYILSIGAQTDFLSVFFSGYTFKHKGVYEDTLTLFPFSGETVFMEMENPGLWILGCHNSDFRNRGMTALLKVSSCDWNTGDYEEDSYEDISAYFDSENNAIEPRSFSQNPPVLKRHQREGTRTTLQSDQEEIDYDDTISVEMKKEDFDIYDEDGNQSPRSFQKKTRHYFIAAVERLWDYGMSSSPHVLRNRAQSGSVPQFKKVVFQEFTDGSFTQPLYRGELNEHLGLLGPYIRAEVEDNIMVTFRNQASRPYSFYSSLISYEEDQRQGAEPRKNFVKPNETKTYFWKVQHHMAPTKDEFDCKAWAYFSDVDLEKDVHSGLIGPLLVCHTNTLNPAHGRQVTVQEFALFFTIFDETKSWYFTENMERNCRAPCNIQMEDPTFKENYRFHAINGYIMDTLPGLVMAQDQRIRWYLLSMGSNENIHSIHFSGHVFTVRKKEEYKMALYNLYPGVFETVEMLPIKAGIWRVECLIGEHLHAGMSTLFLVYSNKCQNPLGMASGHIRDFQITASGQYGQWAPKLARLHYSGSINAWSTKEPFSWIKVDLLAPMIIHGIKTQGARQKFSSLYISQFIIMYSLDGKKWQTYRGNSTGTDMVFFGNVDSSGIKHNIFNPPIIARYIRLHPTHYSIRSTLRMELMGCDLNSCSMPLGMESKAISDAQITASSYFTNMFATWSPSKARLHLQGRSNAWRPQVNNPKEWLQVDFQKTMKVTGVTTQGVKSLDTSMYVKEFLISSSQDGHQWTLFFQNGKVKVFQGNQDSFTPVVNSLDPPLLTRYLRIHPQSWEHQIALRMEVLGCEAQDLY

SEQ ID NO: 2305 - DNA, 4371 bp, synthetic construct
  misc_feature 1..4371: note = Variant of human B-domain deleted Factor VIII
  source 1..4371: mol_type = other DNA
atgcagattgaactgtctacctgcttcttcctctgtttgctgaggttctgctttagcgccactagacggtactaccttggcgctgtggagctgtcctgggactatatgcagagtgatttgggagagcttcccgtcgacgcacgatttcctcctcgcgttccaaagtcatttccctttaacacaagccaggtgtacaagaagacgctcttcgtcgaattcaccgatcacctgttcaatatcgccaaacccagaccaccatggatgggtcttttggggcctaccatacaagcggaggtgtatgacacagttgttatcactctcaagaacatggcttctcatccggtaagtcttcacgcagtgggcgtgtcctactggaaagcttcagaaggagccgagtatgatgatcagacatcccagagggagaaagaagacgacaaggtatttccaggtgggtctcatacctatgtgtggcaagtgctcaaagagaatggccctatggcaagcgatccgccgtgtttgacttacagctacctttcacacgttgacctcgtcaaggacctcaactccgggttgattggagccttgttggtatgcagggaaggatctcttgccaaagagaagacacagaccctggccaagtttatccttctctttgctgtgttcgatgagggcaaaagttggcatagcgaaacgaagaattccctcatgcaggatcgcgacgcagccagcgccagagcttggcccaagatgcacactgtgaacggatatgtcaataggacgcttcctggcttgattgggtgtcatcggaaaagtgtctactggcacgtgatcggaatggggacaacaccagaggtccactccatatttctcgaaggccataccttccttgttcgaaaccacagacaggcatccttggggatctctcccattacctttctcactgcccaaacgggtcttcgtgacttgggtcagttccttctcttttgccatatcccgtcacaccagcatgatggtatggaagcttatgtgaaagtcgacagttgtcctgaggagccacagttgcgcatgaagaataatgaagaagccgaggattacgacgacgatctcaccgattctgagatggacgtggtgaggtttgatgacgacaactctccctccatcattcaagctcggagcggggcgaagaaacaccccaagacttgggtccactatatagcggcggaagaggaggattgggattacgctcctcttgtattggcaccagatgaccgctcatacaaaagccagtacctcaacaacggaccgcagagaattggccggaagtataagaaagtgcgatttatggcctatacagacgaaacctttaagacaagggaggccatccagcatgagagtgggattttgggacctcttctttacggcgaagttggtgataccctcctcatcatcttcaagaatcaagcttctcgcccctataacatttacccacacgggatcactgacgttaggcctttgtatagcagaagacttcccaaaggcgtgaagcatctcaaagacttccccattttgccaggcgagatctttaagtacaaatggaccattacagtggaagatggaccgactaaaccggaccctcgatgccttacgcggtactattcctccttcgtgaattgggagagagatttggcaagcggactcataggaccactcctcatctgttacaaggaatctgtagaccagaggggtaaccagattatgagtgataaacgcaatgtgatcctttttagcgtcttcgacgagaaccggtcctggtacttgaccgagaatatacaaaggttccttcccaaccccgcaggcgttcagttggaagaccctgagtttcaggccagcaatattatgcactcaatcaacggctatgtgtttgatagtctccagctttctgtttgcctccatgaagtagcctattggtacatcttgtcaattggtgctcaaacagacttcctctccgtcttcttctccggctacacctttaagcacaagggggtgtatgaggacactctcacactctttccattttctggagaaaccgtgttcatggagatggagaatccaggcctttggatcttgggttgccacaacagtgattttcgcaatcggggaatgactgctctcctcaaagtcagcagctgtgattggaacacaggcgactatgaggaagattcttacgaggacataagtgcctactttgactccgaaaataacgccattgagcccagatcattctcccagaatcctcccgtgcttaaaaggcatcagcgcgaaggtaccagaactactcttcagtctgatcaagaggagattgactatgacgacaccattagcgtggaaatgaagaaggaggatttcgatatctatgacgaagatgagaaccagtctccgcggagctttcagaagaagacgcgacactacttcattgcagcagtcgaaaggctttgggactacggtatgtcatcatcccctcatgtgttgcgcaatagagctcagagtggaagtgttccacagttcaagaaagtcgtctttcaagagtttacagatggcagcttcacacagcctctctatcggggcgagcttaacgaacatttgggactccttggtccctatatccgagccgaagtggaggacaacattatggttacctttaggaatcaagcctctcgcccctacagcttctactcctccctcatcagttatgaggaggatcagagacaaggcgctgaaccacggaagaactttgtgaaaccgaatgagacgaagacctacttctggaaagtacagcaccacatggcccccacaaaagacgaattcgattgcaaagcatgggcgtatttttcagacgttgacttggagaaagatgtacattcaggacttattggtcctttgttggtgtgtcacactaacactctcaatccagcccatggcaggcaggtgacagtccaggaattcgctcttttctttaccatctttgatgagaccaagtcctggtacttcacggaaaacatggagcgcaattgcagagccccctgtaacatacagatggaggaccctacctttaaggaaaattatcggttccacgcaatcaacggatacattatggatacactccctggccttgtgatggctcaggaccaacgaatcaggtggtacctcctcagcatgggttctaatgagaacatacactccattcacttttcaggacatgtgttcactgtccggaagggtgaagagtataagatggccctctacaatttgtatccaggcgtgtttgagaccgttgaaatgcttcccagcaaagctggcatctggagagtagagtgcttgatcggagaacatcttcacgcaggtatgagcaccttgttcctcgtgtacagcaacaaatgtcagaatccacttggcatggccagtggacacattcgcgactttcagatcacagcatctggccagtatggacaatgggccccaaagttggctcgcctccattactccggtagcataaatgcgtggtccactaaagaacctttcagctggattaaggtcgatcttcttgcccccatgatcatccacggcattaagacacagggagcgaggcagaaattctcctccctctacatctcacagttcattattatgtatagtttggacggcaagaagtggcaaacttatagaggtaacagtactggaacagacatggtgttcttcggcaacgttgatagctctggcatcaaacacaacatctttaatcctcccataatagctcggtacatcagattgcatccgacccactacagcattaggagtacactccgaatggagcttatgggttgcgacttgaattcctgttcaatgccactcggaatggagtctaaagccatctctgatgcacagataaccgccagtagctactttacgaacatgtttgctacgtggtcaccctctaaggcaaggcttcatttgcaaggccggtctaatgcctggagacctcaggtgaacaacccgaaagaatggctccaggtggactttcagaagaccatgaaagtaacaggtgtcactactcagggagttaagtccttggatactagcatgtatgtgaaggagttccttatttcctcatcacaagatggccaccagtggaccctcttctttcagaatggtaaggtcaaagtgtttcagggcaatcaagacagcttcacacccgtggtgaacagtcttgatcctccactcttgacacgataccttcgaatccatccacagtcttgggagcaccagattgcattgcgcatggaagtacttggatgcgaggctcaggacctctac

SEQ ID NO: 2306 - protein, 1457 aa, synthetic construct
  REGION 1..1457: note = Variant of human B-domain deleted Factor VIII
MQIELSTCFFLCLLRFCFSATRRYYLGAVELSWDYMQSDLGELPVDARFPPRVPKSFPFNTSQVYKKTLFVEFTDHLFNIAKPRPPWMGLLGPTIQAEVYDTVVITLKNMASHPVSLHAVGVSYWKASEGAEYDDQTSQREKEDDKVFPGGSHTYVWQVLKENGPMASDPPCLTYSYLSHVDLVKDLNSGLIGALLVCREGSLAKEKTQTLAKFILLFAVFDEGKSWHSETKNSLMQDRDAASARAWPKMHTVNGYVNRTLPGLIGCHRKSVYWHVIGMGTTPEVHSIFLEGHTFLVRNHRQASLGISPITFLTAQTGLRDLGQFLLFCHIPSHQHDGMEAYVKVDSCPEEPQLRMKNNEEAEDYDDDLTDSEMDVVRFDDDNSPSIIQARSGAKKHPKTWVHYIAAEEEDWDYAPLVLAPDDRSYKSQYLNNGPQRIGRKYKKVRFMAYTDETFKTREAIQHESGILGPLLYGEVGDTLLIIFKNQASRPYNIYPHGITDVRPLYSRRLPKGVKHLKDFPILPGEIFKYKWTITVEDGPTKPDPRCLTRYYSSFVNWERDLASGLIGPLLICYKESVDQRGNQIMSDKRNVILFSVFDENRSWYLTENIQRFLPNPAGVQLEDPEFQASNIMHSINGYVFDSLQLSVCLHEVAYWYILSIGAQTDFLSVFFSGYTFKHKGVYEDTLTLFPFSGETVFMEMENPGLWILGCHNSDFRNRGMTALLKVSSCDWNTGDYEEDSYEDISAYFDSENNAIEPRSFSQNPPVLKRHQREGTRTTLQSDQEEIDYDDTISVEMKKEDFDIYDEDENQSPRSFQKKTRHYFIAAVERLWDYGMSSSPHVLRNRAQSGSVPQFKKVVFQEFTDGSFTQPLYRGELNEHLGLLGPYIRAEVEDNIMVTFRNQASRPYSFYSSLISYEEDQRQGAEPRKNFVKPNETKTYFWKVQHHMAPTKDEFDCKAWAYFSDVDLEKDVHSGLIGPLLVCHTNTLNPAHGRQVTVQEFALFFTIFDETKSWYFTENMERNCRAPCNIQMEDPTFKENYRFHAINGYIMDTLPGLVMAQDQRIRWYLLSMGSNENIHSIHFSGHVFTVRKGEEYKMALYNLYPGVFETVEMLPSKAGIWRVECLIGEHLHAGMSTLFLVYSNKCQNPLGMASGHIRDFQITASGQYGQWAPKLARLHYSGSINAWSTKEPFSWIKVDLLAPMIIHGIKTQGARQKFSSLYISQFIIMYSLDGKKWQTYRGNSTGTDMVFFGNVDSSGIKHNIFNPPIIARYIRLHPTHYSIRSTLRMELMGCDLNSCSMPLGMESKAISDAQITASSYFTNMFATWSPSKARLHLQGRSNAWRPQVNNPKEWLQVDFQKTMKVTGVTTQGVKSLDTSMYVKEFLISSSQDGHQWTLFFQNGKVKVFQGNQDSFTPVVNSLDPPLLTRYLRIHPQSWEHQIALRMEVLGCEAQDLY

SEQ ID NO: 2307 - DNA, 4371 bp, synthetic construct
  misc_feature 1..4371: note = Variant of human B-domain deleted Factor VIII
  source 1..4371: mol_type = other DNA
atgcagattgaactgtctacctgcttcttcctctgtttgctgaggttctgctttagcgccactagacggtactaccttggcgctgtggagctgtcctgggactatatgcagagtgatttgggagagcttcccgtcgacgcacgatttcctcctcgcgttccaaagtcatttccctttaacacaagccaggtgtacaagaagacgctcttcgtcgaattcaccgatcacctgttcaatatcgccaaacccagaccaccatggatgggtcttttggggcctaccatacaagcggaggtgtatgacacagttgttatcactctcaagaacatggcttctcatccggtaagtcttcacgcagtgggcgtgtcctactggaaagcttcagaaggagccgagtatgatgatcagacatcccagagggagaaagaagacgacaaggtatttccaggtgggtctcatacctatgtgtggcaagtgctcaaagagaatggccctatggcaagcgatccgccgtgtttgacttacagctacctttcacacgttgacctcgtcaaggacctcaactccgggttgattggagccttgttggtatgcagggaaggatctcttgccaaagagaagacacagaccctggccaagtttatccttctctttgctgtgttcgatgagggcaaaagttggcatagcgaaacgaagaattccctcatgcaggatcgcgacgcagccagcgccagagcttggcccaagatgcacactgtgaacggatatgtcaataggacgcttcctggcttgattgggtgtcatcggaaaagtgtctactggcacgtgatcggaatggggacaacaccagaggtccactccatatttctcgaaggccataccttccttgttcgaaaccacagacaggcatccttggggatctctcccattacctttctcactgcccaaacgggtcttcgtgacttgggtcagttccttctcttttgccatatcccgtcacaccagcatgatggtatggaagcttatgtgaaagtcgacagttgtcctgaggagccacagttgcgcatgaagaataatgaagaagccgaggattacgacgacgatctcaccgattctgagatggacgtggtgaggtttgatgacgacaactctccctccatcattcaagctcggagcggggcgaagaaacaccccaagacttgggtccactatatagcggcggaagaggaggattgggattacgctcctcttgtattggcaccagatgaccgctcatacaaaagccagtacctcaacaacggaccgcagagaattggccggaagtataagaaagtgcgatttatggcctatacagacgaaacctttaagacaagggaggccatccagcatgagagtgggattttgggacctcttctttacggcgaagttggtgataccctcctcatcatcttcaagaatcaagcttctcgcccctataacatttacccacacgggatcactgacgttaggcctttgtatagcagaagacttcccaaaggcgtgaagcatctcaaagacttccccattttgccaggcgagatctttaagtacaaatggaccattacagtggaagatggaccgactaaatcggaccctcgatgccttacgcggtactattcctccttcgtgaattgggagagagatttggcaagcggactcataggaccactcctcatctgttacaaggaatctgtagaccagaggggtaaccagattatgagtgataaacgcaatgtgatcctttttagcgtcttcgacgagaaccggtcctggtacttgaccgagaatatacaaaggttccttcccaaccccgcaggcgttcagttggaagaccctgagtttcaggccagcaatattatgcactcaatcaacggctatgtgtttgatagtctccagctttctgtttgcctccatgaagtagcctattggtacatcttgtcaattggtgctcaaacagacttcctctccgtcttcttctccggctacacctttaagcacaagggggtgtatgaggacactctcacactctttccattttctggagaaaccgtgttcatggagatggagaatccaggcctttggatcttgggttgccacaacagtgattttcgcaatcggggaatgactgctctcctcaaagtcagcagctgtgattggaacacaggcgactatgaggaagattcttacgaggacataagtgcctactttgactccaagaataacgccattgagcccagatcattctcccagaatcctcccgtgcttaaaaggcatcagcgcgaaggtaccagaactactcttcagtctgatcaagaggagattgactatgacgacaccattagcgtggaaatgaagaaggaggatttcgatatctatgacgaggatgagaaccagtctccgcggagctttcagaagaagacgcgacactacttcattgcagcagtcgaaaggctttgggactacggtatgtcatcatcccctcatgtgttgcgcaatagagctcagagtggaagtgttccacagttcaagaaagtcgtctttcaagagtttacagatggcagcttcacacagcctctctatcggggcgagcttaacgaacatttgggactccttggtccctatatccgagccgaagtggaggacaacattatggttacctttaggaatcaagcctctcgcccctacagcttctactcctccctcatcagttatgaggaggatcagagacaaggcgctgaaccacggaagaactttgtgaaaccgaatgagacgaagacctacttctggaaagtacagcaccacatggcccccacaaaagacgaattcgattgcaaagcatgggcgtatttttcagacgttgacttggagaaagatgtacattcaggacttattggtcctttgttggtgtgtcacactaacactctcaatccagcccatggcaggcaggtgacagtccaggaattcgctcttttctttaccatctttgatgagaccaagtcctggtacttcacggaaaacatggagcgcaattgcagagccccctgtaacatacagatggaggaccctacctttaaggaaaattatcggttccacgcaatcaacggatacattatggatacactccctggccttgtgatggctcaggaccaacgaatcaggtggtacctcctcagcatgggttctaatgagaacatacactccattcacttttcaggacatgtgttcactgtccggaagaaagaagagtataagatggccctctacaatttgtatccaggcgtgtttgagaccgttgaaatgcttccctctaaagctggcatctggagagtagagtgcttgatcggagaacatcttcacgcaggtatgagcaccttgttcctcgtgtacagcaacaaatgtcagaatccacttggcatggccagtggacacattcgcgactttcagatcacagcatctggccagtatggacaatgggccccaaagttggctcgcctccattactccggtagcataaatgcgtggtccactaaagaacctttcagctggattaaggtcgatcttcttgcccccatgatcatccacggcattaagacacagggagcgaggcagaaattctcctccctctacatctcacagttcattattatgtatagtttggacggcaagaagtggcaaacttatagaggtaacagtactggaacagacatggtgttcttcggcaacgttgatagctctggcatcaaacacaacatctttaatcctcccataatagctcggtacatcagattgcatccgacccactacagcattaggagtacactccgaatggagcttatgggttgcgacttgaattcctgttcaatgccactcggaatggagtctaaagccatctctgatgcacagataaccgccagtagctactttacgaacatgtttgctacgtggtcaccctctaaggcaaggcttcatttgcaaggccggtctaatgcctggagacctcaggtgaacaacccgaaagaatggctccaggtggactttcagaagaccatgaaagtaacaggtgtcactactcagggagttaagtccttggatactagcatgtatgtgaaggagttccttatttcctcatcacaagatggccaccagtggaccctcttctttcagaatggtaaggtcaaagtgtttcagggcaatcaagacagcttcacacccgtggtgaacagtcttgatcctccactcttgacacgataccttcgaatccatccacagtcttgggagcaccagattgcattgcgcatggaagtacttggatgcgaggctcaggacctctac

SEQ ID NO: 2308 - protein, 1457 aa, synthetic construct
  REGION 1..1457: note = Variant of human B-domain deleted Factor VIII
MQIELSTCFFLCLLRFCFSATRRYYLGAVELSWDYMQSDLGELPVDARFPPRVPKSFPFNTSQVYKKTLFVEFTDHLFNIAKPRPPWMGLLGPTIQAEVYDTVVITLKNMASHPVSLHAVGVSYWKASEGAEYDDQTSQREKEDDKVFPGGSHTYVWQVLKENGPMASDPPCLTYSYLSHVDLVKDLNSGLIGALLVCREGSLAKEKTQTLAKFILLFAVFDEGKSWHSETKNSLMQDRDAASARAWPKMHTVNGYVNRTLPGLIGCHRKSVYWHVIGMGTTPEVHSIFLEGHTFLVRNHRQASLGISPITFLTAQTGLRDLGQFLLFCHIPSHQHDGMEAYVKVDSCPEEPQLRMKNNEEAEDYDDDLTDSEMDVVRFDDDNSPSIIQARSGAKKHPKTWVHYIAAEEEDWDYAPLVLAPDDRSYKSQYLNNGPQRIGRKYKKVRFMAYTDETFKTREAIQHESGILGPLLYGEVGDTLLIIFKNQASRPYNIYPHGITDVRPLYSRRLPKGVKHLKDFPILPGEIFKYKWTITVEDGPTKSDPRCLTRYYSSFVNWERDLASGLIGPLLICYKESVDQRGNQIMSDKRNVILFSVFDENRSWYLTENIQRFLPNPAGVQLEDPEFQASNIMHSINGYVFDSLQLSVCLHEVAYWYILSIGAQTDFLSVFFSGYTFKHKGVYEDTLTLFPFSGETVFMEMENPGLWILGCHNSDFRNRGMTALLKVSSCDWNTGDYEEDSYEDISAYFDSKNNAIEPRSFSQNPPVLKRHQREGTRTTLQSDQEEIDYDDTISVEMKKEDFDIYDEDENQSPRSFQKKTRHYFIAAVERLWDYGMSSSPHVLRNRAQSGSVPQFKKVVFQEFTDGSFTQPLYRGELNEHLGLLGPYIRAEVEDNIMVTFRNQASRPYSFYSSLISYEEDQRQGAEPRKNFVKPNETKTYFWKVQHHMAPTKDEFDCKAWAYFSDVDLEKDVHSGLIGPLLVCHTNTLNPAHGRQVTVQEFALFFTIFDETKSWYFTENMERNCRAPCNIQMEDPTFKENYRFHAINGYIMDTLPGLVMAQDQRIRWYLLSMGSNENIHSIHFSGHVFTVRKKEEYKMALYNLYPGVFETVEMLPSKAGIWRVECLIGEHLHAGMSTLFLVYSNKCQNPLGMASGHIRDFQITASGQYGQWAPKLARLHYSGSINAWSTKEPFSWIKVDLLAPMIIHGIKTQGARQKFSSLYISQFIIMYSLDGKKWQTYRGNSTGTDMVFFGNVDSSGIKHNIFNPPIIARYIRLHPTHYSIRSTLRMELMGCDLNSCSMPLGMESKAISDAQITASSYFTNMFATWSPSKARLHLQGRSNAWRPQVNNPKEWLQVDFQKTMKVTGVTTQGVKSLDTSMYVKEFLISSSQDGHQWTLFFQNGKVKVFQGNQDSFTPVVNSLDPPLLTRYLRIHPQSWEHQIALRMEVLGCEAQDLY

SEQ ID NO: 2309 - DNA, 4371 bp, synthetic construct
  misc_feature 1..4371: note = Variant of human B-domain deleted Factor VIII
  source 1..4371: mol_type = other DNA
atgcagattgaactgtctacctgcttcttcctctgtttgctgaggttctgctttagcgccactagacggtactaccttggcgctgtggagctgtcctgggactatatgcagagtgatttgggagagcttcccgtcgacgcacgatttcctcctcgcgttccaaagtcatttccctttaacacaagccaggtgtacaagaagacgctcttcgtcgaattcaccgatcacctgttcaatatcgccaaacccagaccaccatggatgggtcttttggggcctaccatacaagcggaggtgtatgacacagttgttatcactctcaagaacatggcttctcatccggtaagtcttcacgcagtgggcgtgtcctactggaaagcttcagaaggagccgagtatgatgatcagacatcccagagggagaaagaagacgacaaggtatttccaggtgggtctcatacctatgtgtggcaagtgctcaaagagaatggccctatggcaagcgatccgccgtgtttgacttacagctacctttcacacgttgacctcgtcaaggacctcaactccgggttgattggagccttgttggtatgcagggaaggatctcttgccaaagagaagacacagaccctggccaagtttatccttctctttgctgtgttcgatgagggcaaaagttggcatagcgaaacgaagaattccctcatgcaggatcgcgacgcagccagcgccagagcttggcccaagatgcacactgtgaacggatatgtcaataggacgcttcctggcttgattgggtgtcatcggaaaagtgtctactggcacgtgatcggaatggggacaacaccagaggtccactccatatttctcgaaggccataccttccttgttcgaaaccacagacaggcatccttggggatctctcccattacctttctcactgcccaaacgggtcttcgtgacttgggtcagttccttctcttttgccatatcccgtcacaccagcatgatggtatggaagcttatgtgaaagtcgacagttgtcctgaggagccacagttgcgcatgaagaataatgaagaagccgaggattacgacgacgatctcaccgattctgagatggacgtggtgaggtttgatgacgacaactctccctccatcattcaagctcggagcggggcgaagaaacaccccaagacttgggtccactatatagcggcggaagaggaggattgggattacgctcctcttgtattggcaccagatgaccgctcatacaaaagccagtacctcaacaacggaccgcagagaattggccggaagtataagaaagtgcgatttatggcctatacagacgaaacctttaagacaagggaggccatccagcatgagagtgggattttgggacctcttctttacggcgaagttggtgataccctcctcatcatcttcaagaatcaagcttctcgcccctataacatttacccacacgggatcactgacgttaggcctttgtatagcagaagacttcccaaaggcgtgaagcatctcaaagacttccccattttgccaggcgagatctttaagtacaaatggaccattacagtggaagatggaccgactaaatcggaccctcgatgccttacgcggtactattcctccttcgtgaattgggagagagatttggcaagcggactcataggaccactcctcatctgttacaaggaatctgtagaccagaggggtaaccagattatgagtgataaacgcaatgtgatcctttttagcgtcttcgacgagaaccggtcctggtacttgaccgagaatatacaaaggttccttcccaaccccgcaggcgttcagttggaagaccctgagtttcaggccagcaatattatgcactcaatcaacggctatgtgtttgatagtctccagctttctgtttgcctccatgaagtagcctattggtacatcttgtcaattggtgctcaaacagacttcctctccgtcttcttctccggctacacctttaagcacaagggggtgtatgaggacactctcacactctttccattttctggagaaaccgtgttcatggagatggagaatccaggcctttggatcttgggttgccacaacagtgattttcgcaatcggggaatgactgctctcctcaaagtcagcagctgtgattggaacacaggcgactattacggggattcttacgaggacataagtgcctactttgactccaagaataacgccattgagcccagatcattctcccagaatcctcccgtgcttaaaaggcatcagcgcgaaggtaccagaactactcttcagtctgatcaagaggagattgactatgacgacaccattagcgtggaaatgaagaaggtggatttcgatatctatgacgaggatgagaaccagtctccgcggagctttcagaagaagacgcgacactacttcattgcagcagtcgaaaggctttgggactacggtatgtcatcatcccctcatgtgttgcgcaatagagctcagagtggaagtgttccacagttcaagaaagtcgtctttcaagagtttacagatggcagcttcacacagcctctctatcggggcgagcttaacgaacatttgggactccttggtccctatatccgagccgaagtggaggacaacattatggttacctttaggaatcaagcctctcgcccctacagcttctactcctccctcatcagttatgaggaggatcagagacaaggcgctgaaccacggaagaactttgtgaaaccgaatgagacgaagacctacttctggaaagtacagcaccacatggcccccacaaaagacgaattcgattgcaaagcatgggcgtatttttcagacgttgacttggagaaagatgtacattcaggacttattggtcctttgttggtgtgtcacactaacactctcaatccagcccatggcaggcaggtgacagtccaggaattcgctcttttctttaccatctttgatgagaccaagtcctggtacttcacggaaaacatggagcgcaattgcagagccccctgtaacatacagatggaggaccctacctttaaggaaaattatcggttccacgcaatcaacggatacattatggatacactccctggccttgtgatggctcaggaccaacgaatcaggtggtacctcctcagcatgggttctaatgagaacatacactccattcacttttcaggacatgtgttcactgtccggaagggtgaagagtataagatggccctctacaatttgtatccaggcgtgtttgagaccgttgaaatgcttccctctaaagctggcatctggagagtagagtgcttgatcggagaacatcttcacgcaggtatgagcaccttgttcctcgtgtacagcaacaaatgtcagaatccacttggcatggccagtggacacattcgcgactttcagatcacagcatctggccagtatggacaatgggccccaaagttggctcgcctccattactccggtagcataaatgcgtggtccactaaagaacctttcagctggattaaggtcgatcttcttgcccccatgatcatccacggcattaagacacagggagcgaggcagaaattctcctccctctacatctcacagttcattattatgtatagtttggacggcaagaagtggcaaacttatagaggtaacagtactggaacagacatggtgttcttcggcaacgttgatagctctggcatcaaacacaacatctttaatcctcccataatagctcggtacatcagattgcatccgacccactacagcattaggagtacactccgaatggagcttatgggttgcgacttgaattcctgttcaatgccactcggaatggagtctaaagccatctctgatgcacagataaccgccagtagctactttacgaacatgtttgctacgtggtcaccctctaaggcaaggcttcatttgcaaggccggtctaatgcctggagacctcaggtgaacaacccgaaagaatggctccaggtggactttcagaagaccatgaaagtaacaggtgtcactactcagggagttaagtccttggatactagcatgtatgtgaaggagttccttatttcctcatcacaagatggccaccagtggaccctcttctttcagaatggtaaggtcaaagtgtttcagggcaatcaagacagcttcacacccgtggtgaacagtcttgatcctccactcttgacacgataccttcgaatccatccacagtcttgggagcaccagattgcattgcgcatggaagtacttggatgcgaggctcaggacctctac

SEQ ID NO: 2310 - protein, 1457 aa, synthetic construct
  REGION 1..1457: note = Variant of human B-domain deleted Factor VIII
MQIELSTCFFLCLLRFCFSATRRYYLGAVELSWDYMQSDLGELPVDARFPPRVPKSFPFNTSQVYKKTLFVEFTDHLFNIAKPRPPWMGLLGPTIQAEVYDTVVITLKNMASHPVSLHAVGVSYWKASEGAEYDDQTSQREKEDDKVFPGGSHTYVWQVLKENGPMASDPPCLTYSYLSHVDLVKDLNSGLIGALLVCREGSLAKEKTQTLAKFILLFAVFDEGKSWHSETKNSLMQDRDAASARAWPKMHTVNGYVNRTLPGLIGCHRKSVYWHVIGMGTTPEVHSIFLEGHTFLVRNHRQASLGISPITFLTAQTGLRDLGQFLLFCHIPSHQHDGMEAYVKVDSCPEEPQLRMKNNEEAEDYDDDLTDSEMDVVRFDDDNSPSIIQARSGAKKHPKTWVHYIAAEEEDWDYAPLVLAPDDRSYKSQYLNNGPQRIGRKYKKVRFMAYTDETFKTREAIQHESGILGPLLYGEVGDTLLIIFKNQASRPYNIYPHGITDVRPLYSRRLPKGVKHLKDFPILPGEIFKYKWTITVEDGPTKSDPRCLTRYYSSFVNWERDLASGLIGPLLICYKESVDQRGNQIMSDKRNVILFSVFDENRSWYLTENIQRFLPNPAGVQLEDPEFQASNIMHSINGYVFDSLQLSVCLHEVAYWYILSIGAQTDFLSVFFSGYTFKHKGVYEDTLTLFPFSGETVFMEMENPGLWILGCHNSDFRNRGMTALLKVSSCDWNTGDYYGDSYEDISAYFDSKNNAIEPRSFSQNPPVLKRHQREGTRTTLQSDQEEIDYDDTISVEMKKVDFDIYDEDENQSPRSFQKKTRHYFIAAVERLWDYGMSSSPHVLRNRAQSGSVPQFKKVVFQEFTDGSFTQPLYRGELNEHLGLLGPYIRAEVEDNIMVTFRNQASRPYSFYSSLISYEEDQRQGAEPRKNFVKPNETKTYFWKVQHHMAPTKDEFDCKAWAYFSDVDLEKDVHSGLIGPLLVCHTNTLNPAHGRQVTVQEFALFFTIFDETKSWYFTENMERNCRAPCNIQMEDPTFKENYRFHAINGYIMDTLPGLVMAQDQRIRWYLLSMGSNENIHSIHFSGHVFTVRKGEEYKMALYNLYPGVFETVEMLPSKAGIWRVECLIGEHLHAGMSTLFLVYSNKCQNPLGMASGHIRDFQITASGQYGQWAPKLARLHYSGSINAWSTKEPFSWIKVDLLAPMIIHGIKTQGARQKFSSLYISQFIIMYSLDGKKWQTYRGNSTGTDMVFFGNVDSSGIKHNIFNPPIIARYIRLHPTHYSIRSTLRMELMGCDLNSCSMPLGMESKAISDAQITASSYFTNMFATWSPSKARLHLQGRSNAWRPQVNNPKEWLQVDFQKTMKVTGVTTQGVKSLDTSMYVKEFLISSSQDGHQWTLFFQNGKVKVFQGNQDSFTPVVNSLDPPLLTRYLRIHPQSWEHQIALRMEVLGCEAQDLY

SEQ ID NO: 2311 - DNA, 4371 bp, synthetic construct
  misc_feature 1..4371: note = Variant of human B-domain deleted Factor VIII
  source 1..4371: mol_type = other DNA
atgcagattgaactgtctacctgcttcttcctctgtttgctgaggttctgctttagcgccactagacggtactaccttggcgctgtggagctgtcctgggactatatgcagagtgatttgggagagcttcccgtcgacgcacgatttcctcctcgcgttccaaagtcatttccctttaacacaagccaggtgtacaagaagacgctcttcgtcgaattcaccgatcacctgttcaatatcgccaaacccagaccaccatggatgggtcttttggggcctaccatacaagcggaggtgtatgacacagttgttatcactctcaagaacatggcttctcatccggtaagtcttcacgcagtgggcgtgtcctactggaaagcttcagaaggagccgagtatgatgatcagacatcccagagggagaaagaagacgacaaggtatttccaggtgggtctcatacctatgtgtggcaagtgctcaaagagaatggccctatggcaagcgatccgccgtgtttgacttacagctacctttcacacgttgacctcgtcaaggacctcaactccgggttgattggagccttgttggtatgcagggaaggatctcttgccaaagagaagacacagaccctggccaagtttatccttctctttgctgtgttcgatgagggcaaaagttggcatagcgaaacgaagaattccctcatgcaggatcgcgacgcagccagcgccagagcttggcccaagatgcacactgtgaacggatatgtcaataggacgcttcctggcttgattgggtgtcatcggaaaagtgtctactggcacgtgatcggaatggggacaacaccagaggtccactccatatttctcgaaggccataccttccttgttcgaaaccacagacaggcatccttggggatctctcccattacctttctcactgcccaaacgggtcttcgtgacttgggtcagttccttctcttttgccatatcccgtcacaccagcatgatggtatggaagcttatgtgaaagtcgacagttgtcctgaggagccacagttgcgcatgaagaataatgaagaagccgaggattacgacgacgatctcaccgattctgagatggacgtggtgaggtttgatgacgacaactctccctccatcattcaagctcggagcggggcgaagaaacaccccaagacttgggtccactatatagcggcggaagaggaggattgggattacgctcctcttgtattggcaccagatgaccgctcatacaaaagccagtacctcaacaacggaccgcagagaattggccggaagtataagaaagtgcgatttatggcctatacagacgaaacctttaagacaagggaggccatccagcatgagagtgggattttgggacctcttctttacggcgaagttggtgataccctcctcatcatcttcaagaatcaagcttctcgcccctataacatttacccacacgggatcactgacgttaggcctttgtatagcagaagacttcccaaaggcgtgaagcatctcaaagacttccccattttgccaggcgagatctttaagtacaaatggaccattacagtggaagatggaccgactaaatcggaccctcgatgccttacgcggtactattcctccttcgtgaattgggagagagatttggcaagcggactcataggaccactcctcatctgttacaaggaatctgtagaccagaggggtaaccagattatgagtgataaacgcaatgtgatcctttttagcgtcttcgacgagaaccggtcctggtacttgaccgagaatatacaaaggttccttcccaaccccgcaggcgttcagttggaagaccctgagtttcaggccagcaatattatgcactcaatcaacggctatgtgtttgatagtctccagctttctgtttgcctccatgaagtagcctattggtacatcttgtcaattggtgctcaaacagacttcctctccgtcttcttctccggctacacctttaagcacaagggggtgtatgaggacactctcacactctttccattttctggagaaaccgtgttcatggagatggagaatccaggcctttggatcttgggttgccacaacagtgattttcgcaatcggggaatgactgctctcctcaaagtcagcagctgtgattggaacacaggcgactattacggggattcttacgaggacataagtgcctactttgactccaagaataacgccattgagcccagatcattctcccagaatcctcccgtgcttaaaaggcatcagcgcgaaggtaccagaactactcttcagtctgatcaagaggagattgactatgacgacaccattagcgtggaaatgaagagtgaggatttcgatatctatgacgaggatgagaaccagtctccgcggagctttcagaagaagacgcgacactacttcattgcagcagtcgaaaggctttgggactacggtatgtcatcatcccctcatgtgttgcgcaatagagctcagagtggaagtgttccacagttcaagaaagtcgtctttcaagagtttacagatggcagcttcacacagcctctctatcggggcgagcttaacgaacatttgggactccttggtccctatatccgagccgaagtggaggacaacattatggttacctttaggaatcaagcctctcgcccctacagcttctactcctccctcatcagttatgaggaggatcagagacaaggcgctgaaccacggaagaactttgtgaaaccgaatgagacgaagacctacttctggaaagtacagcaccacatggcccccacaaaagacgaattcgattgcaaagcatgggcgtatttttcagacgttgacttggagaaagatgtacattcaggacttattggtcctttgttggtgtgtcacactaacactctcaatccagcccatggcaggcaggtgacagtccaggaattcgctcttttctttaccatctttgatgagaccaagtcctggtacttcacggaaaacatggagcgcaattgcagagccccctgtaacatacagatggaggaccctacctttaaggaaaattatcggttccacgcaatcaacggatacattatggatacactccctggccttgtgatggctcaggaccaacgaatcaggtggtacctcctcagcatgggttctaatgagaacatacactccattcacttttcaggacatgtgttcactgtccggaagggtgaagagtataagatggccctctacaatttgtatccaggcgtgtttgagaccgttgaaatgcttccctctaaagctggcatctggagagtagagtgcttgatcggagaacatcttcacgcaggtatgagcaccttgttcctcgtgtacagcaacaaatgtcagaatccacttggcatggccagtggacacattcgcgactttcagatcacagcatctggccagtatggacaatgggccccaaagttggctcgcctccattactccggtagcataaatgcgtggtccactaaagaacctttcagctggattaaggtcgatcttcttgcccccatgatcatccacggcattaagacacagggagcgaggcagaaattctcctccctctacatctcacagttcattattatgtatagtttggacggcaagaagtggcaaacttatagaggtaacagtactggaacagacatggtgttcttcggcaacgttgatagctctggcatcaaacacaacatctttaatcctcccataatagctcggtacatcagattgcatccgacccactacagcattaggagtacactccgaatggagcttatgggttgcgacttgaattcctgttcaatgccactcggaatggagtctaaagccatctctgatgcacagataaccgccagtagctactttacgaacatgtttgctacgtggtcaccctctaaggcaaggcttcatttgcaaggccggtctaatgcctggagacctcaggtgaacaacccgaaagaatggctccaggtggactttcagaagaccatgaaagtaacaggtgtcactactcagggagttaagtccttggatactagcatgtatgtgaaggagttccttatttcctcatcacaagatggccaccagtggaccctcttctttcagaatggtaaggtcaaagtgtttcagggcaatcaagacagcttcacacccgtggtgaacagtcttgatcctccactcttgacacgataccttcgaatccatccacagtcttgggagcaccagattgcattgcgcatggaagtacttggatgcgaggctcaggacctctac

SEQ ID NO: 2312 - protein, 1457 aa, synthetic construct
  REGION 1..1457: note = Variant of human B-domain deleted Factor VIII
MQIELSTCFFLCLLRFCFSATRRYYLGAVELSWDYMQSDLGELPVDARFPPRVPKSFPFNTSQVYKKTLFVEFTDHLFNIAKPRPPWMGLLGPTIQAEVYDTVVITLKNMASHPVSLHAVGVSYWKASEGAEYDDQTSQREKEDDKVFPGGSHTYVWQVLKENGPMASDPPCLTYSYLSHVDLVKDLNSGLIGALLVCREGSLAKEKTQTLAKFILLFAVFDEGKSWHSETKNSLMQDRDAASARAWPKMHTVNGYVNRTLPGLIGCHRKSVYWHVIGMGTTPEVHSIFLEGHTFLVRNHRQASLGISPITFLTAQTGLRDLGQFLLFCHIPSHQHDGMEAYVKVDSCPEEPQLRMKNNEEAEDYDDDLTDSEMDVVRFDDDNSPSIIQARSGAKKHPKTWVHYIAAEEEDWDYAPLVLAPDDRSYKSQYLNNGPQRIGRKYKKVRFMAYTDETFKTREAIQHESGILGPLLYGEVGDTLLIIFKNQASRPYNIYPHGITDVRPLYSRRLPKGVKHLKDFPILPGEIFKYKWTITVEDGPTKSDPRCLTRYYSSFVNWERDLASGLIGPLLICYKESVDQRGNQIMSDKRNVILFSVFDENRSWYLTENIQRFLPNPAGVQLEDPEFQASNIMHSINGYVFDSLQLSVCLHEVAYWYILSIGAQTDFLSVFFSGYTFKHKGVYEDTLTLFPFSGETVFMEMENPGLWILGCHNSDFRNRGMTALLKVSSCDWNTGDYYGDSYEDISAYFDSKNNAIEPRSFSQNPPVLKRHQREGTRTTLQSDQEEIDYDDTISVEMKSEDFDIYDEDENQSPRSFQKKTRHYFIAAVERLWDYGMSSSPHVLRNRAQSGSVPQFKKVVFQEFTDGSFTQPLYRGELNEHLGLLGPYIRAEVEDNIMVTFRNQASRPYSFYSSLISYEEDQRQGAEPRKNFVKPNETKTYFWKVQHHMAPTKDEFDCKAWAYFSDVDLEKDVHSGLIGPLLVCHTNTLNPAHGRQVTVQEFALFFTIFDETKSWYFTENMERNCRAPCNIQMEDPTFKENYRFHAINGYIMDTLPGLVMAQDQRIRWYLLSMGSNENIHSIHFSGHVFTVRKGEEYKMALYNLYPGVFETVEMLPSKAGIWRVECLIGEHLHAGMSTLFLVYSNKCQNPLGMASGHIRDFQITASGQYGQWAPKLARLHYSGSINAWSTKEPFSWIKVDLLAPMIIHGIKTQGARQKFSSLYISQFIIMYSLDGKKWQTYRGNSTGTDMVFFGNVDSSGIKHNIFNPPIIARYIRLHPTHYSIRSTLRMELMGCDLNSCSMPLGMESKAISDAQITASSYFTNMFATWSPSKARLHLQGRSNAWRPQVNNPKEWLQVDFQKTMKVTGVTTQGVKSLDTSMYVKEFLISSSQDGHQWTLFFQNGKVKVFQGNQDSFTPVVNSLDPPLLTRYLRIHPQSWEHQIALRMEVLGCEAQDLY

SEQ ID NO: 2313 - DNA, 4371 bp, synthetic construct
  misc_feature 1..4371: note = Variant of human B-domain deleted Factor VIII
  source 1..4371: mol_type = other DNA
atgcagattgaactgtctacctgcttcttcctctgtttgctgaggttctgctttagcgccactagacggtactaccttggcgctgtggagctgtcctgggactatatgcagagtgatttgggagagcttcccgtcgacgcacgatttcctcctcgcgttccaaagtcatttccctttaacacaagccaggtgtacaagaagacgctcttcgtcgaattcaccgatcacctgttcaatatcgccaaacccagaccaccatggatgggtcttttggggcctaccatacaagcggaggtgtatgacacagttgttatcactctcaagaacatggcttctcatccggtaagtcttcacgcagtgggcgtgtcctactggaaagcttcagaaggagccgagtatgatgatcagacatcccagagggagaaagaagacgacaaggtatttccaggtgggtctcatacctatgtgtggcaagtgctcaaagagaatggccctatggcaagcgatccgccgtgtttgacttacagctacctttcacacgttgacctcgtcaaggacctcaactccgggttgattggagccttgttggtatgcagggaaggatctcttgccaaagagaagacacagaccctggccaagtttatccttctctttgctgtgttcgatgagggcaaaagttggcatagcgaaacgaagaattccctcatgcaggatcgcgacgcagccagcgccagagcttggcccaagatgcacactgtgaacggatatgtcaataggacgcttcctggcttgattgggtgtcatcggaaaagtgtctactggcacgtgatcggaatggggacaacaccagaggtccactccatatttctcgaaggccataccttccttgttcgaaaccacagacaggcatccttggggatctctcccattacctttctcactgcccaaacgggtcttcgtgacttgggtcagttccttctcttttgccatatcccgtcacaccagcatgatggtatggaagcttatgtgaaagtcgacagttgtcctgaggagccacagttgcgcatgaagaataatgaagaagccgaggattacgacgacgatctcaccgattctgagatggacgtggtgaggtttgatgacgacaactctccctccatcattcaagctcggagcggggcgaagaaacaccccaagacttgggtccactatatagcggcggaagaggaggattgggattacgctcctcttgtattggcaccagatgaccgctcatacaaaagccagtacctcaacaacggaccgcagagaattggccggaagtataagaaagtgcgatttatggcctatacagacgaaacctttaagacaagggaggccatccagcatgagagtgggattttgggacctcttctttacggcgaagttggtgataccctcctcatcatcttcaagaatcaagcttctcgcccctataacatttacccacacgggatcactgacgttaggcctttgtatagcagaagacttcccaaaggcgtgaagcatctcaaagacttccccattttgccaggcgagatctttaagtacaaatggaccattacagtggaagatggaccgactaaatcggaccctcgatgccttacgcggtactattcctccttcgtgaattgggagagagatttggcaagcggactcataggaccactcctcatctgttacaaggaatctgtagaccagaggggtaaccagattatgagtgataaacgcaatgtgatcctttttagcgtcttcgacgagaaccggtcctggtacttgaccgagaatatacaaaggttccttcccaaccccgcaggcgttcagttggaagaccctgagtttcaggccagcaatattatgcactcaatcaacggctatgtgtttgatagtctccagctttctgtttgcctccatgaagtagcctattggtacatcttgtcaattggtgctcaaacagacttcctctccgtcttcttctccggctacacctttaagcacaagggggtgtatgaggacactctcacactctttccattttctggagaaaccgtgttcatggagatggagaatccaggcctttggatcttgggttgccacaacagtgattttcgcaatcggggaatgactgctctcctcaaagtcagcagctgtgattggaacacaggcgactattacgaggattcttacgaggacataagtgcctactttgactccaagaataacgccattgagcccagatcattctcccagaatcctcccgtgcttaaaaggcatcagcgcgaaggtaccagaactactcttcagtctgatcaagaggagattgactatgacgacaccattagcgtggaaatgaagaaggtggatttcgatatctatgacgaggatgagaaccagtctccgcggagctttcagaagaagacgcgacactacttcattgcagcagtcgaaaggctttgggactacggtatgtcatcatcccctcatgtgttgcgcaatagagctcagagtggaagtgttccacagttcaagaaagtcgtctttcaagagtttacagatggcagcttcacacagcctctctatcggggcgagcttaacgaacatttgggactccttggtccctatatccgagccgaagtggaggacaacattatggttacctttaggaatcaagcctctcgcccctacagcttctactcctccctcatcagttatgaggaggatcagagacaaggcgctgaaccacggaagaactttgtgaaaccgaatgagacgaagacctacttctggaaagtacagcaccacatggcccccacaaaagacgaattcgattgcaaagcatgggcgtatttttcagacgttgacttggagaaagatgtacattcaggacttattggtcctttgttggtgtgtcacactaacactctcaatccagcccatggcaggcaggtgacagtccaggaattcgctcttttctttaccatctttgatgagaccaagtcctggtacttcacggaaaacatggagcgcaattgcagagccccctgtaacatacagatggaggaccctacctttaaggaaaattatcggttccacgcaatcaacggatacattatggatacactccctggccttgtgatggctcaggaccaacgaatcaggtggtacctcctcagcatgggttctaatgagaacatacactccattcacttttcaggacatgtgttcactgtccggaagggtgaagagtataagatggccctctacaatttgtatccaggcgtgtttgagaccgttgaaatgcttccctctaaagctggcatctggagagtagagtgcttgatcggagaacatcttcacgcaggtatgagcaccttgttcctcgtgtacagcaacaaatgtcagaatccacttggcatggccagtggacacattcgcgactttcagatcacagcatctggccagtatggacaatgggccccaaagttggctcgcctccattactccggtagcataaatgcgtggtccactaaagaacctttcagctggattaaggtcgatcttcttgcccccatgatcatccacggcattaagacacagggagcgaggcagaaattctcctccctctacatctcacagttcattattatgtatagtttggacggcaagaagtggcaaacttatagaggtaacagtactggaacagacatggtgttcttcggcaacgttgatagctctggcatcaaacacaacatctttaatcctcccataatagctcggtacatcagattgcatccgacccactacagcattaggagtacactccgaatggagcttatgggttgcgacttgaattcctgttcaatgccactcggaatggagtctaaagccatctctgatgcacagataaccgccagtagctactttacgaacatgtttgctacgtggtcaccctctaaggcaaggcttcatttgcaaggccggtctaatgcctggagacctcaggtgaacaacccgaaagaatggctccaggtggactttcagaagaccatgaaagtaacaggtgtcactactcagggagttaagtccttggatactagcatgtatgtgaaggagttccttatttcctcatcacaagatggccaccagtggaccctcttctttcagaatggtaaggtcaaagtgtttcagggcaatcaagacagcttcacacccgtggtgaacagtcttgatcctccactcttgacacgataccttcgaatccatccacagtcttgggagcaccagattgcattgcgcatggaagtacttggatgcgaggctcaggacctctac

SEQ ID NO: 2314 - protein, 1457 aa, synthetic construct
  REGION 1..1457: note = Variant of human B-domain deleted Factor VIII
MQIELSTCFFLCLLRFCFSATRRYYLGAVELSWDYMQSDLGELPVDARFPPRVPKSFPFNTSQVYKKTLFVEFTDHLFNIAKPRPPWMGLLGPTIQAEVYDTVVITLKNMASHPVSLHAVGVSYWKASEGAEYDDQTSQREKEDDKVFPGGSHTYVWQVLKENGPMASDPPCLTYSYLSHVDLVKDLNSGLIGALLVCREGSLAKEKTQTLAKFILLFAVFDEGKSWHSETKNSLMQDRDAASARAWPKMHTVNGYVNRTLPGLIGCHRKSVYWHVIGMGTTPEVHSIFLEGHTFLVRNHRQASLGISPITFLTAQTGLRDLGQFLLFCHIPSHQHDGMEAYVKVDSCPEEPQLRMKNNEEAEDYDDDLTDSEMDVVRFDDDNSPSIIQARSGAKKHPKTWVHYIAAEEEDWDYAPLVLAPDDRSYKSQYLNNGPQRIGRKYKKVRFMAYTDETFKTREAIQHESGILGPLLYGEVGDTLLIIFKNQASRPYNIYPHGITDVRPLYSRRLPKGVKHLKDFPILPGEIFKYKWTITVEDGPTKSDPRCLTRYYSSFVNWERDLASGLIGPLLICYKESVDQRGNQIMSDKRNVILFSVFDENRSWYLTENIQRFLPNPAGVQLEDPEFQASNIMHSINGYVFDSLQLSVCLHEVAYWYILSIGAQTDFLSVFFSGYTFKHKGVYEDTLTLFPFSGETVFMEMENPGLWILGCHNSDFRNRGMTALLKVSSCDWNTGDYYEDSYEDISAYFDSKNNAIEPRSFSQNPPVLKRHQREGTRTTLQSDQEEIDYDDTISVEMKKVDFDIYDEDENQSPRSFQKKTRHYFIAAVERLWDYGMSSSPHVLRNRAQSGSVPQFKKVVFQEFTDGSFTQPLYRGELNEHLGLLGPYIRAEVEDNIMVTFRNQASRPYSFYSSLISYEEDQRQGAEPRKNFVKPNETKTYFWKVQHHMAPTKDEFDCKAWAYFSDVDLEKDVHSGLIGPLLVCHTNTLNPAHGRQVTVQEFALFFTIFDETKSWYFTENMERNCRAPCNIQMEDPTFKENYRFHAINGYIMDTLPGLVMAQDQRIRWYLLSMGSNENIHSIHFSGHVFTVRKGEEYKMALYNLYPGVFETVEMLPSKAGIWRVECLIGEHLHAGMSTLFLVYSNKCQNPLGMASGHIRDFQITASGQYGQWAPKLARLHYSGSINAWSTKEPFSWIKVDLLAPMIIHGIKTQGARQKFSSLYISQFIIMYSLDGKKWQTYRGNSTGTDMVFFGNVDSSGIKHNIFNPPIIARYIRLHPTHYSIRSTLRMELMGCDLNSCSMPLGMESKAISDAQITASSYFTNMFATWSPSKARLHLQGRSNAWRPQVNNPKEWLQVDFQKTMKVTGVTTQGVKSLDTSMYVKEFLISSSQDGHQWTLFFQNGKVKVFQGNQDSFTPVVNSLDPPLLTRYLRIHPQSWEHQIALRMEVLGCEAQDLY

SEQ ID NO: 2315 - DNA, 4371 bp, synthetic construct
  misc_feature 1..4371: note = Variant of human B-domain deleted Factor VIII
  source 1..4371: mol_type = other DNA
atgcagattgaactgtctacctgcttcttcctctgtttgctgaggttctgctttagcgccactagacggtactaccttggcgctgtggagctgtcctgggactatatgcagagtgatttgggagagcttcccgtcgacgcacgatttcctcctcgcgttccaaagtcatttccctttaacacaagccaggtgtacaagaagacgctcttcgtcgaattcaccgatcacctgttcaatatcgccaaacccagaccaccatggatgggtcttttggggcctaccatacaagcggaggtgtatgacacagttgttatcactctcaagaacatggcttctcatccggtaagtcttcacgcagtgggcgtgtcctactggaaagcttcagaaggagccgagtatgatgatcagacatcccagagggagaaagaagacgacaaggtatttccaggtgggtctcatacctatgtgtggcaagtgctcaaagagaatggccctatggcaagcgatccgccgtgtttgacttacagctacctttcacacgttgacctcgtcaaggacctcaactccgggttgattggagccttgttggtatgcagggaaggatctcttgccaaagagaagacacagaccctggccaagtttatccttctctttgctgtgttcgatgagggcaaaagttggcatagcgaaacgaagaattccctcatgcaggatcgcgacgcagccagcgccagagcttggcccaagatgcacactgtgaacggatatgtcaataggacgcttcctggcttgattgggtgtcatcggaaaagtgtctactggcacgtgatcggaatggggacaacaccagaggtccactccatatttctcgaaggccataccttccttgttcgaaaccacagacaggcatccttggggatctctcccattacctttctcactgcccaaacgggtcttcgtgacttgggtcagttccttctcttttgccatatcccgtcacaccagcatgatggtatggaagcttatgtgaaagtcgacagttgtcctgaggagccacagttgcgcatgaagaataatgaagaagccgaggattacgacgacgatctcaccgattctgagatggacgtggtgaggtttgatgacgacaactctccctccatcattcaagctcggagcggggcgaagaaacaccccaagacttgggtccactatatagcggcggaagaggaggattgggattacgctcctcttgtattggcaccagatgaccgctcatacaaaagccagtacctcaacaacggaccgcagagaattggccggaagtataagaaagtgcgatttatggcctatacagacgaaacctttaagacaagggaggccatccagcatgagagtgggattttgggacctcttctttacggcgaagttggtgataccctcctcatcatcttcaagaatcaagcttctcgcccctataacatttacccacacgggatcactgacgttaggcctttgtatagcagaagacttcccaaaggcgtgaagcatctcaaagacttccccattttgccaggcgagatctttaagtacaaatggaccattacagtggaagatggaccgactaaatcggaccctcgatgccttacgcggtactattcctccttcgtgaattgggagagagatttggcaagcggactcataggaccactcctcatctgttacaaggaatctgtagaccagaggggtaaccagattatgagtgataaacgcaatgtgatcctttttagcgtcttcgacgagaaccggtcctggtacttgaccgagaatatacaaaggttccttcccaaccccgcaggcgttcagttggaagaccctgagtttcaggccagcaatattatgcactcaatcaacggctatgtgtttgatagtctccagctttctgtttgcctccatgaagtagcctattggtacatcttgtcaattggtgctcaaacagacttcctctccgtcttcttctccggctacacctttaagcacaagggggtgtatgaggacactctcacactctttccattttctggagaaaccgtgttcatggagatggagaatccaggcctttggatcttgggttgccacaacagtgattttcgcaatcggggaatgactgctctcctcaaagtcagcagctgtgattggaacacaggcgactattacgaggattcttacgaggacataagtgcctactttgactccaagaataacgccattgagcccagatcattctcccagaatcctcccgtgcttaaaaggcatcagcgcgaaggtaccagaactactcttcagtctgatcaagaggagattgactatgacgacaccattagcgtggaaatgaagaaggaggatttcgatatctatgacgaagatgagaaccagtctccgcggagctttcagaagaagacgcgacactacttcattgcagcagtcgaaaggctttgggactacggtatgtcatcatcccctcatgtgttgcgcaatagagctcagagtggaagtgttccacagttcaagaaagtcgtctttcaagagtttacagatggcagcttcacacagcctctctatcggggcgagcttaacgaacatttgggactccttggtccctatatccgagccgaagtggaggacaacattatggttacctttaggaatcaagcctctcgcccctacagcttctactcctccctcatcagttatgaggaggatcagagacaaggcgctgaaccacggaagaactttgtgaaaccgaatgagacgaagacctacttctggaaagtacagcaccacatggcccccacaaaagacgaattcgattgcaaagcatgggcgtatttttcagacgttgacttggagaaagatgtacattcaggacttattggtcctttgttggtgtgtcacactaacactctcaatccagcccatggcaggcaggtgacagtccaggaattcgctcttttctttaccatctttgatgagaccaagtcctggtacttcacggaaaacatggagcgcaattgcagagccccctgtaacatacagatggaggaccctacctttaaggaaaattatcggttccacgcaatcaacggatacattatggatacactccctggccttgtgatggctcaggaccaacgaatcaggtggtacctcctcagcatgggttctaatgagaacatacactccattcacttttcaggacatgtgttcactgtccggaagaaagaagagtataagatggccctctacaatttgtatccaggcgtgtttgagaccgttgaaatgcttcccatcaaagctggcatctggagagtagagtgcttgatcggagaacatcttcacgcaggtatgagcaccttgttcctcgtgtacagcaacaaatgtcagaatccacttggcatggccagtggacacattcgcgactttcagatcacagcatctggccagtatggacaatgggccccaaagttggctcgcctccattactccggtagcataaatgcgtggtccactaaagaacctttcagctggattaaggtcgatcttcttgcccccatgatcatccacggcattaagacacagggagcgaggcagaaattctcctccctctacatctcacagttcattattatgtatagtttggacggcaagaagtggcaaacttatagaggtaacagtactggaacagacatggtgttcttcggcaacgttgatagctctggcatcaaacacaacatctttaatcctcccataatagctcggtacatcagattgcatccgacccactacagcattaggagtacactccgaatggagcttatgggttgcgacttgaattcctgttcaatgccactcggaatggagtctaaagccatctctgatgcacagataaccgccagtagctactttacgaacatgtttgctacgtggtcaccctctaaggcaaggcttcatttgcaaggccggtctaatgcctggagacctcaggtgaacaacccgaaagaatggctccaggtggactttcagaagaccatgaaagtaacaggtgtcactactcagggagttaagtccttggatactagcatgtatgtgaaggagttccttatttcctcatcacaagatggccaccagtggaccctcttctttcagaatggtaaggtcaaagtgtttcagggcaatcaagacagcttcacacccgtggtgaacagtcttgatcctccactcttgacacgataccttcgaatccatccacagtcttgggagcaccagattgcattgcgcatggaagtacttggatgcgaggctcaggacctctac

SEQ ID NO: 2316 - protein, 1457 aa, synthetic construct
  REGION 1..1457: note = Variant of human B-domain deleted Factor VIII
MQIELSTCFFLCLLRFCFSATRRYYLGAVELSWDYMQSDLGELPVDARFPPRVPKSFPFNTSQVYKKTLFVEFTDHLFNIAKPRPPWMGLLGPTIQAEVYDTVVITLKNMASHPVSLHAVGVSYWKASEGAEYDDQTSQREKEDDKVFPGGSHTYVWQVLKENGPMASDPPCLTYSYLSHVDLVKDLNSGLIGALLVCREGSLAKEKTQTLAKFILLFAVFDEGKSWHSETKNSLMQDRDAASARAWPKMHTVNGYVNRTLPGLIGCHRKSVYWHVIGMGTTPEVHSIFLEGHTFLVRNHRQASLGISPITFLTAQTGLRDLGQFLLFCHIPSHQHDGMEAYVKVDSCPEEPQLRMKNNEEAEDYDDDLTDSEMDVVRFDDDNSPSIIQARSGAKKHPKTWVHYIAAEEEDWDYAPLVLAPDDRSYKSQYLNNGPQRIGRKYKKVRFMAYTDETFKTREAIQHESGILGPLLYGEVGDTLLIIFKNQASRPYNIYPHGITDVRPLYSRRLPKGVKHLKDFPILPGEIFKYKWTITVEDGPTKSDPRCLTRYYSSFVNWERDLASGLIGPLLICYKESVDQRGNQIMSDKRNVILFSVFDENRSWYLTENIQRFLPNPAGVQLEDPEFQASNIMHSINGYVFDSLQLSVCLHEVAYWYILSIGAQTDFLSVFFSGYTFKHKGVYEDTLTLFPFSGETVFMEMENPGLWILGCHNSDFRNRGMTALLKVSSCDWNTGDYYEDSYEDISAYFDSKNNAIEPRSFSQNPPVLKRHQREGTRTTLQSDQEEIDYDDTISVEMKKEDFDIYDEDENQSPRSFQKKTRHYFIAAVERLWDYGMSSSPHVLRNRAQSGSVPQFKKVVFQEFTDGSFTQPLYRGELNEHLGLLGPYIRAEVEDNIMVTFRNQASRPYSFYSSLISYEEDQRQGAEPRKNFVKPNETKTYFWKVQHHMAPTKDEFDCKAWAYFSDVDLEKDVHSGLIGPLLVCHTNTLNPAHGRQVTVQEFALFFTIFDETKSWYFTENMERNCRAPCNIQMEDPTFKENYRFHAINGYIMDTLPGLVMAQDQRIRWYLLSMGSNENIHSIHFSGHVFTVRKKEEYKMALYNLYPGVFETVEMLPIKAGIWRVECLIGEHLHAGMSTLFLVYSNKCQNPLGMASGHIRDFQITASGQYGQWAPKLARLHYSGSINAWSTKEPFSWIKVDLLAPMIIHGIKTQGARQKFSSLYISQFIIMYSLDGKKWQTYRGNSTGTDMVFFGNVDSSGIKHNIFNPPIIARYIRLHPTHYSIRSTLRMELMGCDLNSCSMPLGMESKAISDAQITASSYFTNMFATWSPSKARLHLQGRSNAWRPQVNNPKEWLQVDFQKTMKVTGVTTQGVKSLDTSMYVKEFLISSSQDGHQWTLFFQNGKVKVFQGNQDSFTPVVNSLDPPLLTRYLRIHPQSWEHQIALRMEVLGCEAQDLY

SEQ ID NO: 2317 - DNA, 4371 bp, synthetic construct
  misc_feature 1..4371: note = Variant of human B-domain deleted Factor VIII
  source 1..4371: mol_type = other DNA
atgcagattgaactgtctacctgcttcttcctctgtttgctgaggttctgctttagcgccactagacggtactaccttggcgctgtggagctgtcctgggactatatgcagagtgatttgggagagcttcccgtcgacgcacgatttcctcctcgcgttccaaagtcatttccctttaacacaagccaggtgtacaagaagacgctcttcgtcgaattcaccgatcacctgttcaatatcgccaaacccagaccaccatggatgggtcttttggggcctaccatacaagcggaggtgtatgacacagttgttatcactctcaagaacatggcttctcatccggtaagtcttcacgcagtgggcgtgtcctactggaaagcttcagaaggagccgagtatgatgatcagacatcccagagggagaaagaagacgacaaggtatttccaggtgggtctcatacctatgtgtggcaagtgctcaaagagaatggccctatggcaagcgatccgccgtgtttgacttacagctacctttcacacgttgacctcgtcaaggacctcaactccgggttgattggagccttgttggtatgcagggaaggatctcttgccaaagagaagacacagaccctggccaagtttatccttctctttgctgtgttcgatgagggcaaaagttggcatagcgaaacgaagaattccctcatgcaggatcgcgacgcagccagcgccagagcttggcccaagatgcacactgtgaacggatatgtcaataggacgcttcctggcttgattgggtgtcatcggaaaagtgtctactggcacgtgatcggaatggggacaacaccagaggtccactccatatttctcgaaggccataccttccttgttcgaaaccacagacaggcatccttggggatctctcccattacctttctcactgcccaaacgggtcttcgtgacttgggtcagttccttctcttttgccatatcccgtcacaccagcatgatggtatggaagcttatgtgaaagtcgacagttgtcctgaggagccacagttgcgcatgaagaataatgaagaagccgaggattacgacgacgatctcaccgattctgagatggacgtggtgaggtttgatgacgacaactctccctccatcattcaagctcggagcggggcgaagaaacaccccaagacttgggtccactatatagcggcggaagaggaggattgggattacgctcctcttgtattggcaccagatgaccgctcatacaaaagccagtacctcaacaacggaccgcagagaattggccggaagtataagaaagtgcgatttatggcctatacagacgaaacctttaagacaagggaggccatccagcatgagagtgggattttgggacctcttctttacggcgaagttggtgataccctcctcatcatcttcaagaatcaagcttctcgcccctataacatttacccacacgggatcactgacgttaggcctttgtatagcagaagacttcccaaaggcgtgaagcatctcaaagacttccccattttgccaggcgagatctttaagtacaaatggaccattacagtggaagatggaccgactaaatcagaccctcgatgccttacgcggtactattcctccttcgtgaattgggagagagatttggcaagcggactcataggaccactcctcatctgttacaaggaatctgtagaccagaggggtaaccagattatgagtgataaacgcaatgtgatcctttttagcgtcttcgacgagaaccggtcctggtacttgaccgagaatatacaaaggttccttcccaaccccgcaggcgttcagttggaagaccctgagtttcaggccagcaatattatgcactcaatcaacggctatgtgtttgatagtctccagctttctgtttgcctccatgaagtagcctattggtacatcttgtcaattggtgctcaaacagacttcctctccgtcttcttctccggctacacctttaagcacaagggcgtgtatgaggacactctcacactctttccattttctggagaaaccgtgttcatggagatggagaatccaggcctttggatcttgggttgccacaacagtgattttcgcaatcggggaatgactgctctcctcaaagtcagcagctgtgattggaacacaggcgactatgaggaagattcttacgaggacataagtgcctactttgactccaagaataacgccattgagcccagatcattctcccagaatcctcccgtgcttaaaaggcatcagcgcgaaggtaccagaactactcttcagtctgatcaagaggagattgactatgacgacaccattagcgtggaaatgaagaaggaggatttcgatatctatgacgaagatgggaaccagtctccgcggagctttcagaagaagacgcgacactacttcattgcagcagtcgaaaggctttgggactacggtatgtcatcatcccctcatgtgttgcgcaatagagctcagagtggaagtgttccacagttcaagaaagtcgtctttcaagagtttacagatggcagcttcacacagcctctctatcggggcgagcttaacgaacatttgggactccttggtccctatatccgagccgaagtggaggacaacattatggttacctttaggaatcaagcctctcgcccctacagcttctactcctccctcatcagttatgaggaggatcagagacaaggcgctgaaccacggaagaactttgtgaaaccgaatgagacgaagacctacttctggaaagtacagcaccacatggcccccacaaaagacgaattcgattgcaaagcatgggcgtatttttcagacgttgacttggagaaagatgtacattcaggacttattggtcctttgttggtgtgtcacactaacactctcaatccagcccatggcaggcaggtgacagtccaggaattcgctcttttctttaccatctttgatgagaccaagtcctggtacttcacggaaaacatggagcgcaattgcagagccccctgtaacatacagatggaggaccctacctttaaggaaaattatcggttccacgcaatcaacggatacattatggatacactccctggccttgtgatggctcaggaccaacgaatcaggtggtacctcctcagcatgggttctaatgagaacatacactccattcacttttcaggacatgtgttcactgtccggaagaaagaagagtataagatggccctctacaatttgtatccaggcgtgtttgagaccgttgaaatgcttccctctaaagctggcatctggagagtagagtgcttgatcggagaacatcttcacgcaggtatgagcaccttgttcctcgtgtacagcaacaaatgtcagaatccacttggcatggccagtggacacattcgcgactttcagatcacagcatctggccagtatggacaatgggccccaaagttggctcgcctccattactccggtagcataaatgcgtggtccactaaagaacctttcagctggattaaggtcgatcttcttgcccccatgatcatccacggcattaagacacagggagcgaggcagaaattctcctccctctacatctcacagttcattattatgtatagtttggacggcaagaagtggcaaacttatagaggtaacagtactggaacagacatggtgttcttcggcaacgttgatagctctggcatcaaacacaacatctttaatcctcccataatagctcggtacatcagattgcatccgacccactacagcattaggagtacactccgaatggagcttatgggttgcgacttgaattcctgttcaatgccactcggaatggagtctaaagccatctctgatgcacagataaccgccagtagctactttacgaacatgtttgctacgtggtcaccctctaaggcaaggcttcatttgcaaggccggtctaatgcctggagacctcaggtgaacaacccgaaagaatggctccaggtggactttcagaagaccatgaaagtaacaggtgtcactactcagggagttaagtccttggatactagcatgtatgtgaaggagttccttatttcctcatcacaagatggccaccagtggaccctcttctttcagaatggtaaggtcaaagtgtttcagggcaatcaagacagcttcacacccgtggtgaacagtcttgatcctccactcttgacacgataccttcgaatccatccacagtcttgggagcaccagattgcattgcgcatggaagtacttggatgcgaggctcaggacctctac

SEQ ID NO: 2318 - protein, 1457 aa, synthetic construct
  REGION 1..1457: note = Variant of human B-domain deleted Factor VIII
MQIELSTCFFLCLLRFCFSATRRYYLGAVELSWDYMQSDLGELPVDARFPPRVPKSFPFNTSQVYKKTLFVEFTDHLFNIAKPRPPWMGLLGPTIQAEVYDTVVITLKNMASHPVSLHAVGVSYWKASEGAEYDDQTSQREKEDDKVFPGGSHTYVWQVLKENGPMASDPPCLTYSYLSHVDLVKDLNSGLIGALLVCREGSLAKEKTQTLAKFILLFAVFDEGKSWHSETKNSLMQDRDAASARAWPKMHTVNGYVNRTLPGLIGCHRKSVYWHVIGMGTTPEVHSIFLEGHTFLVRNHRQASLGISPITFLTAQTGLRDLGQFLLFCHIPSHQHDGMEAYVKVDSCPEEPQLRMKNNEEAEDYDDDLTDSEMDVVRFDDDNSPSIIQARSGAKKHPKTWVHYIAAEEEDWDYAPLVLAPDDRSYKSQYLNNGPQRIGRKYKKVRFMAYTDETFKTREAIQHESGILGPLLYGEVGDTLLIIFKNQASRPYNIYPHGITDVRPLYSRRLPKGVKHLKDFPILPGEIFKYKWTITVEDGPTKSDPRCLTRYYSSFVNWERDLASGLIGPLLICYKESVDQRGNQIMSDKRNVILFSVFDENRSWYLTENIQRFLPNPAGVQLEDPEFQASNIMHSINGYVFDSLQLSVCLHEVAYWYILSIGAQTDFLSVFFSGYTFKHKGVYEDTLTLFPFSGETVFMEMENPGLWILGCHNSDFRNRGMTALLKVSSCDWNTGDYEEDSYEDISAYFDSKNNAIEPRSFSQNPPVLKRHQREGTRTTLQSDQEEIDYDDTISVEMKKEDFDIYDEDGNQSPRSFQKKTRHYFIAAVERLWDYGMSSSPHVLRNRAQSGSVPQFKKVVFQEFTDGSFTQPLYRGELNEHLGLLGPYIRAEVEDNIMVTFRNQASRPYSFYSSLISYEEDQRQGAEPRKNFVKPNETKTYFWKVQHHMAPTKDEFDCKAWAYFSDVDLEKDVHSGLIGPLLVCHTNTLNPAHGRQVTVQEFALFFTIFDETKSWYFTENMERNCRAPCNIQMEDPTFKENYRFHAINGYIMDTLPGLVMAQDQRIRWYLLSMGSNENIHSIHFSGHVFTVRKKEEYKMALYNLYPGVFETVEMLPSKAGIWRVECLIGEHLHAGMSTLFLVYSNKCQNPLGMASGHIRDFQITASGQYGQWAPKLARLHYSGSINAWSTKEPFSWIKVDLLAPMIIHGIKTQGARQKFSSLYISQFIIMYSLDGKKWQTYRGNSTGTDMVFFGNVDSSGIKHNIFNPPIIARYIRLHPTHYSIRSTLRMELMGCDLNSCSMPLGMESKAISDAQITASSYFTNMFATWSPSKARLHLQGRSNAWRPQVNNPKEWLQVDFQKTMKVTGVTTQGVKSLDTSMYVKEFLISSSQDGHQWTLFFQNGKVKVFQGNQDSFTPVVNSLDPPLLTRYLRIHPQSWEHQIALRMEVLGCEAQDLY

SEQ ID NO: 2319 - DNA, 4371 bp, synthetic construct
  misc_feature 1..4371: note = Variant of human B-domain deleted Factor VIII
  source 1..4371: mol_type = other DNA
atgcagattgaactgtctacctgcttcttcctctgtttgctgaggttctgctttagcgccactagacggtactaccttggcgctgtggagctgtcctgggactatatgcagagtgatttgggagagcttcccgtcgacgcacgatttcctcctcgcgttccaaagtcatttccctttaacacaagccaggtgtacaagaagacgctcttcgtcgaattcaccgatcacctgttcaatatcgccaaacccagaccaccatggatgggtcttttggggcctaccatacaagcggaggtgtatgacacagttgttatcactctcaagaacatggcttctcatccggtaagtcttcacgcagtgggcgtgtcctactggaaagcttcagaaggagccgagtatgatgatcagacatcccagagggagaaagaagacgacaaggtatttccaggtgggtctcatacctatgtgtggcaagtgctcaaagagaatggccctatggcaagcgatccgccgtgtttgacttacagctacctttcacacgttgacctcgtcaaggacctcaactccgggttgattggagccttgttggtatgcagggaaggatctcttgccaaagagaagacacagaccctggccaagtttatccttctctttgctgtgttcgatgagggcaaaagttggcatagcgaaacgaagaattccctcatgcaggatcgcgacgcagccagcgccagagcttggcccaagatgcacactgtgaacggatatgtcaataggacgcttcctggcttgattgggtgtcatcggaaaagtgtctactggcacgtgatcggaatggggacaacaccagaggtccactccatatttctcgaaggccataccttccttgttcgaaaccacagacaggcatccttggggatctctcccattacctttctcactgcccaaacgggtcttcgtgacttgggtcagttccttctcttttgccatatcccgtcacaccagcatgatggtatggaagcttatgtgaaagtcgacagttgtcctgaggagccacagttgcgcatgaagaataatgaagaagccgaggattacgacgacgatctcaccgattctgagatggacgtggtgaggtttgatgacgacaactctccctccatcattcaagctcggagcggggcgaagaaacaccccaagacttgggtccactatatagcggcggaagaggaggattgggattacgctcctcttgtattggcaccagatgaccgctcatacaaaagccagtacctcaacaacggaccgcagagaattggccggaagtataagaaagtgcgatttatggcctatacagacgaaacctttaagacaagggaggccatccagcatgagagtgggattttgggacctcttctttacggcgaagttggtgataccctcctcatcatcttcaagaatcaagcttctcgcccctataacatttacccacacgggatcactgacgttaggcctttgtatagcagaagacttcccaaaggcgtgaagcatctcaaagacttccccattttgccaggcgagatctttaagtacaaatggaccattacagtggaagatggaccgactaaatcggaccctcgatgccttacgcggtactattcctccttcgtgaattgggagagagatttggcaagcggactcataggaccactcctcatctgttacaaggaatctgtagaccagaggggtaaccagattatgagtgataaacgcaatgtgatcctttttagcgtcttcgacgagaaccggtcctggtacttgaccgagaatatacaaaggttccttcccaaccccgcaggcgttcagttggaagaccctgagtttcaggccagcaatattatgcactcaatcaacggctatgtgtttgatagtctccagctttctgtttgcctccatgaagtagcctattggtacatcttgtcaattggtgctcaaacagacttcctctccgtcttcttctccggctacacctttaagcacaagggcgtgtatgaggacactctcacactctttccattttctggagaaaccgtgttcatggagatggagaatccaggcctttggatcttgggttgccacaacagtgattttcgcaatcggggaatgactgctctcctcaaagtcagcagctgtgattggaacacaggcgactatgaggaagattcttacgaggacataagtgcctactttgactccaagaataacgccattgagcccagatcattctcccagaatcctcccgtgcttaaaaggcatcagcgcgaaggtaccagaactactcttcagtctgatcaagaggagattgactatgacgacaccattagcgtggaaatgaagaaggaggatttcgatatctatgacgaggatgggaaccagtctccgcggagctttcagaagaagacgcgacactacttcattgcagcagtcgaaaggctttgggactacggtatgtcatcatcccctcatgtgttgcgcaatagagctcagagtggaagtgttccacagttcaagaaagtcgtctttcaagagtttacagatggcagcttcacacagcctctctatcggggcgagcttaacgaacatttgggactccttggtccctatatccgagccgaagtggaggacaacattatggttacctttaggaatcaagcctctcgcccctacagcttctactcctccctcatcagttatgaggaggatcagagacaaggcgctgaaccacggaagaactttgtgaaaccgaatgagacgaagacctacttctggaaagtacagcaccacatggcccccacaaaagacgaattcgattgcaaagcatgggcgtatttttcagacgttgacttggagaaagatgtacattcaggacttattggtcctttgttggtgtgtcacactaacactctcaatccagcccatggcaggcaggtgacagtccaggaattcgctcttttctttaccatctttgatgagaccaagtcctggtacttcacggaaaacatggagcgcaattgcagagccccctgtaacatacagatggaggaccctacctttaaggaaaattatcggttccacgcaatcaacggatacattatggatacactccctggccttgtgatggctcaggaccaacgaatcaggtggtacctcctcagcatgggttctaatgagaacatacactccattcacttttcaggacatgtgttcactgtccggaagggtgaagagtataagatggccctctacaatttgtatccaggcgtgtttgagaccgttgaaatgcttccctctaaagctggcatctggagagtagagtgcttgatcggagaacatcttcacgcaggtatgagcaccttgttcctcgtgtacagcaacaaatgtcagaatccacttggcatggccagtggacacattcgcgactttcagatcacagcatctggccagtatggacaatgggccccaaagttggctcgcctccattactccggtagcataaatgcgtggtccactaaagaacctttcagctggattaaggtcgatcttcttgcccccatgatcatccacggcattaagacacagggagcgaggcagaaattctcctccctctacatctcacagttcattattatgtatagtttggacggcaagaagtggcaaacttatagaggtaacagtactggaacagacatggtgttcttcggcaacgttgatagctctggcatcaaacacaacatctttaatcctcccataatagctcggtacatcagattgcatccgacccactacagcattaggagtacactccgaatggagcttatgggttgcgacttgaattcctgttcaatgccactcggaatggagtctaaagccatctctgatgcacagataaccgccagtagctactttacgaacatgtttgctacgtggtcaccctctaaggcaaggcttcatttgcaaggccggtctaatgcctggagacctcaggtgaacaacccgaaagaatggctccaggtggactttcagaagaccatgaaagtaacaggtgtcactactcagggagttaagtccttggatactagcatgtatgtgaaggagttccttatttcctcatcacaagatggccaccagtggaccctcttctttcagaatggtaaggtcaaagtgtttcagggcaatcaagacagcttcacacccgtggtgaacagtcttgatcctccactcttgacacgataccttcgaatccatccacagtcttgggagcaccagattgcattgcgcatggaagtacttggatgcgaggctcaggacctctac

SEQ ID NO: 2320 - protein, 1457 aa, synthetic construct
  REGION 1..1457: note = Variant of human B-domain deleted Factor VIII
MQIELSTCFFLCLLRFCFSATRRYYLGAVELSWDYMQSDLGELPVDARFPPRVPKSFPFNTSQVYKKTLFVEFTDHLFNIAKPRPPWMGLLGPTIQAEVYDTVVITLKNMASHPVSLHAVGVSYWKASEGAEYDDQTSQREKEDDKVFPGGSHTYVWQVLKENGPMASDPPCLTYSYLSHVDLVKDLNSGLIGALLVCREGSLAKEKTQTLAKFILLFAVFDEGKSWHSETKNSLMQDRDAASARAWPKMHTVNGYVNRTLPGLIGCHRKSVYWHVIGMGTTPEVHSIFLEGHTFLVRNHRQASLGISPITFLTAQTGLRDLGQFLLFCHIPSHQHDGMEAYVKVDSCPEEPQLRMKNNEEAEDYDDDLTDSEMDVVRFDDDNSPSIIQARSGAKKHPKTWVHYIAAEEEDWDYAPLVLAPDDRSYKSQYLNNGPQRIGRKYKKVRFMAYTDETFKTREAIQHESGILGPLLYGEVGDTLLIIFKNQASRPYNIYPHGITDVRPLYSRRLPKGVKHLKDFPILPGEIFKYKWTITVEDGPTKSDPRCLTRYYSSFVNWERDLASGLIGPLLICYKESVDQRGNQIMSDKRNVILFSVFDENRSWYLTENIQRFLPNPAGVQLEDPEFQASNIMHSINGYVFDSLQLSVCLHEVAYWYILSIGAQTDFLSVFFSGYTFKHKGVYEDTLTLFPFSGETVFMEMENPGLWILGCHNSDFRNRGMTALLKVSSCDWNTGDYEEDSYEDISAYFDSKNNAIEPRSFSQNPPVLKRHQREGTRTTLQSDQEEIDYDDTISVEMKKEDFDIYDEDGNQSPRSFQKKTRHYFIAAVERLWDYGMSSSPHVLRNRAQSGSVPQFKKVVFQEFTDGSFTQPLYRGELNEHLGLLGPYIRAEVEDNIMVTFRNQASRPYSFYSSLISYEEDQRQGAEPRKNFVKPNETKTYFWKVQHHMAPTKDEFDCKAWAYFSDVDLEKDVHSGLIGPLLVCHTNTLNPAHGRQVTVQEFALFFTIFDETKSWYFTENMERNCRAPCNIQMEDPTFKENYRFHAINGYIMDTLPGLVMAQDQRIRWYLLSMGSNENIHSIHFSGHVFTVRKGEEYKMALYNLYPGVFETVEMLPSKAGIWRVECLIGEHLHAGMSTLFLVYSNKCQNPLGMASGHIRDFQITASGQYGQWAPKLARLHYSGSINAWSTKEPFSWIKVDLLAPMIIHGIKTQGARQKFSSLYISQFIIMYSLDGKKWQTYRGNSTGTDMVFFGNVDSSGIKHNIFNPPIIARYIRLHPTHYSIRSTLRMELMGCDLNSCSMPLGMESKAISDAQITASSYFTNMFATWSPSKARLHLQGRSNAWRPQVNNPKEWLQVDFQKTMKVTGVTTQGVKSLDTSMYVKEFLISSSQDGHQWTLFFQNGKVKVFQGNQDSFTPVVNSLDPPLLTRYLRIHPQSWEHQIALRMEVLGCEAQDLY

SEQ ID NO: 2321 - DNA, 4371 bp, synthetic construct
  misc_feature 1..4371: note = Variant of human B-domain deleted Factor VIII
  source 1..4371: mol_type = other DNA
atgcagattgaactgtctacctgcttcttcctctgtttgctgaggttctgctttagcgccactagacggtactaccttggcgctgtggagctgtcctgggactatatgcagagtgatttgggagagcttcccgtcgacgcacgatttcctcctcgcgttccaaagtcatttccctttaacacaagccaggtgtacaagaagacgctcttcgtcgaattcaccgatcacctgttcaatatcgccaaacccagaccaccatggatgggtcttttggggcctaccatacaagcggaggtgtatgacacagttgttatcactctcaagaacatggcttctcatccggtaagtcttcacgcagtgggcgtgtcctactggaaagcttcagaaggagccgagtatgatgatcagacatcccagagggagaaagaagacgacaaggtatttccaggtgggtctcatacctatgtgtggcaagtgctcaaagagaatggccctatggcaagcgatccgccgtgtttgacttacagctacctttcacacgttgacctcgtcaaggacctcaactccgggttgattggagccttgttggtatgcagggaaggatctcttgccaaagagaagacacagaccctggccaagtttatccttctctttgctgtgttcgatgagggcaaaagttggcatagcgaaacgaagaattccctcatgcaggatcgcgacgcagccagcgccagagcttggcccaagatgcacactgtgaacggatatgtcaataggacgcttcctggcttgattgggtgtcatcggaaaagtgtctactggcacgtgatcggaatggggacaacaccagaggtccactccatatttctcgaaggccataccttccttgttcgaaaccacagacaggcatccttggggatctctcccattacctttctcactgcccaaacgggtcttcgtgacttgggtcagttccttctcttttgccatatcccgtcacaccagcatgatggtatggaagcttatgtgaaagtcgacagttgtcctgaggagccacagttgcgcatgaagaataatgaagaagccgaggattacgacgacgatctcaccgattctgagatggacgtggtgaggtttgatgacgacaactctccctccatcattcaagctcggagcggggcgaagaaacaccccaagacttgggtccactatatagcggcggaagaggaggattgggattacgctcctcttgtattggcaccagatgaccgctcatacaaaagccagtacctcaacaacggaccgcagagaattggccggaagtataagaaagtgcgatttatggcctatacagacgaaacctttaagacaagggaggccatccagcatgagagtgggattttgggacctcttctttacggcgaagttggtgataccctcctcatcatcttcaagaatcaagcttctcgcccctataacatttacccacacgggatcactgacgttaggcctttgtatagcagaagacttcccaaaggcgtgaagcatctcaaagacttccccattttgccaggcgagatctttaagtacaaatggaccattacagtggaagatggaccgactaaatcggaccctcgatgccttacgcggtactattcctccttcgtgaattgggagagagatttggcaagcggactcataggaccactcctcatctgttacaaggaatctgtagaccagaggggtaaccagattatgagtgataaacgcaatgtgatcctttttagcgtcttcgacgagaaccggtcctggtacttgaccgagaatatacaaaggttccttcccaaccccgcaggcgttcagttggaagaccctgagtttcaggccagcaatattatgcactcaatcaacggctatgtgtttgatagtctccagctttctgtttgcctccatgaagtagcctattggtacatcttgtcaattggtgctcaaacagacttcctctccgtcttcttctccggctacacctttaagcacaagggcgtgtatgaggacactctcacactctttccattttctggagaaaccgtgttcatggagatggagaatccaggcctttggatcttgggttgccacaacagtgattttcgcaatcggggaatgactgctctcctcaaagtcagcagctgtgattggaacacaggcgactatgaggaagattcttacgaggacataagtgcctactttgactccaaaaataacgccattgagcccagatcattctcccagaatcctcccgtgcttaaaaggcatcagcgcgaaggtaccagaactactcttcagtctgatcaagaggagattgactatgacgacaccattagcgtggaaatgaagaaggaggatttcgatatctatgacgaagatgagaaccagtctccgcggagctttcagaagaagacgcgacactacttcattgcagcagtcgaaaggctttgggactacggtatgtcatcatcccctcatgtgttgcgcaatagagctcagagtggaagtgttccacagttcaagaaagtcgtctttcaagagtttacagatggcagcttcacacagcctctctatcggggcgagcttaacgaacatttgggactccttggtccctatatccgagccgaagtggaggacaacattatggttacctttaggaatcaagcctctcgcccctacagcttctactcctccctcatcagttatgaggaggatcagagacaaggcgctgaaccacggaagaactttgtgaaaccgaatgagacgaagacctacttctggaaagtacagcaccacatggcccccacaaaagacgaattcgattgcaaagcatgggcgtatttttcagacgttgacttggagaaagatgtacattcaggacttattggtcctttgttggtgtgtcacactaacactctcaatccagcccatggcaggcaggtgacagtccaggaattcgctcttttctttaccatctttgatgagaccaagtcctggtacttcacggaaaacatggagcgcaattgcagagccccctgtaacatacagatggaggaccctacctttaaggaaaattatcggttccacgcaatcaacggatacattatggatacactccctggccttgtgatggctcaggaccaacgaatcaggtggtacctcctcagcatgggttctaatgagaacatacactccattcacttttcaggacatgtgttcactgtccggaagggtgaagagtataagatggccctctacaatttgtatccaggcgtgtttgagaccgttgaaatgcttccctctaaagctggcatctggagagtagagtgcttgatcggagaacatcttcacgcaggtatgagcaccttgttcctcgtgtacagcaacaaatgtcagaatccacttggcatggccagtggacacattcgcgactttcagatcacagcatctggccagtatggacaatgggccccaaagttggctcgcctccattactccggtagcataaatgcgtggtccactaaagaacctttcagctggattaaggtcgatcttcttgcccccatgatcatccacggcattaagacacagggagcgaggcagaaattctcctccctctacatctcacagttcattattatgtatagtttggacggcaagaagtggcaaacttatagaggtaacagtactggaacagacatggtgttcttcggcaacgttgatagctctggcatcaaacacaacatctttaatcctcccataatagctcggtacatcagattgcatccgacccactacagcattaggagtacactccgaatggagcttatgggttgcgacttgaattcctgttcaatgccactcggaatggagtctaaagccatctctgatgcacagataaccgccagtagctactttacgaacatgtttgctacgtggtcaccctctaaggcaaggcttcatttgcaaggccggtctaatgcctggagacctcaggtgaacaacccgaaagaatggctccaggtggactttcagaagaccatgaaagtaacaggtgtcactactcagggagttaagtccttggatactagcatgtatgtgaaggagttccttatttcctcatcacaagatggccaccagtggaccctcttctttcagaatggtaaggtcaaagtgtttcagggcaatcaagacagcttcacacccgtggtgaacagtcttgatcctccactcttgacacgataccttcgaatccatccacagtcttgggagcaccagattgcattgcgcatggaagtacttggatgcgaggctcaggacctctac

SEQ ID NO: 2322 - protein, 1457 aa, synthetic construct
  REGION 1..1457: note = Variant of human B-domain deleted Factor VIII
MQIELSTCFFLCLLRFCFSATRRYYLGAVELSWDYMQSDLGELPVDARFPPRVPKSFPFNTSQVYKKTLFVEFTDHLFNIAKPRPPWMGLLGPTIQAEVYDTVVITLKNMASHPVSLHAVGVSYWKASEGAEYDDQTSQREKEDDKVFPGGSHTYVWQVLKENGPMASDPPCLTYSYLSHVDLVKDLNSGLIGALLVCREGSLAKEKTQTLAKFILLFAVFDEGKSWHSETKNSLMQDRDAASARAWPKMHTVNGYVNRTLPGLIGCHRKSVYWHVIGMGTTPEVHSIFLEGHTFLVRNHRQASLGISPITFLTAQTGLRDLGQFLLFCHIPSHQHDGMEAYVKVDSCPEEPQLRMKNNEEAEDYDDDLTDSEMDVVRFDDDNSPSIIQARSGAKKHPKTWVHYIAAEEEDWDYAPLVLAPDDRSYKSQYLNNGPQRIGRKYKKVRFMAYTDETFKTREAIQHESGILGPLLYGEVGDTLLIIFKNQASRPYNIYPHGITDVRPLYSRRLPKGVKHLKDFPILPGEIFKYKWTITVEDGPTKSDPRCLTRYYSSFVNWERDLASGLIGPLLICYKESVDQRGNQIMSDKRNVILFSVFDENRSWYLTENIQRFLPNPAGVQLEDPEFQASNIMHSINGYVFDSLQLSVCLHEVAYWYILSIGAQTDFLSVFFSGYTFKHKGVYEDTLTLFPFSGETVFMEMENPGLWILGCHNSDFRNRGMTALLKVSSCDWNTGDYEEDSYEDISAYFDSKNNAIEPRSFSQNPPVLKRHQREGTRTTLQSDQEEIDYDDTISVEMKKEDFDIYDEDENQSPRSFQKKTRHYFIAAVERLWDYGMSSSPHVLRNRAQSGSVPQFKKVVFQEFTDGSFTQPLYRGELNEHLGLLGPYIRAEVEDNIMVTFRNQASRPYSFYSSLISYEEDQRQGAEPRKNFVKPNETKTYFWKVQHHMAPTKDEFDCKAWAYFSDVDLEKDVHSGLIGPLLVCHTNTLNPAHGRQVTVQEFALFFTIFDETKSWYFTENMERNCRAPCNIQMEDPTFKENYRFHAINGYIMDTLPGLVMAQDQRIRWYLLSMGSNENIHSIHFSGHVFTVRKGEEYKMALYNLYPGVFETVEMLPSKAGIWRVECLIGEHLHAGMSTLFLVYSNKCQNPLGMASGHIRDFQITASGQYGQWAPKLARLHYSGSINAWSTKEPFSWIKVDLLAPMIIHGIKTQGARQKFSSLYISQFIIMYSLDGKKWQTYRGNSTGTDMVFFGNVDSSGIKHNIFNPPIIARYIRLHPTHYSIRSTLRMELMGCDLNSCSMPLGMESKAISDAQITASSYFTNMFATWSPSKARLHLQGRSNAWRPQVNNPKEWLQVDFQKTMKVTGVTTQGVKSLDTSMYVKEFLISSSQDGHQWTLFFQNGKVKVFQGNQDSFTPVVNSLDPPLLTRYLRIHPQSWEHQIALRMEVLGCEAQDLY

SEQ ID NO: 2323 - DNA, 4371 bp, synthetic construct
  misc_feature 1..4371: note = Variant of human B-domain deleted Factor VIII
  source 1..4371: mol_type = other DNA
atgcagattgaactgtctacctgcttcttcctctgtttgctgaggttctgctttagcgccactagacggtactaccttggcgctgtggagctgtcctgggactatatgcagagtgatttgggagagcttcccgtcgacgcacgatttcctcctcgcgttccaaagtcatttccctttaacacaagccaggtgtacaagaagacgctcttcgtcgaattcaccgatcacctgttcaatatcgccaaacccagaccaccatggatgggtcttttggggcctaccatacaagcggaggtgtatgacacagttgttatcactctcaagaacatggcttctcatccggtaagtcttcacgcagtgggcgtgtcctactggaaagcttcagaaggagccgagtatgatgatcagacatcccagagggagaaagaagacgacaaggtatttccaggtgggtctcatacctatgtgtggcaagtgctcaaagagaatggccctatggcaagcgatccgccgtgtttgacttacagctacctttcacacgttgacctcgtcaaggacctcaactccgggttgattggagccttgttggtatgcagggaaggatctcttgccaaagagaagacacagaccctggccaagtttatccttctctttgctgtgttcgatgagggcaaaagttggcatagcgaaacgaagaattccctcatgcaggatcgcgacgcagccagcgccagagcttggcccaagatgcacactgtgaacggatatgtcaataggacgcttcctggcttgattgggtgtcatcggaaaagtgtctactggcacgtgatcggaatggggacaacaccagaggtccactccatatttctcgaaggccataccttccttgttcgaaaccacagacaggcatccttggggatctctcccattacctttctcactgcccaaacgggtcttcgtgacttgggtcagttccttctcttttgccatatcccgtcacaccagcatgatggtatggaagcttatgtgaaagtcgacagttgtcctgaggagccacagttgcgcatgaagaataatgaagaagccgaggattacgacgacgatctcaccgattctgagatggacgtggtgaggtttgatgacgacaactctccctccatcattcaagctcggagcggggcgaagaaacaccccaagacttgggtccactatatagcggcggaagaggaggattgggattacgctcctcttgtattggcaccagatgaccgctcatacaaaagccagtacctcaacaacggaccgcagagaattggccggaagtataagaaagtgcgatttatggcctatacagacgaaacctttaagacaagggaggccatccagcatgagagtgggattttgggacctcttctttacggcgaagttggtgataccctcctcatcatcttcaagaatcaagcttctcgcccctataacatttacccacacgggatcactgacgttaggcctttgtatagcagaagacttcccaaaggcgtgaagcatctcaaagacttccccattttgccaggcgagatctttaagtacaaatggaccattacagtggaagatggaccgactaaatcagaccctcgatgccttacgcggtactattcctccttcgtgaattgggagagagatttggcaagcggactcataggaccactcctcatctgttacaaggaatctgtagaccagaggggtaaccagattatgagtgataaacgcaatgtgatcctttttagcgtcttcgacgagaaccggtcctggtacttgaccgagaatatacaaaggttccttcccaaccccgcaggcgttcagttggaagaccctgagtttcaggccagcaatattatgcactcaatcaacggctatgtgtttgatagtctccagctttctgtttgcctccatgaagtagcctattggtacatcttgtcaattggtgctcaaacagacttcctctccgtcttcttctccggctacacctttaagcacaagggcgtgtatgaggacactctcacactctttccattttctggagaaaccgtgttcatggagatggagaatccaggcctttggatcttgggttgccacaacagtgattttcgcaatcggggaatgactgctctcctcaaagtcagcagctgtgattggaacacaggcgactatgaggaagattcttacgaggacataagtgcctactttgactccaaaaataacgccattgagcccagatcattctcccagaatcctcccgtgcttaaaaggcatcagcgcgaaggtaccagaactactcttcagtctgatcaagaggagattgactatgacgacaccattagcgtggaaatgaagaaggaggatttcgatatctatgacgaagatgagaaccagtctccgcggagctttcagaagaagacgcgacactacttcattgcagcagtcgaaaggctttgggactacggtatgtcatcatcccctcatgtgttgcgcaatagagctcagagtggaagtgttccacagttcaagaaagtcgtctttcaagagtttacagatggcagcttcacacagcctctctatcggggcgagcttaacgaacatttgggactccttggtccctatatccgagccgaagtggaggacaacattatggttacctttaggaatcaagcctctcgcccctacagcttctactcctccctcatcagttatgaggaggatcagagacaaggcgctgaaccacggaagaactttgtgaaaccgaatgagacgaagacctacttctggaaagtacagcaccacatggcccccacaaaagacgaattcgattgcaaagcatgggcgtatttttcagacgttgacttggagaaagatgtacattcaggacttattggtcctttgttggtgtgtcacactaacactctcaatccagcccatggcaggcaggtgacagtccaggaattcgctcttttctttaccatctttgatgagaccaagtcctggtacttcacggaaaacatggagcgcaattgcagagccccctgtaacatacagatggaggaccctacctttaaggaaaattatcggttccacgcaatcaacggatacattatggatacactccctggccttgtgatggctcaggaccaacgaatcaggtggtacctcctcagcatgggttctaatgagaacatacactccattcacttttcaggacatgtgttcactgtccggaagggtgaagagtataagatggccctctacaatttgtatccaggcgtgtttgagaccgttgaaatgcttcccatcaaagctggcatctggagagtagagtgcttgatcggagaacatcttcacgcaggtatgagcaccttgttcctcgtgtacagcaacaaatgtcagaatccacttggcatggccagtggacacattcgcgactttcagatcacagcatctggccagtatggacaatgggccccaaagttggctcgcctccattactccggtagcataaatgcgtggtccactaaagaacctttcagctggattaaggtcgatcttcttgcccccatgatcatccacggcattaagacacagggagcgaggcagaaattctcctccctctacatctcacagttcattattatgtatagtttggacggcaagaagtggcaaacttatagaggtaacagtactggaacagacatggtgttcttcggcaacgttgatagctctggcatcaaacacaacatctttaatcctcccataatagctcggtacatcagattgcatccgacccactacagcattaggagtacactccgaatggagcttatgggttgcgacttgaattcctgttcaatgccactcggaatggagtctaaagccatctctgatgcacagataaccgccagtagctactttacgaacatgtttgctacgtggtcaccctctaaggcaaggcttcatttgcaaggccggtctaatgcctggagacctcaggtgaacaacccgaaagaatggctccaggtggactttcagaagaccatgaaagtaacaggtgtcactactcagggagttaagtccttggatactagcatgtatgtgaaggagttccttatttcctcatcacaagatggccaccagtggaccctcttctttcagaatggtaaggtcaaagtgtttcagggcaatcaagacagcttcacacccgtggtgaacagtcttgatcctccactcttgacacgataccttcgaatccatccacagtcttgggagcaccagattgcattgcgcatggaagtacttggatgcgaggctcaggacctctac

SEQ ID NO: 2324 - protein, 1457 aa, synthetic construct
  REGION 1..1457: note = Variant of human B-domain deleted Factor VIII
MQIELSTCFFLCLLRFCFSATRRYYLGAVELSWDYMQSDLGELPVDARFPPRVPKSFPFNTSQVYKKTLFVEFTDHLFNIAKPRPPWMGLLGPTIQAEVYDTVVITLKNMASHPVSLHAVGVSYWKASEGAEYDDQTSQREKEDDKVFPGGSHTYVWQVLKENGPMASDPPCLTYSYLSHVDLVKDLNSGLIGALLVCREGSLAKEKTQTLAKFILLFAVFDEGKSWHSETKNSLMQDRDAASARAWPKMHTVNGYVNRTLPGLIGCHRKSVYWHVIGMGTTPEVHSIFLEGHTFLVRNHRQASLGISPITFLTAQTGLRDLGQFLLFCHIPSHQHDGMEAYVKVDSCPEEPQLRMKNNEEAEDYDDDLTDSEMDVVRFDDDNSPSIIQARSGAKKHPKTWVHYIAAEEEDWDYAPLVLAPDDRSYKSQYLNNGPQRIGRKYKKVRFMAYTDETFKTREAIQHESGILGPLLYGEVGDTLLIIFKNQASRPYNIYPHGITDVRPLYSRRLPKGVKHLKDFPILPGEIFKYKWTITVEDGPTKSDPRCLTRYYSSFVNWERDLASGLIGPLLICYKESVDQRGNQIMSDKRNVILFSVFDENRSWYLTENIQRFLPNPAGVQLEDPEFQASNIMHSINGYVFDSLQLSVCLHEVAYWYILSIGAQTDFLSVFFSGYTFKHKGVYEDTLTLFPFSGETVFMEMENPGLWILGCHNSDFRNRGMTALLKVSSCDWNTGDYEEDSYEDISAYFDSKNNAIEPRSFSQNPPVLKRHQREGTRTTLQSDQEEIDYDDTISVEMKKEDFDIYDEDENQSPRSFQKKTRHYFIAAVERLWDYGMSSSPHVLRNRAQSGSVPQFKKVVFQEFTDGSFTQPLYRGELNEHLGLLGPYIRAEVEDNIMVTFRNQASRPYSFYSSLISYEEDQRQGAEPRKNFVKPNETKTYFWKVQHHMAPTKDEFDCKAWAYFSDVDLEKDVHSGLIGPLLVCHTNTLNPAHGRQVTVQEFALFFTIFDETKSWYFTENMERNCRAPCNIQMEDPTFKENYRFHAINGYIMDTLPGLVMAQDQRIRWYLLSMGSNENIHSIHFSGHVFTVRKGEEYKMALYNLYPGVFETVEMLPIKAGIWRVECLIGEHLHAGMSTLFLVYSNKCQNPLGMASGHIRDFQITASGQYGQWAPKLARLHYSGSINAWSTKEPFSWIKVDLLAPMIIHGIKTQGARQKFSSLYISQFIIMYSLDGKKWQTYRGNSTGTDMVFFGNVDSSGIKHNIFNPPIIARYIRLHPTHYSIRSTLRMELMGCDLNSCSMPLGMESKAISDAQITASSYFTNMFATWSPSKARLHLQGRSNAWRPQVNNPKEWLQVDFQKTMKVTGVTTQGVKSLDTSMYVKEFLISSSQDGHQWTLFFQNGKVKVFQGNQDSFTPVVNSLDPPLLTRYLRIHPQSWEHQIALRMEVLGCEAQDLY

SEQ ID NO: 2325 - DNA, 4371 bp, synthetic construct
  misc_feature 1..4371: note = Variant of human B-domain deleted Factor VIII
  source 1..4371: mol_type = other DNA
atgcagattgaactgtctacctgcttcttcctctgtttgctgaggttctgctttagcgccactagacggtactaccttggcgctgtggagctgtcctgggactatatgcagagtgatttgggagagcttcccgtcgacgcacgatttcctcctcgcgttccaaagtcatttccctttaacacaagccaggtgtacaagaagacgctcttcgtcgaattcaccgatcacctgttcaatatcgccaaacccagaccaccatggatgggtcttttggggcctaccatacaagcggaggtgtatgacacagttgttatcactctcaagaacatggcttctcatccggtaagtcttcacgcagtgggcgtgtcctactggaaagcttcagaaggagccgagtatgatgatcagacatcccagagggagaaagaagacgacaaggtatttccaggtgggtctcatacctatgtgtggcaagtgctcaaagagaatggccctatggccagcgatccgccgtgtttgacttacagctacctttcacacgttgacctcgtcaaggacctcaactccgggttgattggagccttgttggtatgcagggaaggatctcttgccaaagagaagacacagaccctggccaagtttatccttctctttgctgtgttcgatgagggcaaaagttggcatagcgaaacgaagaattccctcatgcaggatcgcgacgcagccagcgccagagcttggcccaagatgcacactgtgaacggatatgtcaataggacgcttcctggcttgattgggtgtcatcggaaaagtgtctactggcacgtgatcggaatggggacaacaccagaggtccactccatatttctcgaaggccataccttccttgttcgaaaccacagacaggcatccttggggatctctcccattacctttctcactgcccaaacgggtcttcgtgacttgggtcagttccttctcttttgccatatcccgtcacaccagcatgatggtatggaagcttatgtgaaagtcgacagttgtcctgaggagccacagttgcgcatgaagaataatgaagaagccgaggattacgacgacgatctcaccgattctgagatggacgtggtgaggtttgatgacgacaactctccctccatcattcaagctcggagcggggcgaagaaacaccccaagacttgggtccactatatagcggcggaagaggaggattgggattacgctcctcttgtattggcaccagatgaccgctcatacaaaagccagtacctcaacaacggaccgcagagaattggccggaagtataagaaagtgcgatttatggcctatacagacgaaacctttaagacaagggaggccatccagcatgagagtgggattttgggacctcttctttacggcgaagttggtgataccctcctcatcatcttcaagaatcaagcttctcgcccctataacatttacccacacgggatcactgacgttaggcctttgtatagcagaagacttcccaaaggcgtgaagcatctcaaagacttccccattttgccaggcgagatctttaagtacaaatggaccattacagtggaagatggaccgactaaatcggaccctcgatgccttacgcggtactattcctccttcgtgaattgggagagagatttggcaagcggactcataggaccactcctcatctgttacaaggaatctgtagaccagaggggtaaccagattatgagtgataaacgcaatgtgatcctttttagcgtcttcgacgagaaccggtcctggtacttgaccgagaatatacaaaggttccttcccaaccccgcaggcgttcagttggaagaccctgagtttcaggccagcaatattatgcactcaatcaacggctatgtgtttgatagtctccagctttctgtttgcctccatgaagtagcctattggtacatcttgtcaattggtgctcaaacagacttcctctccgtcttcttctccggctacacctttaagcacaagggcgtgtatgaggacactctcacactctttccattttctggagaaaccgtgttcatggaaatggagaatccaggcctttggatcttgggttgccacaacagtgattttcgcaatcggggaatgactgctctcctcaaagtcagcagctgtgattggaacacaggcgactatgaggaagattcttacgaggacataagtgcctactttgactccgagaataacgccattgagcccagatcattctcccagaatcctcccgtgcttaaaaggcatcagcgcgaaggtaccagaactactcttcagtctgatcaagaggagattgactatgacgacaccattagcgtggaaatgaagaaggaggatttcgatatctatgacgaagatgagaaccagtctccgcggagctttcagaagaagacgcgacactacttcattgcagcagtcgaaaggctttgggactacggtatgtcatcatcccctcatgtgttgcgcaatagagctcagagtggaagtgttccacagttcaagaaagtcgtctttcaagagtttacagatggcagcttcacacagcctctctatcggggcgagcttaacgaacatttgggactccttggtccctatatccgagccgaagtggaggacaacattatggttacctttaggaatcaagcctctcgcccctacagcttctactcctccctcatcagttatgaggaggatcagagacaaggcgctgaaccacggaagaactttgtgaaaccgaatgagacgaagacctacttctggaaagtacagcaccacatggcccccacaaaagacgaattcgattgcaaagcatgggcgtatttttcagacgttgacttggagaaagatgtacattcaggacttattggtcctttgttggtgtgtcacactaacactctcaatccagcccatggcaggcaggtgacagtccaggaattcgctcttttctttaccatctttgatgagaccaagtcctggtacttcacggaaaacatggagcgcaattgcagagccccctgtaacatacagatggaggaccctacctttaaggaaaattatcggttccacgcaatcaacggatacattatggatacactccctggccttgtgatggctcaggaccaacgaatcaggtggtacctcctcagcatgggttctaatgaaaacatacactccattcacttttcaggacatgtgttcactgtccggaagaaagaagagtataagatggccctctacaatttgtatccaggcgtgtttgagaccgttgaaatgcttccctctaaagctggcatctggagagtagagtgcttgatcggagaacatcttcacgcaggtatgagcaccttgttcctcgtgtacagcaacaaatgtcagaatccacttggcatggccagtggacacattcgcgactttcagatcacagcatctggccagtatggacaatgggccccaaagttggctcgcctccattactccggtagcataaatgcgtggtccactaaagaacctttcagctggattaaggtcgatcttcttgcccccatgatcatccacggcattaagacacagggagcgaggcagaaattctcctccctctacatctcacagttcattattatgtatagtttggacggcaagaagtggcaaacttatagaggtaacagtactggaacagacatggtgttcttcggcaacgttgatagctctggcatcaaacacaacatctttaatcctcccataatagctcggtacatcagattgcatccgacccactacagcattaggagtacactccgaatggagcttatgggttgcgacttgaattcctgttcaatgccactcggaatggagtctaaagccatctctgatgcacagataaccgccagtagctactttacgaacatgtttgctacgtggtcaccctctaaggcaaggcttcatttgcaaggccggtctaatgcctggagacctcaggtgaacaacccgaaagaatggctccaggtggactttcagaagaccatgaaagtaacaggtgtcactactcagggagttaagtccttggatactagcatgtatgtgaaggagttccttatttcctcatcacaagatggccaccagtggaccctcttctttcagaatggtaaggtcaaagtgtttcagggcaatcaagacagcttcacacccgtggtgaacagtcttgatcctccactcttgacacgataccttcgaatccatccacagtcttgggagcaccagattgcattgcgcatggaagtacttggatgcgaggctcaggacctctac

SEQ ID NO: 2326 - protein, 1457 aa, synthetic construct
  REGION 1..1457: note = Variant of human B-domain deleted Factor VIII
MQIELSTCFFLCLLRFCFSATRRYYLGAVELSWDYMQSDLGELPVDARFPPRVPKSFPFNTSQVYKKTLFVEFTDHLFNIAKPRPPWMGLLGPTIQAEVYDTVVITLKNMASHPVSLHAVGVSYWKASEGAEYDDQTSQREKEDDKVFPGGSHTYVWQVLKENGPMASDPPCLTYSYLSHVDLVKDLNSGLIGALLVCREGSLAKEKTQTLAKFILLFAVFDEGKSWHSETKNSLMQDRDAASARAWPKMHTVNGYVNRTLPGLIGCHRKSVYWHVIGMGTTPEVHSIFLEGHTFLVRNHRQASLGISPITFLTAQTGLRDLGQFLLFCHIPSHQHDGMEAYVKVDSCPEEPQLRMKNNEEAEDYDDDLTDSEMDVVRFDDDNSPSIIQARSGAKKHPKTWVHYIAAEEEDWDYAPLVLAPDDRSYKSQYLNNGPQRIGRKYKKVRFMAYTDETFKTREAIQHESGILGPLLYGEVGDTLLIIFKNQASRPYNIYPHGITDVRPLYSRRLPKGVKHLKDFPILPGEIFKYKWTITVEDGPTKSDPRCLTRYYSSFVNWERDLASGLIGPLLICYKESVDQRGNQIMSDKRNVILFSVFDENRSWYLTENIQRFLPNPAGVQLEDPEFQASNIMHSINGYVFDSLQLSVCLHEVAYWYILSIGAQTDFLSVFFSGYTFKHKGVYEDTLTLFPFSGETVFMEMENPGLWILGCHNSDFRNRGMTALLKVSSCDWNTGDYEEDSYEDISAYFDSENNAIEPRSFSQNPPVLKRHQREGTRTTLQSDQEEIDYDDTISVEMKKEDFDIYDEDENQSPRSFQKKTRHYFIAAVERLWDYGMSSSPHVLRNRAQSGSVPQFKKVVFQEFTDGSFTQPLYRGELNEHLGLLGPYIRAEVEDNIMVTFRNQASRPYSFYSSLISYEEDQRQGAEPRKNFVKPNETKTYFWKVQHHMAPTKDEFDCKAWAYFSDVDLEKDVHSGLIGPLLVCHTNTLNPAHGRQVTVQEFALFFTIFDETKSWYFTENMERNCRAPCNIQMEDPTFKENYRFHAINGYIMDTLPGLVMAQDQRIRWYLLSMGSNENIHSIHFSGHVFTVRKKEEYKMALYNLYPGVFETVEMLPSKAGIWRVECLIGEHLHAGMSTLFLVYSNKCQNPLGMASGHIRDFQITASGQYGQWAPKLARLHYSGSINAWSTKEPFSWIKVDLLAPMIIHGIKTQGARQKFSSLYISQFIIMYSLDGKKWQTYRGNSTGTDMVFFGNVDSSGIKHNIFNPPIIARYIRLHPTHYSIRSTLRMELMGCDLNSCSMPLGMESKAISDAQITASSYFTNMFATWSPSKARLHLQGRSNAWRPQVNNPKEWLQVDFQKTMKVTGVTTQGVKSLDTSMYVKEFLISSSQDGHQWTLFFQNGKVKVFQGNQDSFTPVVNSLDPPLLTRYLRIHPQSWEHQIALRMEVLGCEAQDLY

SEQ ID NO: 2327 - DNA, 4371 bp, synthetic construct
  misc_feature 1..4371: note = Variant of human B-domain deleted Factor VIII
  source 1..4371: mol_type = other DNA
atgcagattgaactgtctacctgcttcttcctctgtttgctgaggttctgctttagcgccactagacggtactaccttggcgctgtggagctgtcctgggactatatgcagagtgatttgggagagcttcccgtcgacgcacgatttcctcctcgcgttccaaagtcatttccctttaacacaagccaggtgtacaagaagacgctcttcgtcgaattcaccgatcacctgttcaatatcgccaaacccagaccaccatggatgggtcttttggggcctaccatacaagcggaggtgtatgacacagttgttatcactctcaagaacatggcttctcatccggtaagtcttcacgcagtgggcgtgtcctactggaaagcttcagaaggagccgagtatgatgatcagacatcccagagggagaaagaagacgacaaggtatttccaggtgggtctcatacctatgtgtggcaagtgctcaaagagaatggccctatggcaagcgatccgccgtgtttgacttacagctacctttcacacgttgacctcgtcaaggacctcaactccgggttgattggagccttgttggtatgcagggaaggatctcttgccaaagagaagacacagaccctggccaagtttatccttctctttgctgtgttcgatgagggcaaaagttggcatagcgaaacgaagaattccctcatgcaggatcgcgacgcagccagcgccagagcttggcccaagatgcacactgtgaacggatatgtcaataggacgcttcctggcttgattgggtgtcatcggaaaagtgtctactggcacgtgatcggaatggggacaacaccagaggtccactccatatttctcgaaggccataccttccttgttcgaaaccacagacaggcatccttggggatctctcccattacctttctcactgcccaaacgggtcttcgtgacttgggtcagttccttctcttttgccatatcccgtcacaccagcatgatggtatggaagcttatgtgaaagtcgacagttgtcctgaggagccacagttgcgcatgaagaataatgaagaagccgaggattacgacgacgatctcaccgattctgagatggacgtggtgaggtttgatgacgacaactctccctccatcattcaagctcggagcggggcgaagaaacaccccaagacttgggtccactatatagcggcggaagaggaggattgggattacgctcctcttgtattggcaccagatgaccgctcatacaaaagccagtacctcaacaacggaccgcagagaattggccggaagtataagaaagtgcgatttatggcctatacagacgaaacctttaagacaagggaggccatccagcatgagagtgggattttgggacctcttctttacggcgaagttggtgataccctcctcatcatcttcaagaatcaagcttctcgcccctataacatttacccacacgggatcactgacgttaggcctttgtatagcagaagacttcccaaaggcgtgaagcatctcaaagacttccccattttgccaggcgagatctttaagtacaaatggaccattacagtggaagatggaccgactaaatcggaccctcgatgccttacgcggtactattcctccttcgtgaattgggagagagatttggcaagcggactcataggaccactcctcatctgttacaaggaatctgtagaccagaggggtaaccagattatgagtgataaacgcaatgtgatcctttttagcgtcttcgacgagaaccggtcctggtacttgaccgagaatatacaaaggttccttcccaaccccgcaggcgttcagttggaagaccctgagtttcaggccagcaatattatgcactcaatcaacggctatgtgtttgatagtctccagctttctgtttgcctccatgaagtagcctattggtacatcttgtcaattggtgctcaaacagacttcctctccgtcttcttctccggctacacctttaagcacaagggcgtgtatgaggacactctcacactctttccattttctggagaaaccgtgttcatggagatggagaatccaggcctttggatcttgggttgccacaacagtgattttcgcaatcggggaatgactgctctcctcaaagtcagcagctgtgattggaacacaggcgactatgaggaagattcttacgaggacataagtgcctactttgactccgaaaataacgccattgagcccagatcattctcccagaatcctcccgtgcttaaaaggcatcagcgcgaaggtaccagaactactcttcagtctgatcaagaggagattgactatgacgacaccattagcgtggaaatgaagaaggaggatttcgatatctatgacgagagtgggaaccagtctccgcggagctttcagaagaagacgcgacactacttcattgcagcagtcgaaaggctttgggactacggtatgtcatcatcccctcatgtgttgcgcaatagagctcagagtggaagtgttccacagttcaagaaagtcgtctttcaagagtttacagatggcagcttcacacagcctctctatcggggcgagcttaacgaacatttgggactccttggtccctatatccgagccgaagtggaggacaacattatggttacctttaggaatcaagcctctcgcccctacagcttctactcctccctcatcagttatgaggaggatcagagacaaggcgctgaaccacggaagaactttgtgaaaccgaatgagacgaagacctacttctggaaagtacagcaccacatggcccccacaaaagacgaattcgattgcaaagcatgggcgtatttttcagacgttgacttggagaaagatgtacattcaggacttattggtcctttgttggtgtgtcacactaacactctcaatccagcccatggcaggcaggtgacagtccaggaattcgctcttttctttaccatctttgatgagaccaagtcctggtacttcacggaaaacatggagcgcaattgcagagccccctgtaacatacagatggaggaccctacctttaaggaaaattatcggttccacgcaatcaacggatacattatggatacactccctggccttgtgatggctcaggaccaacgaatcaggtggtacctcctcagcatgggttctaatgagaacatacactccattcacttttcaggacatgtgttcactgtccggaagggtgaagagtataagatggccctctacaatttgtatccaggcgtgtttgagaccgttgaaatgcttcccatcaaagctggcatctggagagtagagtgcttgatcggagaacatcttcacgcaggtatgagcaccttgttcctcgtgtacagcaacaaatgtcagaatccacttggcatggccagtggacacattcgcgactttcagatcacagcatctggccagtatggacaatgggccccaaagttggctcgcctccattactccggtagcataaatgcgtggtccactaaagaacctttcagctggattaaggtcgatcttcttgcccccatgatcatccacggcattaagacacagggagcgaggcagaaattctcctccctctacatctcacagttcattattatgtatagtttggacggcaagaagtggcaaacttatagaggtaacagtactggaacagacatggtgttcttcggcaacgttgatagctctggcatcaaacacaacatctttaatcctcccataatagctcggtacatcagattgcatccgacccactacagcattaggagtacactccgaatggagcttatgggttgcgacttgaattcctgttcaatgccactcggaatggagtctaaagccatctctgatgcacagataaccgccagtagctactttacgaacatgtttgctacgtggtcaccctctaaggcaaggcttcatttgcaaggccggtctaatgcctggagacctcaggtgaacaacccgaaagaatggctccaggtggactttcagaagaccatgaaagtaacaggtgtcactactcagggagttaagtccttggatactagcatgtatgtgaaggagttccttatttcctcatcacaagatggccaccagtggaccctcttctttcagaatggtaaggtcaaagtgtttcagggcaatcaagacagcttcacacccgtggtgaacagtcttgatcctccactcttgacacgataccttcgaatccatccacagtcttgggagcaccagattgcattgcgcatggaagtacttggatgcgaggctcaggacctctac

SEQ ID NO: 2328 - protein, 1457 aa, synthetic construct
  REGION 1..1457: note = Variant of human B-domain deleted Factor VIII
MQIELSTCFFLCLLRFCFSATRRYYLGAVELSWDYMQSDLGELPVDARFPPRVPKSFPFNTSQVYKKTLFVEFTDHLFNIAKPRPPWMGLLGPTIQAEVYDTVVITLKNMASHPVSLHAVGVSYWKASEGAEYDDQTSQREKEDDKVFPGGSHTYVWQVLKENGPMASDPPCLTYSYLSHVDLVKDLNSGLIGALLVCREGSLAKEKTQTLAKFILLFAVFDEGKSWHSETKNSLMQDRDAASARAWPKMHTVNGYVNRTLPGLIGCHRKSVYWHVIGMGTTPEVHSIFLEGHTFLVRNHRQASLGISPITFLTAQTGLRDLGQFLLFCHIPSHQHDGMEAYVKVDSCPEEPQLRMKNNEEAEDYDDDLTDSEMDVVRFDDDNSPSIIQARSGAKKHPKTWVHYIAAEEEDWDYAPLVLAPDDRSYKSQYLNNGPQRIGRKYKKVRFMAYTDETFKTREAIQHESGILGPLLYGEVGDTLLIIFKNQASRPYNIYPHGITDVRPLYSRRLPKGVKHLKDFPILPGEIFKYKWTITVEDGPTKSDPRCLTRYYSSFVNWERDLASGLIGPLLICYKESVDQRGNQIMSDKRNVILFSVFDENRSWYLTENIQRFLPNPAGVQLEDPEFQASNIMHSINGYVFDSLQLSVCLHEVAYWYILSIGAQTDFLSVFFSGYTFKHKGVYEDTLTLFPFSGETVFMEMENPGLWILGCHNSDFRNRGMTALLKVSSCDWNTGDYEEDSYEDISAYFDSENNAIEPRSFSQNPPVLKRHQREGTRTTLQSDQEEIDYDDTISVEMKKEDFDIYDESGNQSPRSFQKKTRHYFIAAVERLWDYGMSSSPHVLRNRAQSGSVPQFKKVVFQEFTDGSFTQPLYRGELNEHLGLLGPYIRAEVEDNIMVTFRNQASRPYSFYSSLISYEEDQRQGAEPRKNFVKPNETKTYFWKVQHHMAPTKDEFDCKAWAYFSDVDLEKDVHSGLIGPLLVCHTNTLNPAHGRQVTVQEFALFFTIFDETKSWYFTENMERNCRAPCNIQMEDPTFKENYRFHAINGYIMDTLPGLVMAQDQRIRWYLLSMGSNENIHSIHFSGHVFTVRKGEEYKMALYNLYPGVFETVEMLPIKAGIWRVECLIGEHLHAGMSTLFLVYSNKCQNPLGMASGHIRDFQITASGQYGQWAPKLARLHYSGSINAWSTKEPFSWIKVDLLAPMIIHGIKTQGARQKFSSLYISQFIIMYSLDGKKWQTYRGNSTGTDMVFFGNVDSSGIKHNIFNPPIIARYIRLHPTHYSIRSTLRMELMGCDLNSCSMPLGMESKAISDAQITASSYFTNMFATWSPSKARLHLQGRSNAWRPQVNNPKEWLQVDFQKTMKVTGVTTQGVKSLDTSMYVKEFLISSSQDGHQWTLFFQNGKVKVFQGNQDSFTPVVNSLDPPLLTRYLRIHPQSWEHQIALRMEVLGCEAQDLY

SEQ ID NO: 2329 - DNA, 4371 bp, synthetic construct
  misc_feature 1..4371: note = Variant of human B-domain deleted Factor VIII
  source 1..4371: mol_type = other DNA
atgcagattgaactgtctacctgcttcttcctctgtttgctgaggttctgctttagcgccactagacggtactaccttggcgctgtggagctgtcctgggactatatgcagagtgatttgggagagcttcccgtcgacgcacgatttcctcctcgcgttccaaagtcatttccctttaacacaagccaggtgtacaagaagacgctcttcgtcgaattcaccgatcacctgttcaatatcgccaaacccagaccaccatggatgggtcttttggggcctaccatacaagcggaggtgtatgacacagttgttatcactctcaagaacatggcttctcatccggtaagtcttcacgcagtgggcgtgtcctactggaaagcttcagaaggagccgagtatgatgatcagacatcccagagggagaaagaagacgacaaggtatttccaggtgggtctcatacctatgtgtggcaagtgctcaaagagaatggccctatggcaagcgatccgccgtgtttgacttacagctacctttcacacgttgacctcgtcaaggacctcaactccgggttgattggagccttgttggtatgcagggaaggatctcttgccaaagagaagacacagaccctggccaagtttatccttctctttgctgtgttcgatgagggcaaaagttggcatagcgaaacgaagaattccctcatgcaggatcgcgacgcagccagcgccagagcttggcccaagatgcacactgtgaacggatatgtcaataggacgcttcctggcttgattgggtgtcatcggaaaagtgtctactggcacgtgatcggaatggggacaacaccagaggtccactccatatttctcgaaggccataccttccttgttcgaaaccacagacaggcatccttggggatctctcccattacctttctcactgcccaaacgggtcttcgtgacttgggtcagttccttctcttttgccatatcccgtcacaccagcatgatggtatggaagcttatgtgaaagtcgacagttgtcctgaggagccacagttgcgcatgaagaataatgaagaagccgaggattacgacgacgatctcaccgattctgagatggacgtggtgaggtttgatgacgacaactctccctccatcattcaagctcggagcggggcgaagaaacaccccaagacttgggtccactatatagcggcggaagaggaggattgggattacgctcctcttgtattggcaccagatgaccgctcatacaaaagccagtacctcaacaacggaccgcagagaattggccggaagtataagaaagtgcgatttatggcctatacagacgaaacctttaagacaagggaggccatccagcatgagagtgggattttgggacctcttctttacggcgaagttggtgataccctcctcatcatcttcaagaatcaagcttctcgcccctataacatttacccacacgggatcactgacgttaggcctttgtatagcagaagacttcccaaaggcgtgaagcatctcaaagacttccccattttgccaggcgagatctttaagtacaaatggaccattacagtggaagatggaccgactaaatcggaccctcgatgccttacgcggtactattcctccttcgtgaattgggagagagatttggcaagcggactcataggaccactcctcatctgttacaaggaatctgtagaccagaggggtaaccagattatgagtgataaacgcaatgtgatcctttttagcgtcttcgacgagaaccggtcctggtacttgaccgagaatatacaaaggttccttcccaaccccgcaggcgttcagttggaagaccctgagtttcaggccagcaatattatgcactcaatcaacggctatgtgtttgatagtctccagctttctgtttgcctccatgaagtagcctattggtacatcttgtcaattggtgctcaaacagacttcctctccgtcttcttctccggctacacctttaagcacaagggcgtgtatgaggacactctcacactctttccattttctggagaaaccgtgttcatggagatggagaatccaggcctttggatcttgggttgccacaacagtgattttcgcaatcggggaatgactgctctcctcaaagtcagcagctgtgattggaacacaggcgactatgaggaagattcttacgaggacataagtgcctactttgactccgaaaataacgccattgagcccagatcattctcccagaatcctcccgtgcttaaaaggcatcagcgcgaaggtaccagaactactcttcagtctgatcaagaggagattgactatgacgacaccattagcgtggaaatgaagaaggaggatttcgatatctatgacgaagatgggaaccagtctccgcggagctttcagaagaagacgcgacactacttcattgcagcagtcgaaaggctttgggactacggtatgtcatcatcccctcatgtgttgcgcaatagagctcagagtggaagtgttccacagttcaagaaagtcgtctttcaagagtttacagatggcagcttcacacagcctctctatcggggcgagcttaacgaacatttgggactccttggtccctatatccgagccgaagtggaggacaacattatggttacctttaggaatcaagcctctcgcccctacagcttctactcctccctcatcagttatgaggaggatcagagacaaggcgctgaaccacggaagaactttgtgaaaccgaatgagacgaagacctacttctggaaagtacagcaccacatggcccccacaaaagacgaattcgattgcaaagcatgggcgtatttttcagacgttgacttggagaaagatgtacattcaggacttattggtcctttgttggtgtgtcacactaacactctcaatccagcccatggcaggcaggtgacagtccaggaattcgctcttttctttaccatctttgatgagaccaagtcctggtacttcacggaaaacatggagcgcaattgcagagccccctgtaacatacagatggaggaccctacctttaaggaaaattatcggttccacgcaatcaacggatacattatggatacactccctggccttgtgatggctcaggaccaacgaatcaggtggtacctcctcagcatgggttctaatgagaacatacactccattcacttttcaggacatgtgttcactgtccggaagggtgaagagtataagatggccctctacaatttgtatccaggcgtgtttgagaccgttgaaatgcttccctctaaagctggcatctggagagtagagtgcttgatcggagaacatcttcacgcaggtatgagcaccttgttcctcgtgtacagcaacaaatgtcagaatccacttggcatggccagtggacacattcgcgactttcagatcacagcatctggccagtatggacaatgggccccaaagttggctcgcctccattactccggtagcataaatgcgtggtccactaaagaacctttcagctggattaaggtcgatcttcttgcccccatgatcatccacggcattaagacacagggagcgaggcagaaattctcctccctctacatctcacagttcattattatgtatagtttggacggcaagaagtggcaaacttatagaggtaacagtactggaacagacatggtgttcttcggcaacgttgatagctctggcatcaaacacaacatctttaatcctcccataatagctcggtacatcagattgcatccgacccactacagcattaggagtacactccgaatggagcttatgggttgcgacttgaattcctgttcaatgccactcggaatggagtctaaagccatctctgatgcacagataaccgccagtagctactttacgaacatgtttgctacgtggtcaccctctaaggcaaggcttcatttgcaaggccggtctaatgcctggagacctcaggtgaacaacccgaaagaatggctccaggtggactttcagaagaccatgaaagtaacaggtgtcactactcagggagttaagtccttggatactagcatgtatgtgaaggagttccttatttcctcatcacaagatggccaccagtggaccctcttctttcagaatggtaaggtcaaagtgtttcagggcaatcaagacagcttcacacccgtggtgaacagtcttgatcctccactcttgacacgataccttcgaatccatccacagtcttgggagcaccagattgcattgcgcatggaagtacttggatgcgaggctcaggacctctac

SEQ ID NO: 2330 - protein, 1457 aa, synthetic construct
  REGION 1..1457: note = Variant of human B-domain deleted Factor VIII
MQIELSTCFFLCLLRFCFSATRRYYLGAVELSWDYMQSDLGELPVDARFPPRVPKSFPFNTSQVYKKTLFVEFTDHLFNIAKPRPPWMGLLGPTIQAEVYDTVVITLKNMASHPVSLHAVGVSYWKASEGAEYDDQTSQREKEDDKVFPGGSHTYVWQVLKENGPMASDPPCLTYSYLSHVDLVKDLNSGLIGALLVCREGSLAKEKTQTLAKFILLFAVFDEGKSWHSETKNSLMQDRDAASARAWPKMHTVNGYVNRTLPGLIGCHRKSVYWHVIGMGTTPEVHSIFLEGHTFLVRNHRQASLGISPITFLTAQTGLRDLGQFLLFCHIPSHQHDGMEAYVKVDSCPEEPQLRMKNNEEAEDYDDDLTDSEMDVVRFDDDNSPSIIQARSGAKKHPKTWVHYIAAEEEDWDYAPLVLAPDDRSYKSQYLNNGPQRIGRKYKKVRFMAYTDETFKTREAIQHESGILGPLLYGEVGDTLLIIFKNQASRPYNIYPHGITDVRPLYSRRLPKGVKHLKDFPILPGEIFKYKWTITVEDGPTKSDPRCLTRYYSSFVNWERDLASGLIGPLLICYKESVDQRGNQIMSDKRNVILFSVFDENRSWYLTENIQRFLPNPAGVQLEDPEFQASNIMHSINGYVFDSLQLSVCLHEVAYWYILSIGAQTDFLSVFFSGYTFKHKGVYEDTLTLFPFSGETVFMEMENPGLWILGCHNSDFRNRGMTALLKVSSCDWNTGDYEEDSYEDISAYFDSENNAIEPRSFSQNPPVLKRHQREGTRTTLQSDQEEIDYDDTISVEMKKEDFDIYDEDGNQSPRSFQKKTRHYFIAAVERLWDYGMSSSPHVLRNRAQSGSVPQFKKVVFQEFTDGSFTQPLYRGELNEHLGLLGPYIRAEVEDNIMVTFRNQASRPYSFYSSLISYEEDQRQGAEPRKNFVKPNETKTYFWKVQHHMAPTKDEFDCKAWAYFSDVDLEKDVHSGLIGPLLVCHTNTLNPAHGRQVTVQEFALFFTIFDETKSWYFTENMERNCRAPCNIQMEDPTFKENYRFHAINGYIMDTLPGLVMAQDQRIRWYLLSMGSNENIHSIHFSGHVFTVRKGEEYKMALYNLYPGVFETVEMLPSKAGIWRVECLIGEHLHAGMSTLFLVYSNKCQNPLGMASGHIRDFQITASGQYGQWAPKLARLHYSGSINAWSTKEPFSWIKVDLLAPMIIHGIKTQGARQKFSSLYISQFIIMYSLDGKKWQTYRGNSTGTDMVFFGNVDSSGIKHNIFNPPIIARYIRLHPTHYSIRSTLRMELMGCDLNSCSMPLGMESKAISDAQITASSYFTNMFATWSPSKARLHLQGRSNAWRPQVNNPKEWLQVDFQKTMKVTGVTTQGVKSLDTSMYVKEFLISSSQDGHQWTLFFQNGKVKVFQGNQDSFTPVVNSLDPPLLTRYLRIHPQSWEHQIALRMEVLGCEAQDLY

SEQ ID NO: 2331 - DNA, 4371 bp, synthetic construct
  misc_feature 1..4371: note = Variant of human B-domain deleted Factor VIII
  source 1..4371: mol_type = other DNA
atgcagattgaactgtctacctgcttcttcctctgtttgctgaggttctgctttagcgccactagacggtactaccttggcgctgtggagctgtcctgggactatatgcagagtgatttgggagagcttcccgtcgacgcacgatttcctcctcgcgttccaaagtcatttccctttaacacaagccaggtgtacaagaagacgctcttcgtcgaattcaccgatcacctgttcaatatcgccaaacccagaccaccatggatgggtcttttggggcctaccatacaagcggaggtgtatgacacagttgttatcactctcaagaacatggcttctcatccggtaagtcttcacgcagtgggcgtgtcctactggaaagcttcagaaggagccgagtatgatgatcagacatcccagagggagaaagaagacgacaaggtatttccaggtgggtctcatacctatgtgtggcaagtgctcaaagagaatggccctatggccagcgatccgccgtgtttgacttacagctacctttcacacgttgacctcgtcaaggacctcaactccgggttgattggagccttgttggtatgcagggaaggatctcttgccaaagagaagacacagaccctggccaagtttatccttctctttgctgtgttcgatgagggcaaaagttggcatagcgaaacgaagaattccctcatgcaggatcgcgacgcagccagcgccagagcttggcccaagatgcacactgtgaacggatatgtcaataggacgcttcctggcttgattgggtgtcatcggaaaagtgtctactggcacgtgatcggaatggggacaacaccagaggtccactccatatttctcgaaggccataccttccttgttcgaaaccacagacaggcatccttggggatctctcccattacctttctcactgcccaaacgggtcttcgtgacttgggtcagttccttctcttttgccatatcccgtcacaccagcatgatggtatggaagcttatgtgaaagtcgacagttgtcctgaggagccacagttgcgcatgaagaataatgaagaagccgaggattacgacgacgatctcaccgattctgagatggacgtggtgaggtttgatgacgacaactctccctccatcattcaagctcggagcggggcgaagaaacaccccaagacttgggtccactatatagcggcggaagaggaggattgggattacgctcctcttgtattggcaccagatgaccgctcatacaaaagccagtacctcaacaacggaccgcagagaattggccggaagtataagaaagtgcgatttatggcctatacagacgaaacctttaagacaagggaggccatccagcatgagagtgggattttgggacctcttctttacggcgaagttggtgataccctcctcatcatcttcaagaatcaagcttctcgcccctataacatttacccacacgggatcactgacgttaggcctttgtatagcagaagacttcccaaaggcgtgaagcatctcaaagacttccccattttgccaggcgagatctttaagtacaaatggaccattacagtggaagatggaccgactaaatcggaccctcgatgccttacgcggtactattcctccttcgtgaattgggagagagatttggcaagcggactcataggaccactcctcatctgttacaaggaatctgtagaccagaggggtaaccagattatgagtgataaacgcaatgtgatcctttttagcgtcttcgacgagaaccggtcctggtacttgaccgagaatatacaaaggttccttcccaaccccgcaggcgttcagttggaagaccctgagtttcaggccagcaatattatgcactcaatcaacggctatgtgtttgatagtctccagctttctgtttgcctccatgaagtagcctattggtacatcttgtcaattggtgctcaaacagacttcctctccgtcttcttctccggctacacctttaagcacaagggggtgtatgaggacactctcacactctttccattttctggagaaaccgtgttcatggagatggagaatccaggcctttggatcttgggttgccacaacagtgattttcgcaatcggggaatgactgctctcctcaaagtcagcagctgtgattggaacacaggcgactatgaggaagattcttacgaggacataagtgcctactttgactccgaaaataacgccattgagcccagatcattctcccagaatcctcccgtgcttaaaaggcatcagcgcgaaggtaccagaactactcttcagtctgatcaagaggagattgactatgacgacaccattagcgtggaaatgaagagtgaggatttcgatatctatgacgaagatgagaaccagtctccgcggagctttcagaagaagacgcgacactacttcattgcagcagtcgaaaggctttgggactacggtatgtcatcatcccctcatgtgttgcgcaatagagctcagagtggaagtgttccacagttcaagaaagtcgtctttcaagagtttacagatggcagcttcacacagcctctctatcggggcgagcttaacgaacatttgggactccttggtccctatatccgagccgaagtggaggacaacattatggttacctttaggaatcaagcctctcgcccctacagcttctactcctccctcatcagttatgaggaggatcagagacaaggcgctgaaccacggaagaactttgtgaaaccgaatgagacgaagacctacttctggaaagtacagcaccacatggcccccacaaaagacgaattcgattgcaaagcatgggcgtatttttcagacgttgacttggagaaagatgtacattcaggacttattggtcctttgttggtgtgtcacactaacactctcaatccagcccatggcaggcaggtgacagtccaggaattcgctcttttctttaccatctttgatgagaccaagtcctggtacttcacggaaaacatggagcgcaattgcagagccccctgtaacatacagatggaggaccctacctttaaggaaaattatcggttccacgcaatcaacggatacattatggatacactccctggccttgtgatggctcaggaccaacgaatcaggtggtacctcctcagcatgggttctaatgagaacatacactccattcacttttcaggacatgtgttcactgtccggaagaaagaagagtataagatggccctctacaatttgtatccaggcgtgtttgagaccgttgaaatgcttcccatcaaagctggcatctggagagtagagtgcttgatcggagaacatcttcacgcaggtatgagcaccttgttcctcgtgtacagcaacaaatgtcagaatccacttggcatggccagtggacacattcgcgactttcagatcacagcatctggccagtatggacaatgggccccaaagttggctcgcctccattactccggtagcataaatgcgtggtccactaaagaacctttcagctggattaaggtcgatcttcttgcccccatgatcatccacggcattaagacacagggagcgaggcagaaattctcctccctctacatctcacagttcattattatgtatagtttggacggcaagaagtggcaaacttatagaggtaacagtactggaacagacatggtgttcttcggcaacgttgatagctctggcatcaaacacaacatctttaatcctcccataatagctcggtacatcagattgcatccgacccactacagcattaggagtacactccgaatggagcttatgggttgcgacttgaattcctgttcaatgccactcggaatggagtctaaagccatctctgatgcacagataaccgccagtagctactttacgaacatgtttgctacgtggtcaccctctaaggcaaggcttcatttgcaaggccggtctaatgcctggagacctcaggtgaacaacccgaaagaatggctccaggtggactttcagaagaccatgaaagtaacaggtgtcactactcagggagttaagtccttggatactagcatgtatgtgaaggagttccttatttcctcatcacaagatggccaccagtggaccctcttctttcagaatggtaaggtcaaagtgtttcagggcaatcaagacagcttcacacccgtggtgaacagtcttgatcctccactcttgacacgataccttcgaatccatccacagtcttgggagcaccagattgcattgcgcatggaagtacttggatgcgaggctcaggacctctac

SEQ ID NO: 2332 - protein, 1457 aa, synthetic construct
  REGION 1..1457: note = Variant of human B-domain deleted Factor VIII
MQIELSTCFFLCLLRFCFSATRRYYLGAVELSWDYMQSDLGELPVDARFPPRVPKSFPFNTSQVYKKTLFVEFTDHLFNIAKPRPPWMGLLGPTIQAEVYDTVVITLKNMASHPVSLHAVGVSYWKASEGAEYDDQTSQREKEDDKVFPGGSHTYVWQVLKENGPMASDPPCLTYSYLSHVDLVKDLNSGLIGALLVCREGSLAKEKTQTLAKFILLFAVFDEGKSWHSETKNSLMQDRDAASARAWPKMHTVNGYVNRTLPGLIGCHRKSVYWHVIGMGTTPEVHSIFLEGHTFLVRNHRQASLGISPITFLTAQTGLRDLGQFLLFCHIPSHQHDGMEAYVKVDSCPEEPQLRMKNNEEAEDYDDDLTDSEMDVVRFDDDNSPSIIQARSGAKKHPKTWVHYIAAEEEDWDYAPLVLAPDDRSYKSQYLNNGPQRIGRKYKKVRFMAYTDETFKTREAIQHESGILGPLLYGEVGDTLLIIFKNQASRPYNIYPHGITDVRPLYSRRLPKGVKHLKDFPILPGEIFKYKWTITVEDGPTKSDPRCLTRYYSSFVNWERDLASGLIGPLLICYKESVDQRGNQIMSDKRNVILFSVFDENRSWYLTENIQRFLPNPAGVQLEDPEFQASNIMHSINGYVFDSLQLSVCLHEVAYWYILSIGAQTDFLSVFFSGYTFKHKGVYEDTLTLFPFSGETVFMEMENPGLWILGCHNSDFRNRGMTALLKVSSCDWNTGDYEEDSYEDISAYFDSENNAIEPRSFSQNPPVLKRHQREGTRTTLQSDQEEIDYDDTISVEMKSEDFDIYDEDENQSPRSFQKKTRHYFIAAVERLWDYGMSSSPHVLRNRAQSGSVPQFKKVVFQEFTDGSFTQPLYRGELNEHLGLLGPYIRAEVEDNIMVTFRNQASRPYSFYSSLISYEEDQRQGAEPRKNFVKPNETKTYFWKVQHHMAPTKDEFDCKAWAYFSDVDLEKDVHSGLIGPLLVCHTNTLNPAHGRQVTVQEFALFFTIFDETKSWYFTENMERNCRAPCNIQMEDPTFKENYRFHAINGYIMDTLPGLVMAQDQRIRWYLLSMGSNENIHSIHFSGHVFTVRKKEEYKMALYNLYPGVFETVEMLPIKAGIWRVECLIGEHLHAGMSTLFLVYSNKCQNPLGMASGHIRDFQITASGQYGQWAPKLARLHYSGSINAWSTKEPFSWIKVDLLAPMIIHGIKTQGARQKFSSLYISQFIIMYSLDGKKWQTYRGNSTGTDMVFFGNVDSSGIKHNIFNPPIIARYIRLHPTHYSIRSTLRMELMGCDLNSCSMPLGMESKAISDAQITASSYFTNMFATWSPSKARLHLQGRSNAWRPQVNNPKEWLQVDFQKTMKVTGVTTQGVKSLDTSMYVKEFLISSSQDGHQWTLFFQNGKVKVFQGNQDSFTPVVNSLDPPLLTRYLRIHPQSWEHQIALRMEVLGCEAQDLY

SEQ ID NO: 2333 - DNA, 4371 bp, synthetic construct
  misc_feature 1..4371: note = Variant of human B-domain deleted Factor VIII
  source 1..4371: mol_type = other DNA
atgcagattgaactgtctacctgcttcttcctctgtttgctgaggttctgctttagcgccactagacggtactaccttggcgctgtggagctgtcctgggactatatgcagagtgatttgggagagcttcccgtcgacgcacgatttcctcctcgcgttccaaagtcatttccctttaacacaagccaggtgtacaagaagacgctcttcgtcgaattcaccgatcacctgttcaatatcgccaaacccagaccaccatggatgggtcttttggggcctaccatacaagcggaggtgtatgacacagttgttatcactctcaagaacatggcttctcatccggtaagtcttcacgcagtgggcgtgtcctactggaaagcttcagaaggagccgagtatgatgatcagacatcccagagggagaaagaagacgacaaggtatttccaggtgggtctcatacctatgtgtggcaagtgctcaaagagaatggccctatggccagcgatccgccgtgtttgacttacagctacctttcacacgttgacctcgtcaaggacctcaactccgggttgattggagccttgttggtatgcagggaaggatctcttgccaaagagaagacacagaccctggccaagtttatccttctctttgctgtgttcgatgagggcaaaagttggcatagcgaaacgaagaattccctcatgcaggatcgcgacgcagccagcgccagagcttggcccaagatgcacactgtgaacggatatgtcaataggacgcttcctggcttgattgggtgtcatcggaaaagtgtctactggcacgtgatcggaatggggacaacaccagaggtccactccatatttctcgaaggccataccttccttgttcgaaaccacagacaggcatccttggggatctctcccattacctttctcactgcccaaacgggtcttcgtgacttgggtcagttccttctcttttgccatatcccgtcacaccagcatgatggtatggaagcttatgtgaaagtcgacagttgtcctgaggagccacagttgcgcatgaagaataatgaagaagccgaggattacgacgacgatctcaccgattctgagatggacgtggtgaggtttgatgacgacaactctccctccatcattcaagctcggagcggggcgaagaaacaccccaagacttgggtccactatatagcggcggaagaggaggattgggattacgctcctcttgtattggcaccagatgaccgctcatacaaaagccagtacctcaacaacggaccgcagagaattggccggaagtataagaaagtgcgatttatggcctatacagacgaaacctttaagacaagggaggccatccagcatgagagtgggattttgggacctcttctttacggcgaagttggtgataccctcctcatcatcttcaagaatcaagcttctcgcccctataacatttacccacacgggatcactgacgttaggcctttgtatagcagaagacttcccaaaggcgtgaagcatctcaaagacttccccattttgccaggcgagatctttaagtacaaatggaccattacagtggaagatggaccgactaaatcagaccctcgatgccttacgcggtactattcctccttcgtgaattgggagagagatttggcaagcggactcataggaccactcctcatctgttacaaggaatctgtagaccagaggggtaaccagattatgagtgataaacgcaatgtgatcctttttagcgtcttcgacgagaaccggtcctggtacttgaccgagaatatacaaaggttccttcccaaccccgcaggcgttcagttggaagaccctgagtttcaggccagcaatattatgcactcaatcaacggctatgtgtttgatagtctccagctttctgtttgcctccatgaagtagcctattggtacatcttgtcaattggtgctcaaacagacttcctctccgtcttcttctccggctacacctttaagcacaagggcgtgtatgaggacactctcacactctttccattttctggagaaaccgtgttcatggaaatggagaatccaggcctttggatcttgggttgccacaacagtgattttcgcaatcggggaatgactgctctcctcaaagtcagcagctgtgattggaacacaggcgactatgaagaggattcttacgaggacataagtgcctactttgactccgagaataacgccattgagcccagatcattctcccagaatcctcccgtgcttaaaaggcatcagcgcgaaggtaccagaactactcttcagtctgatcaagaggagattgactatgacgacaccattagcgtggaaatgaagaaggaagatttcgatatccaggacgaggacgggaaccagtctccgcggagctttcagaagaagacgcgacactacttcattgcagcagtcgaaaggctttgggactacggtatgtcatcatcccctcatgtgttgcgcaatagagctcagagtggaagtgttccacagttcaagaaagtcgtctttcaagagtttacagatggcagcttcacacagcctctctatcggggcgagcttaacgaacatttgggactccttggtccctatatccgagccgaagtggaggacaacattatggttacctttaggaatcaagcctctcgcccctacagcttctactcctccctcatcagttatgaggaggatcagagacaaggcgctgaaccacggaagaactttgtgaaaccgaatgagacgaagacctacttctggaaagtacagcaccacatggcccccacaaaagacgaattcgattgcaaagcatgggcgtatttttcagacgttgacttggagaaagatgtacattcaggacttattggtcctttgttggtgtgtcacactaacactctcaatccagcccatggcaggcaggtgacagtccaggaattcgctcttttctttaccatctttgatgagaccaagtcctggtacttcacggaaaacatggagcgcaattgcagagccccctgtaacatacagatggaggaccctacctttaaggaaaattatcggttccacgcaatcaacggatacattatggatacactccctggccttgtgatggctcaggaccaacgaatcaggtggtacctcctcagcatgggttctaatgaaaacatacactccattcacttttcaggacatgtgttcactgtccggaaggcggaagagtataagatggccctctacaatttgtatccaggcgtgtttgagaccgttgaaatgcttccctctaaagctggcatctggagagtagagtgcttgatcggagaacatcttcacgcaggtatgagcaccttgttcctcgtgtacagcaacaaatgtcagaatccacttggcatggccagtggacacattcgcgactttcagatcacagcatctggccagtatggacaatgggccccaaagttggctcgcctccattactccggtagcataaatgcgtggtccactaaagaacctttcagctggattaaggtcgatcttcttgcccccatgatcatccacggcattaagacacagggagcgaggcagaaattctcctccctctacatctcacagttcattattatgtatagtttggacggcaagaagtggcaaacttatagaggtaacagtactggaacagacatggtgttcttcggcaacgttgatagctctggcatcaaacacaacatctttaatcctcccataatagctcggtacatcagattgcatccgacccactacagcattaggagtacactccgaatggagcttatgggttgcgacttgaattcctgttcaatgccactcggaatggagtctaaagccatctctgatgcacagataaccgccagtagctactttacgaacatgtttgctacgtggtcaccctctaaggcaaggcttcatttgcaaggccggtctaatgcctggagacctcaggtgaacaacccgaaagaatggctccaggtggactttcagaagaccatgaaagtaacaggtgtcactactcagggagttaagtccttggatactagcatgtatgtgaaggagttccttatttcctcatcacaagatggccaccagtggaccctcttctttcagaatggtaaggtcaaagtgtttcagggcaatcaagacagcttcacacccgtggtgaacagtcttgatcctccactcttgacacgataccttcgaatccatccacagtcttgggagcaccagattgcattgcgcatggaagtacttggatgcgaggctcaggacctctac

SEQ ID NO: 2334 - protein, 1457 aa, synthetic construct
  REGION 1..1457: note = Variant of human B-domain deleted Factor VIII
MQIELSTCFFLCLLRFCFSATRRYYLGAVELSWDYMQSDLGELPVDARFPPRVPKSFPFNTSQVYKKTLFVEFTDHLFNIAKPRPPWMGLLGPTIQAEVYDTVVITLKNMASHPVSLHAVGVSYWKASEGAEYDDQTSQREKEDDKVFPGGSHTYVWQVLKENGPMASDPPCLTYSYLSHVDLVKDLNSGLIGALLVCREGSLAKEKTQTLAKFILLFAVFDEGKSWHSETKNSLMQDRDAASARAWPKMHTVNGYVNRTLPGLIGCHRKSVYWHVIGMGTTPEVHSIFLEGHTFLVRNHRQASLGISPITFLTAQTGLRDLGQFLLFCHIPSHQHDGMEAYVKVDSCPEEPQLRMKNNEEAEDYDDDLTDSEMDVVRFDDDNSPSIIQARSGAKKHPKTWVHYIAAEEEDWDYAPLVLAPDDRSYKSQYLNNGPQRIGRKYKKVRFMAYTDETFKTREAIQHESGILGPLLYGEVGDTLLIIFKNQASRPYNIYPHGITDVRPLYSRRLPKGVKHLKDFPILPGEIFKYKWTITVEDGPTKSDPRCLTRYYSSFVNWERDLASGLIGPLLICYKESVDQRGNQIMSDKRNVILFSVFDENRSWYLTENIQRFLPNPAGVQLEDPEFQASNIMHSINGYVFDSLQLSVCLHEVAYWYILSIGAQTDFLSVFFSGYTFKHKGVYEDTLTLFPFSGETVFMEMENPGLWILGCHNSDFRNRGMTALLKVSSCDWNTGDYEEDSYEDISAYFDSENNAIEPRSFSQNPPVLKRHQREGTRTTLQSDQEEIDYDDTISVEMKKEDFDIQDEDGNQSPRSFQKKTRHYFIAAVERLWDYGMSSSPHVLRNRAQSGSVPQFKKVVFQEFTDGSFTQPLYRGELNEHLGLLGPYIRAEVEDNIMVTFRNQASRPYSFYSSLISYEEDQRQGAEPRKNFVKPNETKTYFWKVQHHMAPTKDEFDCKAWAYFSDVDLEKDVHSGLIGPLLVCHTNTLNPAHGRQVTVQEFALFFTIFDETKSWYFTENMERNCRAPCNIQMEDPTFKENYRFHAINGYIMDTLPGLVMAQDQRIRWYLLSMGSNENIHSIHFSGHVFTVRKAEEYKMALYNLYPGVFETVEMLPSKAGIWRVECLIGEHLHAGMSTLFLVYSNKCQNPLGMASGHIRDFQITASGQYGQWAPKLARLHYSGSINAWSTKEPFSWIKVDLLAPMIIHGIKTQGARQKFSSLYISQFIIMYSLDGKKWQTYRGNSTGTDMVFFGNVDSSGIKHNIFNPPIIARYIRLHPTHYSIRSTLRMELMGCDLNSCSMPLGMESKAISDAQITASSYFTNMFATWSPSKARLHLQGRSNAWRPQVNNPKEWLQVDFQKTMKVTGVTTQGVKSLDTSMYVKEFLISSSQDGHQWTLFFQNGKVKVFQGNQDSFTPVVNSLDPPLLTRYLRIHPQSWEHQIALRMEVLGCEAQDLY

SEQ ID NO: 2335 - DNA, 4371 bp, synthetic construct
  misc_feature 1..4371: note = Variant of human B-domain deleted Factor VIII
  source 1..4371: mol_type = other DNA
atgcagattgaactgtctacctgcttcttcctctgtttgctgaggttctgctttagcgccactagacggtactaccttggcgctgtggagctgtcctgggactatatgcagagtgatttgggagagcttcccgtcgacgcacgatttcctcctcgcgttccaaagtcatttccctttaacacaagccaggtgtacaagaagacgctcttcgtcgaattcaccgatcacctgttcaatatcgccaaacccagaccaccatggatgggtcttttggggcctaccatacaagcggaggtgtatgacacagttgttatcactctcaagaacatggcttctcatccggtaagtcttcacgcagtgggcgtgtcctactggaaagcttcagaaggagccgagtatgatgatcagacatcccagagggagaaagaagacgacaaggtatttccaggtgggtctcatacctatgtgtggcaagtgctcaaagagaatggccctatggcaagcgatccgccgtgtttgacttacagctacctttcacacgttgacctcgtcaaggacctcaactccgggttgattggagccttgttggtatgcagggaaggatctcttgccaaagagaagacacagaccctggccaagtttatccttctctttgctgtgttcgatgagggcaaaagttggcatagcgaaacgaagaattccctcatgcaggatcgcgacgcagccagcgccagagcttggcccaagatgcacactgtgaacggatatgtcaataggacgcttcctggcttgattgggtgtcatcggaaaagtgtctactggcacgtgatcggaatggggacaacaccagaggtccactccatatttctcgaaggccataccttccttgttcgaaaccacagacaggcatccttggggatctctcccattacctttctcactgcccaaacgggtcttcgtgacttgggtcagttccttctcttttgccatatcccgtcacaccagcatgatggtatggaagcttatgtgaaagtcgacagttgtcctgaggagccacagttgcgcatgaagaataatgaagaagccgaggattacgacgacgatctcaccgattctgagatggacgtggtgaggtttgatgacgacaactctccctccatcattcaagctcggagcggggcgaagaaacaccccaagacttgggtccactatatagcggcggaagaggaggattgggattacgctcctcttgtattggcaccagatgaccgctcatacaaaagccagtacctcaacaacggaccgcagagaattggccggaagtataagaaagtgcgatttatggcctatacagacgaaacctttaagacaagggaggccatccagcatgagagtgggattttgggacctcttctttacggcgaagttggtgataccctcctcatcatcttcaagaatcaagcttctcgcccctataacatttacccacacgggatcactgacgttaggcctttgtatagcagaagacttcccaaaggcgtgaagcatctcaaagacttccccattttgccaggcgagatctttaagtacaaatggaccattacagtggaagatggaccgactaaatcggaccctcgatgccttacgcggtactattcctccttcgtgaattgggagagagatttggcaagcggactcataggaccactcctcatctgttacaaggaatctgtagaccagaggggtaaccagattatgagtgataaacgcaatgtgatcctttttagcgtcttcgacgagaaccggtcctggtacttgaccgagaatatacaaaggttccttcccaaccccgcaggcgttcagttggaagaccctgagtttcaggccagcaatattatgcactcaatcaacggctatgtgtttgatagtctccagctttctgtttgcctccatgaagtagcctattggtacatcttgtcaattggtgctcaaacagacttcctctccgtcttcttctccggctacacctttaagcacaagggggtgtatgaggacactctcacactctttccattttctggagaaaccgtgttcatggagatggagaatccaggcctttggatcttgggttgccacaacagtgattttcgcaatcggggaatgactgctctcctcaaagtcagcagctgtgattggaacacaggcgactatgaggaagattcttacgaggacataagtgcctactttgactccaagaataacgccattgagcccagatcattctcccagaatcctcccgtgcttaaaaggcatcagcgcgaaggtaccagaactactcttcagtctgatcaagaggagattgactatgacgacaccattagcgtggaaatgaagagtgtggatttcgatatctatgacgaggatgagaaccagtctccgcggagctttcagaagaagacgcgacactacttcattgcagcagtcgaaaggctttgggactacggtatgtcatcatcccctcatgtgttgcgcaatagagctcagagtggaagtgttccacagttcaagaaagtcgtctttcaagagtttacagatggcagcttcacacagcctctctatcggggcgagcttaacgaacatttgggactccttggtccctatatccgagccgaagtggaggacaacattatggttacctttaggaatcaagcctctcgcccctacagcttctactcctccctcatcagttatgaggaggatcagagacaaggcgctgaaccacggaagaactttgtgaaaccgaatgagacgaagacctacttctggaaagtacagcaccacatggcccccacaaaagacgaattcgattgcaaagcatgggcgtatttttcagacgttgacttggagaaagatgtacattcaggacttattggtcctttgttggtgtgtcacactaacactctcaatccagcccatggcaggcaggtgacagtccaggaattcgctcttttctttaccatctttgatgagaccaagtcctggtacttcacggaaaacatggagcgcaattgcagagccccctgtaacatacagatggaggaccctacctttaaggaaaattatcggttccacgcaatcaacggatacattatggatacactccctggccttgtgatggctcaggaccaacgaatcaggtggtacctcctcagcatgggttctaatgagaacatacactccattcacttttcaggacatgtgttcactgtccggaagaaagaagagtataagatggccctctacaatttgtatccaggcgtgtttgagaccgttgaaatgcttccctctaaagctggcatctggagagtagagtgcttgatcggagaacatcttcacgcaggtatgagcaccttgttcctcgtgtacagcaacaaatgtcagaatccacttggcatggccagtggacacattcgcgactttcagatcacagcatctggccagtatggacaatgggccccaaagttggctcgcctccattactccggtagcataaatgcgtggtccactaaagaacctttcagctggattaaggtcgatcttcttgcccccatgatcatccacggcattaagacacagggagcgaggcagaaattctcctccctctacatctcacagttcattattatgtatagtttggacggcaagaagtggcaaacttatagaggtaacagtactggaacagacatggtgttcttcggcaacgttgatagctctggcatcaaacacaacatctttaatcctcccataatagctcggtacatcagattgcatccgacccactacagcattaggagtacactccgaatggagcttatgggttgcgacttgaattcctgttcaatgccactcggaatggagtctaaagccatctctgatgcacagataaccgccagtagctactttacgaacatgtttgctacgtggtcaccctctaaggcaaggcttcatttgcaaggccggtctaatgcctggagacctcaggtgaacaacccgaaagaatggctccaggtggactttcagaagaccatgaaagtaacaggtgtcactactcagggagttaagtccttggatactagcatgtatgtgaaggagttccttatttcctcatcacaagatggccaccagtggaccctcttctttcagaatggtaaggtcaaagtgtttcagggcaatcaagacagcttcacacccgtggtgaacagtcttgatcctccactcttgacacgataccttcgaatccatccacagtcttgggagcaccagattgcattgcgcatggaagtacttggatgcgaggctcaggacctctac

SEQ ID NO: 2336 - protein, 1457 aa, synthetic construct
  REGION 1..1457: note = Variant of human B-domain deleted Factor VIII
MQIELSTCFFLCLLRFCFSATRRYYLGAVELSWDYMQSDLGELPVDARFPPRVPKSFPFNTSQVYKKTLFVEFTDHLFNIAKPRPPWMGLLGPTIQAEVYDTVVITLKNMASHPVSLHAVGVSYWKASEGAEYDDQTSQREKEDDKVFPGGSHTYVWQVLKENGPMASDPPCLTYSYLSHVDLVKDLNSGLIGALLVCREGSLAKEKTQTLAKFILLFAVFDEGKSWHSETKNSLMQDRDAASARAWPKMHTVNGYVNRTLPGLIGCHRKSVYWHVIGMGTTPEVHSIFLEGHTFLVRNHRQASLGISPITFLTAQTGLRDLGQFLLFCHIPSHQHDGMEAYVKVDSCPEEPQLRMKNNEEAEDYDDDLTDSEMDVVRFDDDNSPSIIQARSGAKKHPKTWVHYIAAEEEDWDYAPLVLAPDDRSYKSQYLNNGPQRIGRKYKKVRFMAYTDETFKTREAIQHESGILGPLLYGEVGDTLLIIFKNQASRPYNIYPHGITDVRPLYSRRLPKGVKHLKDFPILPGEIFKYKWTITVEDGPTKSDPRCLTRYYSSFVNWERDLASGLIGPLLICYKESVDQRGNQIMSDKRNVILFSVFDENRSWYLTENIQRFLPNPAGVQLEDPEFQASNIMHSINGYVFDSLQLSVCLHEVAYWYILSIGAQTDFLSVFFSGYTFKHKGVYEDTLTLFPFSGETVFMEMENPGLWILGCHNSDFRNRGMTALLKVSSCDWNTGDYEEDSYEDISAYFDSKNNAIEPRSFSQNPPVLKRHQREGTRTTLQSDQEEIDYDDTISVEMKSVDFDIYDEDENQSPRSFQKKTRHYFIAAVERLWDYGMSSSPHVLRNRAQSGSVPQFKKVVFQEFTDGSFTQPLYRGELNEHLGLLGPYIRAEVEDNIMVTFRNQASRPYSFYSSLISYEEDQRQGAEPRKNFVKPNETKTYFWKVQHHMAPTKDEFDCKAWAYFSDVDLEKDVHSGLIGPLLVCHTNTLNPAHGRQVTVQEFALFFTIFDETKSWYFTENMERNCRAPCNIQMEDPTFKENYRFHAINGYIMDTLPGLVMAQDQRIRWYLLSMGSNENIHSIHFSGHVFTVRKKEEYKMALYNLYPGVFETVEMLPSKAGIWRVECLIGEHLHAGMSTLFLVYSNKCQNPLGMASGHIRDFQITASGQYGQWAPKLARLHYSGSINAWSTKEPFSWIKVDLLAPMIIHGIKTQGARQKFSSLYISQFIIMYSLDGKKWQTYRGNSTGTDMVFFGNVDSSGIKHNIFNPPIIARYIRLHPTHYSIRSTLRMELMGCDLNSCSMPLGMESKAISDAQITASSYFTNMFATWSPSKARLHLQGRSNAWRPQVNNPKEWLQVDFQKTMKVTGVTTQGVKSLDTSMYVKEFLISSSQDGHQWTLFFQNGKVKVFQGNQDSFTPVVNSLDPPLLTRYLRIHPQSWEHQIALRMEVLGCEAQDLY

SEQ ID NO: 2337 - DNA, 4371 bp, synthetic construct
  misc_feature 1..4371: note = Variant of human B-domain deleted Factor VIII
  source 1..4371: mol_type = other DNA
atgcagattgaactgtctacctgcttcttcctctgtttgctgaggttctgctttagcgccactagacggtactaccttggcgctgtggagctgtcctgggactatatgcagagtgatttgggagagcttcccgtcgacgcacgatttcctcctcgcgttccaaagtcatttccctttaacacaagccaggtgtacaagaagacgctcttcgtcgaattcaccgatcacctgttcaatatcgccaaacccagaccaccatggatgggtcttttggggcctaccatacaagcggaggtgtatgacacagttgttatcactctcaagaacatggcttctcatccggtaagtcttcacgcagtgggcgtgtcctactggaaagcttcagaaggagccgagtatgatgatcagacatcccagagggagaaagaagacgacaaggtatttccaggtgggtctcatacctatgtgtggcaagtgctcaaagagaatggccctatggcaagcgatccgccgtgtttgacttacagctacctttcacacgttgacctcgtcaaggacctcaactccgggttgattggagccttgttggtatgcagggaaggatctcttgccaaagagaagacacagaccctggccaagtttatccttctctttgctgtgttcgatgagggcaaaagttggcatagcgaaacgaagaattccctcatgcaggatcgcgacgcagccagcgccagagcttggcccaagatgcacactgtgaacggatatgtcaataggacgcttcctggcttgattgggtgtcatcggaaaagtgtctactggcacgtgatcggaatggggacaacaccagaggtccactccatatttctcgaaggccataccttccttgttcgaaaccacagacaggcatccttggggatctctcccattacctttctcactgcccaaacgggtcttcgtgacttgggtcagttccttctcttttgccatatcccgtcacaccagcatgatggtatggaagcttatgtgaaagtcgacagttgtcctgaggagccacagttgcgcatgaagaataatgaagaagccgaggattacgacgacgatctcaccgattctgagatggacgtggtgaggtttgatgacgacaactctccctccatcattcaagctcggagcggggcgaagaaacaccccaagacttgggtccactatatagcggcggaagaggaggattgggattacgctcctcttgtattggcaccagatgaccgctcatacaaaagccagtacctcaacaacggaccgcagagaattggccggaagtataagaaagtgcgatttatggcctatacagacgaaacctttaagacaagggaggccatccagcatgagagtgggattttgggacctcttctttacggcgaagttggtgataccctcctcatcatcttcaagaatcaagcttctcgcccctataacatttacccacacgggatcactgacgttaggcctttgtatagcagaagacttcccaaaggcgtgaagcatctcaaagacttccccattttgccaggcgagatctttaagtacaaatggaccattacagtggaagatggaccgactaaatcggaccctcgatgccttacgcggtactattcctccttcgtgaattgggagagagatttggcaagcggactcataggaccactcctcatctgttacaaggaatctgtagaccagaggggtaaccagattatgagtgataaacgcaatgtgatcctttttagcgtcttcgacgagaaccggtcctggtacttgaccgagaatatacaaaggttccttcccaaccccgcaggcgttcagttggaagaccctgagtttcaggccagcaatattatgcactcaatcaacggctatgtgtttgatagtctccagctttctgtttgcctccatgaagtagcctattggtacatcttgtcaattggtgctcaaacagacttcctctccgtcttcttctccggctacacctttaagcacaagggcgtgtatgaggacactctcacactctttccattttctggagaaaccgtgttcatggagatggagaatccaggcctttggatcttgggttgccacaacagtgattttcgcaatcggggaatgactgctctcctcaaagtcagcagctgtgattggaacacaggcgactatgaggaagattcttacgaggacataagtgcctactttgactccaaaaataacgccattgagcccagatcattctcccagaatcctcccgtgcttaaaaggcatcagcgcgaaggtaccagaactactctccagtctgatcaagaggagattgactatgacgacaccattagcgtggaaatgaagaaggaggatttcgatatctatgacgaagatgagaaccagtctccgcggagctttcagaagaagacgcgacactacttcattgcagcagtcgaaaggctttgggactacggtatgtcatcatcccctcatgtgttgcgcaatagagctcagagtggaagtgttccacagttcaagaaagtcgtctttcaagagtttacagatggcagcttcacacagcctctctatcggggcgagcttaacgaacatttgggactccttggtccctatatccgagccgaagtggaggacaacattatggttacctttaggaatcaagcctctcgcccctacagcttctactcctccctcatcagttatgaggaggatcagagacaaggcgctgaaccacggaagaactttgtgaaaccgaatgagacgaagacctacttctggaaagtacagcaccacatggcccccacaaaagacgaattcgattgcaaagcatgggcgtatttttcagacgttgacttggagaaagatgtacattcaggacttattggtcctttgttggtgtgtcacactaacactctcaatccagcccatggcaggcaggtgacagtccaggaattcgctcttttctttaccatctttgatgagaccaagtcctggtacttcacggaaaacatggagcgcaattgcagagccccctgtaacatacagatggaggaccctacctttaaggaaaattatcggttccacgcaatcaacggatacattatggatacactccctggccttgtgatggctcaggaccaacgaatcaggtggtacctcctcagcatgggttctaatgagaacatacactccattcacttttcaggacatgtgttcactgtccggaagaaagaagagtataagatggccctctacaatttgtatccaggcgtgtttgagaccgttgaaatgcttcccatcaaagctggcatctggagagtagagtgcttgatcggagaacatcttcacgcaggtatgagcaccttgttcctcgtgtacagcaacaaatgtcagaatccacttggcatggccagtggacacattcgcgactttcagatcacagcatctggccagtatggacaatgggccccaaagttggctcgcctccattactccggtagcataaatgcgtggtccactaaagaacctttcagctggattaaggtcgatcttcttgcccccatgatcatccacggcattaagacacagggagcgaggcagaaattctcctccctctacatctcacagttcattattatgtatagtttggacggcaagaagtggcaaacttatagaggtaacagtactggaacagacatggtgttcttcggcaacgttgatagctctggcatcaaacacaacatctttaatcctcccataatagctcggtacatcagattgcatccgacccactacagcattaggagtacactccgaatggagcttatgggttgcgacttgaattcctgttcaatgccactcggaatggagtctaaagccatctctgatgcacagataaccgccagtagctactttacgaacatgtttgctacgtggtcaccctctaaggcaaggcttcatttgcaaggccggtctaatgcctggagacctcaggtgaacaacccgaaagaatggctccaggtggactttcagaagaccatgaaagtaacaggtgtcactactcagggagttaagtccttggatactagcatgtatgtgaaggagttccttatttcctcatcacaagatggccaccagtggaccctcttctttcagaatggtaaggtcaaagtgtttcagggcaatcaagacagcttcacacccgtggtgaacagtcttgatcctccactcttgacacgataccttcgaatccatccacagtcttgggagcaccagattgcattgcgcatggaagtacttggatgcgaggctcaggacctctac

SEQ ID NO: 2338 - protein, 1457 aa, synthetic construct
  REGION 1..1457: note = Variant of human B-domain deleted Factor VIII
MQIELSTCFFLCLLRFCFSATRRYYLGAVELSWDYMQSDLGELPVDARFPPRVPKSFPFNTSQVYKKTLFVEFTDHLFNIAKPRPPWMGLLGPTIQAEVYDTVVITLKNMASHPVSLHAVGVSYWKASEGAEYDDQTSQREKEDDKVFPGGSHTYVWQVLKENGPMASDPPCLTYSYLSHVDLVKDLNSGLIGALLVCREGSLAKEKTQTLAKFILLFAVFDEGKSWHSETKNSLMQDRDAASARAWPKMHTVNGYVNRTLPGLIGCHRKSVYWHVIGMGTTPEVHSIFLEGHTFLVRNHRQASLGISPITFLTAQTGLRDLGQFLLFCHIPSHQHDGMEAYVKVDSCPEEPQLRMKNNEEAEDYDDDLTDSEMDVVRFDDDNSPSIIQARSGAKKHPKTWVHYIAAEEEDWDYAPLVLAPDDRSYKSQYLNNGPQRIGRKYKKVRFMAYTDETFKTREAIQHESGILGPLLYGEVGDTLLIIFKNQASRPYNIYPHGITDVRPLYSRRLPKGVKHLKDFPILPGEIFKYKWTITVEDGPTKSDPRCLTRYYSSFVNWERDLASGLIGPLLICYKESVDQRGNQIMSDKRNVILFSVFDENRSWYLTENIQRFLPNPAGVQLEDPEFQASNIMHSINGYVFDSLQLSVCLHEVAYWYILSIGAQTDFLSVFFSGYTFKHKGVYEDTLTLFPFSGETVFMEMENPGLWILGCHNSDFRNRGMTALLKVSSCDWNTGDYEEDSYEDISAYFDSKNNAIEPRSFSQNPPVLKRHQREGTRTTLQSDQEEIDYDDTISVEMKKEDFDIYDEDENQSPRSFQKKTRHYFIAAVERLWDYGMSSSPHVLRNRAQSGSVPQFKKVVFQEFTDGSFTQPLYRGELNEHLGLLGPYIRAEVEDNIMVTFRNQASRPYSFYSSLISYEEDQRQGAEPRKNFVKPNETKTYFWKVQHHMAPTKDEFDCKAWAYFSDVDLEKDVHSGLIGPLLVCHTNTLNPAHGRQVTVQEFALFFTIFDETKSWYFTENMERNCRAPCNIQMEDPTFKENYRFHAINGYIMDTLPGLVMAQDQRIRWYLLSMGSNENIHSIHFSGHVFTVRKKEEYKMALYNLYPGVFETVEMLPIKAGIWRVECLIGEHLHAGMSTLFLVYSNKCQNPLGMASGHIRDFQITASGQYGQWAPKLARLHYSGSINAWSTKEPFSWIKVDLLAPMIIHGIKTQGARQKFSSLYISQFIIMYSLDGKKWQTYRGNSTGTDMVFFGNVDSSGIKHNIFNPPIIARYIRLHPTHYSIRSTLRMELMGCDLNSCSMPLGMESKAISDAQITASSYFTNMFATWSPSKARLHLQGRSNAWRPQVNNPKEWLQVDFQKTMKVTGVTTQGVKSLDTSMYVKEFLISSSQDGHQWTLFFQNGKVKVFQGNQDSFTPVVNSLDPPLLTRYLRIHPQSWEHQIALRMEVLGCEAQDLY

SEQ ID NO: 2339 - DNA, 4371 bp, synthetic construct
  misc_feature 1..4371: note = Variant of human B-domain deleted Factor VIII
  source 1..4371: mol_type = other DNA
atgcagattgaactgtctacctgcttcttcctctgtttgctgaggttctgctttagcgccactagacggtactaccttggcgctgtggagctgtcctgggactatatgcagagtgatttgggagagcttcccgtcgacgcacgatttcctcctcgcgttccaaagtcatttccctttaacacaagccaggtgtacaagaagacgctcttcgtcgaattcaccgatcacctgttcaatatcgccaaacccagaccaccatggatgggtcttttggggcctaccatacaagcggaggtgtatgacacagttgttatcactctcaagaacatggcttctcatccggtaagtcttcacgcagtgggcgtgtcctactggaaagcttcagaaggagccgagtatgatgatcagacatcccagagggagaaagaagacgacaaggtatttccaggtgggtctcatacctatgtgtggcaagtgctcaaagagaatggccctatggccagcgatccgccgtgtttgacttacagctacctttcacacgttgacctcgtcaaggacctcaactccgggttgattggagccttgttggtatgcagggaaggatctcttgccaaagagaagacacagaccctggccaagtttatccttctctttgctgtgttcgatgagggcaaaagttggcatagcgaaacgaagaattccctcatgcaggatcgcgacgcagccagcgccagagcttggcccaagatgcacactgtgaacggatatgtcaataggacgcttcctggcttgattgggtgtcatcggaaaagtgtctactggcacgtgatcggaatggggacaacaccagaggtccactccatatttctcgaaggccataccttccttgttcgaaaccacagacaggcatccttggggatctctcccattacctttctcactgcccaaacgggtcttcgtgacttgggtcagttccttctcttttgccatatcccgtcacaccagcatgatggtatggaagcttatgtgaaagtcgacagttgtcctgaggagccacagttgcgcatgaagaataatgaagaagccgaggattacgacgacgatctcaccgattctgagatggacgtggtgaggtttgatgacgacaactctccctccatcattcaagctcggagcggggcgaagaaacaccccaagacttgggtccactatatagcggcggaagaggaggattgggattacgctcctcttgtattggcaccagatgaccgctcatacaaaagccagtacctcaacaacggaccgcagagaattggccggaagtataagaaagtgcgatttatggcctatacagacgaaacctttaagacaagggaggccatccagcatgagagtgggattttgggacctcttctttacggcgaagttggtgataccctcctcatcatcttcaagaatcaagcttctcgcccctataacatttacccacacgggatcactgacgttaggcctttgtatagcagaagacttcccaaaggcgtgaagcatctcaaagacttccccattttgccaggcgagatctttaagtacaaatggaccattacagtggaagatggaccgactaaatcggaccctcgatgccttacgcggtactattcctccttcgtgaattgggagagagatttggcaagcggactcataggaccactcctcatctgttacaaggaatctgtagaccagaggggtaaccagattatgagtgataaacgcaatgtgatcctttttagcgtcttcgacgagaaccggtcctggtacttgaccgagaatatacaaaggttccttcccaaccccgcaggcgttcagttggaagaccctgagtttcaggccagcaatattatgcactcaatcaacggctatgtgtttgatagtctccagctttctgtttgcctccatgaagtagcctattggtacatcttgtcaattggtgctcaaacagacttcctctccgtcttcttctccggctacacctttaagcacaagggcgtgtatgaggacactctcacactctttccattttctggagaaaccgtgttcatggaaatggagaatccaggcctttggatcttgggttgccacaacagtgattttcgcaatcggggaatgactgctctcctcaaagtcagcagctgtgattggaacacaggcgactatgaggaagattcttacgaggacataagtgcctactttgactccaagaataacgccattgagcccagatcattctcccagaatcctcccgtgcttaaaaggcatcagcgcgaaggtaccagaactactcttcagtctgatcaagaggagattgactatgacgacaccattagcgtggaaatgaagaaggaagatttcgatatccaggacgagtcggggaaccagtctccgcggagctttcagaagaagacgcgacactacttcattgcagcagtcgaaaggctttgggactacggtatgtcatcatcccctcatgtgttgcgcaatagagctcagagtggaagtgttccacagttcaagaaagtcgtctttcaagagtttacagatggcagcttcacacagcctctctatcggggcgagcttaacgaacatttgggactccttggtccctatatccgagccgaagtggaggacaacattatggttacctttaggaatcaagcctctcgcccctacagcttctactcctccctcatcagttatgaggaggatcagagacaaggcgctgaaccacggaagaactttgtgaaaccgaatgagacgaagacctacttctggaaagtacagcaccacatggcccccacaaaagacgaattcgattgcaaagcatgggcgtatttttcagacgttgacttggagaaagatgtacattcaggacttattggtcctttgttggtgtgtcacactaacactctcaatccagcccatggcaggcaggtgacagtccaggaattcgctcttttctttaccatctttgatgagaccaagtcctggtacttcacggaaaacatggagcgcaattgcagagccccctgtaacatacagatggaggaccctacctttaaggaaaattatcggttccacgcaatcaacggatacattatggatacactccctggccttgtgatggctcaggaccaacgaatcaggtggtacctcctcagcatgggttctaatagtaacatacactccattcacttttcaggacatgtgttcactgtccggaagaaagaagagtataagatggccctctacaatttgtatccaggcgtgtttgagaccgttgaaatgcttccctctaaagctggcatctggagagtagagtgcttgatcggagaacatcttcacgcaggtatgagcaccttgttcctcgtgtacagcaacaaatgtcagaatccacttggcatggccagtggacacattcgcgactttcagatcacagcatctggccagtatggacaatgggccccaaagttggctcgcctccattactccggtagcataaatgcgtggtccactaaagaacctttcagctggattaaggtcgatcttcttgcccccatgatcatccacggcattaagacacagggagcgaggcagaaattctcctccctctacatctcacagttcattattatgtatagtttggacggcaagaagtggcaaacttatagaggtaacagtactggaacagacatggtgttcttcggcaacgttgatagctctggcatcaaacacaacatctttaatcctcccataatagctcggtacatcagattgcatccgacccactacagcattaggagtacactccgaatggagcttatgggttgcgacttgaattcctgttcaatgccactcggaatggagtctaaagccatctctgatgcacagataaccgccagtagctactttacgaacatgtttgctacgtggtcaccctctaaggcaaggcttcatttgcaaggccggtctaatgcctggagacctcaggtgaacaacccgaaagaatggctccaggtggactttcagaagaccatgaaagtaacaggtgtcactactcagggagttaagtccttggatactagcatgtatgtgaaggagttccttatttcctcatcacaagatggccaccagtggaccctcttctttcagaatggtaaggtcaaagtgtttcagggcaatcaagacagcttcacacccgtggtgaacagtcttgatcctccactcttgacacgataccttcgaatccatccacagtcttgggagcaccagattgcattgcgcatggaagtacttggatgcgaggctcaggacctctac

SEQ ID NO: 2340 - protein, 1457 aa, synthetic construct
  REGION 1..1457: note = Variant of human B-domain deleted Factor VIII
MQIELSTCFFLCLLRFCFSATRRYYLGAVELSWDYMQSDLGELPVDARFPPRVPKSFPFNTSQVYKKTLFVEFTDHLFNIAKPRPPWMGLLGPTIQAEVYDTVVITLKNMASHPVSLHAVGVSYWKASEGAEYDDQTSQREKEDDKVFPGGSHTYVWQVLKENGPMASDPPCLTYSYLSHVDLVKDLNSGLIGALLVCREGSLAKEKTQTLAKFILLFAVFDEGKSWHSETKNSLMQDRDAASARAWPKMHTVNGYVNRTLPGLIGCHRKSVYWHVIGMGTTPEVHSIFLEGHTFLVRNHRQASLGISPITFLTAQTGLRDLGQFLLFCHIPSHQHDGMEAYVKVDSCPEEPQLRMKNNEEAEDYDDDLTDSEMDVVRFDDDNSPSIIQARSGAKKHPKTWVHYIAAEEEDWDYAPLVLAPDDRSYKSQYLNNGPQRIGRKYKKVRFMAYTDETFKTREAIQHESGILGPLLYGEVGDTLLIIFKNQASRPYNIYPHGITDVRPLYSRRLPKGVKHLKDFPILPGEIFKYKWTITVEDGPTKSDPRCLTRYYSSFVNWERDLASGLIGPLLICYKESVDQRGNQIMSDKRNVILFSVFDENRSWYLTENIQRFLPNPAGVQLEDPEFQASNIMHSINGYVFDSLQLSVCLHEVAYWYILSIGAQTDFLSVFFSGYTFKHKGVYEDTLTLFPFSGETVFMEMENPGLWILGCHNSDFRNRGMTALLKVSSCDWNTGDYEEDSYEDISAYFDSKNNAIEPRSFSQNPPVLKRHQREGTRTTLQSDQEEIDYDDTISVEMKKEDFDIQDESGNQSPRSFQKKTRHYFIAAVERLWDYGMSSSPHVLRNRAQSGSVPQFKKVVFQEFTDGSFTQPLYRGELNEHLGLLGPYIRAEVEDNIMVTFRNQASRPYSFYSSLISYEEDQRQGAEPRKNFVKPNETKTYFWKVQHHMAPTKDEFDCKAWAYFSDVDLEKDVHSGLIGPLLVCHTNTLNPAHGRQVTVQEFALFFTIFDETKSWYFTENMERNCRAPCNIQMEDPTFKENYRFHAINGYIMDTLPGLVMAQDQRIRWYLLSMGSNSNIHSIHFSGHVFTVRKKEEYKMALYNLYPGVFETVEMLPSKAGIWRVECLIGEHLHAGMSTLFLVYSNKCQNPLGMASGHIRDFQITASGQYGQWAPKLARLHYSGSINAWSTKEPFSWIKVDLLAPMIIHGIKTQGARQKFSSLYISQFIIMYSLDGKKWQTYRGNSTGTDMVFFGNVDSSGIKHNIFNPPIIARYIRLHPTHYSIRSTLRMELMGCDLNSCSMPLGMESKAISDAQITASSYFTNMFATWSPSKARLHLQGRSNAWRPQVNNPKEWLQVDFQKTMKVTGVTTQGVKSLDTSMYVKEFLISSSQDGHQWTLFFQNGKVKVFQGNQDSFTPVVNSLDPPLLTRYLRIHPQSWEHQIALRMEVLGCEAQDLY

SEQ ID NO: 2341 - DNA, 4371 bp, synthetic construct
  misc_feature 1..4371: note = Variant of human B-domain deleted Factor VIII
  source 1..4371: mol_type = other DNA
atgcagattgaactgtctacctgcttcttcctctgtttgctgaggttctgctttagcgccactagacggtactaccttggcgctgtggagctgtcctgggactatatgcagagtgatttgggagagcttcccgtcgacgcacgatttcctcctcgcgttccaaagtcatttccctttaacacaagccaggtgtacaagaagacgctcttcgtcgaattcaccgatcacctgttcaatatcgccaaacccagaccaccatggatgggtcttttggggcctaccatacaagcggaggtgtatgacacagttgttatcactctcaagaacatggcttctcatccggtaagtcttcacgcagtgggcgtgtcctactggaaagcttcagaaggagccgagtatgatgatcagacatcccagagggagaaagaagacgacaaggtatttccaggtgggtctcatacctatgtgtggcaagtgctcaaagagaatggccctatggccagcgatccgccgtgtttgacttacagctacctttcacacgttgacctcgtcaaggacctcaactccgggttgattggagccttgttggtatgcagggaaggatctcttgccaaagagaagacacagaccctggccaagtttatccttctctttgctgtgttcgatgagggcaaaagttggcatagcgaaacgaagaattccctcatgcaggatcgcgacgcagccagcgccagagcttggcccaagatgcacactgtgaacggatatgtcaataggacgcttcctggcttgattgggtgtcatcggaaaagtgtctactggcacgtgatcggaatggggacaacaccagaggtccactccatatttctcgaaggccataccttccttgttcgaaaccacagacaggcatccttggggatctctcccattacctttctcactgcccaaacgggtcttcgtgacttgggtcagttccttctcttttgccatatcccgtcacaccagcatgatggtatggaagcttatgtgaaagtcgacagttgtcctgaggagccacagttgcgcatgaagaataatgaagaagccgaggattacgacgacgatctcaccgattctgagatggacgtggtgaggtttgatgacgacaactctccctccatcattcaagctcggagcggggcgaagaaacaccccaagacttgggtccactatatagcggcggaagaggaggattgggattacgctcctcttgtattggcaccagatgaccgctcatacaaaagccagtacctcaacaacggaccgcagagaattggccggaagtataagaaagtgcgatttatggcctatacagacgaaacctttaagacaagggaggccatccagcatgagagtgggattttgggacctcttctttacggcgaagttggtgataccctcctcatcatcttcaagaatcaagcttctcgcccctataacatttacccacacgggatcactgacgttaggcctttgtatagcagaagacttcccaaaggcctgaagcatctcaaagacttccccattttgccaggcgagatctttaagtacaaatggaccattacagtggaagatggaccgactaaaccggaccctcgatgccttacgcggtactattcctccttcgtgaattgggagagagatttggcaagcggactcataggaccactcctcatctgttacaaggaatctgtagaccagaggggtaaccagattatgagtgataaacgcaatgtgatcctttttagcgtcttcgacgagaaccggtcctggtacttgaccgagaatatacaaaggttccttcccaaccccgcaggcgttcagttggaagaccctgagtttcaggccagcaatattatgcactcaatcaacggctatgtgtttgatagtctccagctttctgtttgcctccatgaagtagcctattggtacatcttgtcaattggtgctcaaacagacttcctctccgtcttcttctccggctacacctttaagcacaagaacgtgtatgaggacactctcacactctttccattttctggagaaaccgtgttcatgagcatggagaatccaggcctttggatcttgggttgccacaacagtgattttcgcaatcggggaatgactgctctcctcaaagtcagcagctgtgattggaacacaggcgactatgaggaagattcttacgaggacataagtgcctactttgactccaagaataacgccattgagcccagatcattctcccagaatcctcccgtgcttaaaaggcatcagcgcgaaggtaccagaactactcttcagtctgatcaagaggagattgactatgacgacaccattagcgtggaaatgaagaaggaggatttcgatatccaggacgagtcggggaaccagtctccgcggagctttcagaagaagacgcgacactacttcattgcagcagtcgaaaggctttgggactacggtatgtcatcatcccctcatgtgttgcgcaatagagctcagagtggaagtgttccacagttcaagaaagtcgtctttcaagagtttacagatggcagcttcacacagcctctctatcggggcgagcttaacgaacatttgggactccttggtccctatatccgagccgaagtggaggacaacattatggttacctttaggaatcaagcctctcgcccctacagcttctactcctccctcatcagttatgaggaggatcagagacaaggcgctgaaccacggaagaactttgtgaaaccgaatgagacgaagacctacttctggaaagtacagcaccacatggcccccacaaaagacgaattcgattgcaaagcatgggcgtatttttcagacgttgacttggagaaagatgtacattcaggacttattggtcctttgttggtgtgtcacactaacactctcaatccagcccatggcaggcaggtgacagtccaggaattcgctcttttctttaccatctttgatgagaccaagtcctggtacttcacggaaaacatggagcgcaattgcagagccccctgtaacatacagatggaggaccctacctttaaggaaaattatcggttccacgcaatcaacggatacattatggatacactccctggccttgtgatggctcaggaccaacgaatcaggtggtacctcctcagcatgggttctaatgagaacatacactccattcacttttcaggacatgtgttcactgtccggaagaaagaagagtataagatggccctctacaatttgtatccaggcgtgtttgagaccgttgaaatgcttccctctaaagctggcatctggagagtagagtgcttgatcggagaacatcttcacgcaggtatgagcaccttgttcctcgtgtacagcaacaaatgtcagaatccacttggcatggccagtggacacattcgcgactttcagatcacagcatctggccagtatggacaatgggccccaaagttggctcgcctccattactccggtagcataaatgcgtggtccactaaagaacctttcagctggattaaggtcgatcttcttgcccccatgatcatccacggcattaagacacagggagcgaggcagaaattctcctccctctacatctcacagttcattattatgtatagtttggacggcaagaagtggcaaacttatagaggtaacagtactggaacagacatggtgttcttcggcaacgttgatagctctggcatcaaacacaacatctttaatcctcccataatagctcggtacatcagattgcatccgacccactacagcattaggagtacactccgaatggagcttatgggttgcgacttgaattcctgttcaatgccactcggaatggagtctaaagccatctctgatgcacagataaccgccagtagctactttacgaacatgtttgctacgtggtcaccctctaaggcaaggcttcatttgcaaggccggtctaatgcctggagacctcaggtgaacaacccgaaagaatggctccaggtggactttcagaagaccatgaaagtaacaggtgtcactactcagggagttaagtccttggatactagcatgtatgtgaaggagttccttatttcctcatcacaagatggccaccagtggaccctcttctttcagaatggtaaggtcaaagtgtttcagggcaatcaagacagcttcacacccgtggtgaacagtcttgatcctccactcttgacacgataccttcgaatccatccacagtcttgggagcaccagattgcattgcgcatggaagtacttggatgcgaggctcaggacctctac

SEQ ID NO: 2342 - protein, 1457 aa, synthetic construct
  REGION 1..1457: note = Variant of human B-domain deleted Factor VIII
MQIELSTCFFLCLLRFCFSATRRYYLGAVELSWDYMQSDLGELPVDARFPPRVPKSFPFNTSQVYKKTLFVEFTDHLFNIAKPRPPWMGLLGPTIQAEVYDTVVITLKNMASHPVSLHAVGVSYWKASEGAEYDDQTSQREKEDDKVFPGGSHTYVWQVLKENGPMASDPPCLTYSYLSHVDLVKDLNSGLIGALLVCREGSLAKEKTQTLAKFILLFAVFDEGKSWHSETKNSLMQDRDAASARAWPKMHTVNGYVNRTLPGLIGCHRKSVYWHVIGMGTTPEVHSIFLEGHTFLVRNHRQASLGISPITFLTAQTGLRDLGQFLLFCHIPSHQHDGMEAYVKVDSCPEEPQLRMKNNEEAEDYDDDLTDSEMDVVRFDDDNSPSIIQARSGAKKHPKTWVHYIAAEEEDWDYAPLVLAPDDRSYKSQYLNNGPQRIGRKYKKVRFMAYTDETFKTREAIQHESGILGPLLYGEVGDTLLIIFKNQASRPYNIYPHGITDVRPLYSRRLPKGLKHLKDFPILPGEIFKYKWTITVEDGPTKPDPRCLTRYYSSFVNWERDLASGLIGPLLICYKESVDQRGNQIMSDKRNVILFSVFDENRSWYLTENIQRFLPNPAGVQLEDPEFQASNIMHSINGYVFDSLQLSVCLHEVAYWYILSIGAQTDFLSVFFSGYTFKHKNVYEDTLTLFPFSGETVFMSMENPGLWILGCHNSDFRNRGMTALLKVSSCDWNTGDYEEDSYEDISAYFDSKNNAIEPRSFSQNPPVLKRHQREGTRTTLQSDQEEIDYDDTISVEMKKEDFDIQDESGNQSPRSFQKKTRHYFIAAVERLWDYGMSSSPHVLRNRAQSGSVPQFKKVVFQEFTDGSFTQPLYRGELNEHLGLLGPYIRAEVEDNIMVTFRNQASRPYSFYSSLISYEEDQRQGAEPRKNFVKPNETKTYFWKVQHHMAPTKDEFDCKAWAYFSDVDLEKDVHSGLIGPLLVCHTNTLNPAHGRQVTVQEFALFFTIFDETKSWYFTENMERNCRAPCNIQMEDPTFKENYRFHAINGYIMDTLPGLVMAQDQRIRWYLLSMGSNENIHSIHFSGHVFTVRKKEEYKMALYNLYPGVFETVEMLPSKAGIWRVECLIGEHLHAGMSTLFLVYSNKCQNPLGMASGHIRDFQITASGQYGQWAPKLARLHYSGSINAWSTKEPFSWIKVDLLAPMIIHGIKTQGARQKFSSLYISQFIIMYSLDGKKWQTYRGNSTGTDMVFFGNVDSSGIKHNIFNPPIIARYIRLHPTHYSIRSTLRMELMGCDLNSCSMPLGMESKAISDAQITASSYFTNMFATWSPSKARLHLQGRSNAWRPQVNNPKEWLQVDFQKTMKVTGVTTQGVKSLDTSMYVKEFLISSSQDGHQWTLFFQNGKVKVFQGNQDSFTPVVNSLDPPLLTRYLRIHPQSWEHQIALRMEVLGCEAQDLY

SEQ ID NO: 2343 - DNA, 4371 bp, synthetic construct
  misc_feature 1..4371: note = Variant of human B-domain deleted Factor VIII
  source 1..4371: mol_type = other DNA
atgcagattgaactgtctacctgcttcttcctctgtttgctgaggttctgctttagcgccactagacggtactaccttggcgctgtggagctgtcctgggactatatgcagagtgatttgggagagcttcccgtcgacgcacgatttcctcctcgcgttccaaagtcatttccctttaacacaagccaggtgtacaagaagacgctcttcgtcgaattcaccgatcacctgttcaatatcgccaaacccagaccaccatggatgggtcttttggggcctaccatacaagcggaggtgtatgacacagttgttatcactctcaagaacatggcttctcatccggtaagtcttcacgcagtgggcgtgtcctactggaaagcttcagaaggagccgagtatgatgatcagacatcccagagggagaaagaagacgacaaggtatttccaggtgggtctcatacctatgtgtggcaagtgctcaaagagaatggccctatggccagcgatccgccgtgtttgacttacagctacctttcacacgttgacctcgtcaaggacctcaactccgggttgattggagccttgttggtatgcagggaaggatctcttgccaaagagaagacacagaccctggccaagtttatccttctctttgctgtgttcgatgagggcaaaagttggcatagcgaaacgaagaattccctcatgcaggatcgcgacgcagccagcgccagagcttggcccaagatgcacactgtgaacggatatgtcaataggacgcttcctggcttgattgggtgtcatcggaaaagtgtctactggcacgtgatcggaatggggacaacaccagaggtccactccatatttctcgaaggccataccttccttgttcgaaaccacagacaggcatccttggggatctctcccattacctttctcactgcccaaacgggtcttcgtgacttgggtcagttccttctcttttgccatatcccgtcacaccagcatgatggtatggaagcttatgtgaaagtcgacagttgtcctgaggagccacagttgcgcatgaagaataatgaagaagccgaggattacgacgacgatctcaccgattctgagatggacgtggtgaggtttgatgacgacaactctccctccatcattcaagctcggagcggggcgaagaaacaccccaagacttgggtccactatatagcggcggaagaggaggattgggattacgctcctcttgtattggcaccagatgaccgctcatacaaaagccagtacctcaacaacggaccgcagagaattggccggaagtataagaaagtgcgatttatggcctatacagacgaaacctttaagacaagggaggccatccagcatgagagtgggattttgggacctcttctttacggcgaagttggtgataccctcctcatcatcttcaagaatcaagcttctcgcccctataacatttacccacacgggatcactgacgttaggcctttgtatagcagaagacttcccaaaggcgtgaagcatctcaaagacttccccattttgccaggcgagatctttaagtacaaatggaccattacagtggaagatggaccgactaaatcggaccctcgatgccttacgcggtactattcctccttcgtgaattgggagagagatttggcaagcggactcataggaccactcctcatctgttacaaggaatctgtagaccagaggggtaaccagattatgagtgataaacgcaatgtgatcctttttagcgtcttcgacgagaaccggtcctggtacttgaccgagaatatacaaaggttccttcccaaccccgcaggcgttcagttggaagaccctgagtttcaggccagcaatattatgcactcaatcaacggctatgtgtttgatagtctccagctttctgtttgcctccatgaagtagcctattggtacatcttgtcaattggtgctcaaacagacttcctctccgtcttcttctccggctacacctttaagcacaagggcgtgtatgaggacactctcacactctttccattttctggagaaaccgtgttcatgagtatggagaatccaggcctttggatcttgggttgccacaacagtgattttcgcaatcggggaatgactgctctcctcaaagtcagcagctgtgattggaacacaggcgactatgaggaagattcttacgaggacataagtgcctactttgactccaagaataacgccattgagcccagatcattctcccagaatcctcccgtgcttaaaaggcatcagcgcgaaggtaccagaactactcttcagtctgatcaagaggagattgactatgacgacaccattagcgtggaaatgaagaaggaagatttcgatatccaggacgagtcggggaaccagtctccgcggagctttcagaagaagacgcgacactacttcattgcagcagtcgaaaggctttgggactacggtatgtcatcatcccctcatgtgttgcgcaatagagctcagagtggaagtgttccacagttcaagaaagtcgtctttcaagagtttacagatggcagcttcacacagcctctctatcggggcgagcttaacgaacatttgggactccttggtccctatatccgagccgaagtggaggacaacattatggttacctttaggaatcaagcctctcgcccctacagcttctactcctccctcatcagttatgaggaggatcagagacaaggcgctgaaccacggaagaactttgtgaaaccgaatgagacgaagacctacttctggaaagtacagcaccacatggcccccacaaaagacgaattcgattgcaaagcatgggcgtatttttcagacgttgacttggagaaagatgtacattcaggacttattggtcctttgttggtgtgtcacactaacactctcaatccagcccatggcaggcaggtgacagtccaggaattcgctcttttctttaccatctttgatgagaccaagtcctggtacttcacggaaaacatggagcgcaattgcagagccccctgtaacatacagatggaggaccctacctttaaggaaaattatcggttccacgcaatcaacggatacattatggatacactccctggccttgtgatggctcaggaccaacgaatcaggtggtacctcctcagcatgggttctaatgagaacatacactccattcacttttcaggacatgtgttcactgtccggaagaaagaagagtataagatggccctctacaatttgtatccaggcgtgtttgagaccgttgaaatgcttccctctaaagctggcatctggagagtagagtgcttgatcggagaacatcttcacgcaggtatgagcaccttgttcctcgtgtacagcaacaaatgtcagaatccacttggcatggccagtggacacattcgcgactttcagatcacagcatctggccagtatggacaatgggccccaaagttggctcgcctccattactccggtagcataaatgcgtggtccactaaagaacctttcagctggattaaggtcgatcttcttgcccccatgatcatccacggcattaagacacagggagcgaggcagaaattctcctccctctacatctcacagttcattattatgtatagtttggacggcaagaagtggcaaacttatagaggtaacagtactggaacagacatggtgttcttcggcaacgttgatagctctggcatcaaacacaacatctttaatcctcccataatagctcggtacatcagattgcatccgacccactacagcattaggagtacactccgaatggagcttatgggttgcgacttgaattcctgttcaatgccactcggaatggagtctaaagccatctctgatgcacagataaccgccagtagctactttacgaacatgtttgctacgtggtcaccctctaaggcaaggcttcatttgcaaggccggtctaatgcctggagacctcaggtgaacaacccgaaagaatggctccaggtggactttcagaagaccatgaaagtaacaggtgtcactactcagggagttaagtccttggatactagcatgtatgtgaaggagttccttatttcctcatcacaagatggccaccagtggaccctcttctttcagaatggtaaggtcaaagtgtttcagggcaatcaagacagcttcacacccgtggtgaacagtcttgatcctccactcttgacacgataccttcgaatccatccacagtcttgggagcaccagattgcattgcgcatggaagtacttggatgcgaggctcaggacctctac

SEQ ID NO: 2344 - protein, 1457 aa, synthetic construct
  REGION 1..1457: note = Variant of human B-domain deleted Factor VIII
MQIELSTCFFLCLLRFCFSATRRYYLGAVELSWDYMQSDLGELPVDARFPPRVPKSFPFNTSQVYKKTLFVEFTDHLFNIAKPRPPWMGLLGPTIQAEVYDTVVITLKNMASHPVSLHAVGVSYWKASEGAEYDDQTSQREKEDDKVFPGGSHTYVWQVLKENGPMASDPPCLTYSYLSHVDLVKDLNSGLIGALLVCREGSLAKEKTQTLAKFILLFAVFDEGKSWHSETKNSLMQDRDAASARAWPKMHTVNGYVNRTLPGLIGCHRKSVYWHVIGMGTTPEVHSIFLEGHTFLVRNHRQASLGISPITFLTAQTGLRDLGQFLLFCHIPSHQHDGMEAYVKVDSCPEEPQLRMKNNEEAEDYDDDLTDSEMDVVRFDDDNSPSIIQARSGAKKHPKTWVHYIAAEEEDWDYAPLVLAPDDRSYKSQYLNNGPQRIGRKYKKVRFMAYTDETFKTREAIQHESGILGPLLYGEVGDTLLIIFKNQASRPYNIYPHGITDVRPLYSRRLPKGVKHLKDFPILPGEIFKYKWTITVEDGPTKSDPRCLTRYYSSFVNWERDLASGLIGPLLICYKESVDQRGNQIMSDKRNVILFSVFDENRSWYLTENIQRFLPNPAGVQLEDPEFQASNIMHSINGYVFDSLQLSVCLHEVAYWYILSIGAQTDFLSVFFSGYTFKHKGVYEDTLTLFPFSGETVFMSMENPGLWILGCHNSDFRNRGMTALLKVSSCDWNTGDYEEDSYEDISAYFDSKNNAIEPRSFSQNPPVLKRHQREGTRTTLQSDQEEIDYDDTISVEMKKEDFDIQDESGNQSPRSFQKKTRHYFIAAVERLWDYGMSSSPHVLRNRAQSGSVPQFKKVVFQEFTDGSFTQPLYRGELNEHLGLLGPYIRAEVEDNIMVTFRNQASRPYSFYSSLISYEEDQRQGAEPRKNFVKPNETKTYFWKVQHHMAPTKDEFDCKAWAYFSDVDLEKDVHSGLIGPLLVCHTNTLNPAHGRQVTVQEFALFFTIFDETKSWYFTENMERNCRAPCNIQMEDPTFKENYRFHAINGYIMDTLPGLVMAQDQRIRWYLLSMGSNENIHSIHFSGHVFTVRKKEEYKMALYNLYPGVFETVEMLPSKAGIWRVECLIGEHLHAGMSTLFLVYSNKCQNPLGMASGHIRDFQITASGQYGQWAPKLARLHYSGSINAWSTKEPFSWIKVDLLAPMIIHGIKTQGARQKFSSLYISQFIIMYSLDGKKWQTYRGNSTGTDMVFFGNVDSSGIKHNIFNPPIIARYIRLHPTHYSIRSTLRMELMGCDLNSCSMPLGMESKAISDAQITASSYFTNMFATWSPSKARLHLQGRSNAWRPQVNNPKEWLQVDFQKTMKVTGVTTQGVKSLDTSMYVKEFLISSSQDGHQWTLFFQNGKVKVFQGNQDSFTPVVNSLDPPLLTRYLRIHPQSWEHQIALRMEVLGCEAQDLY

SEQ ID NO: 2345 - DNA, 4371 bp, synthetic construct
  misc_feature 1..4371: note = Variant of human B-domain deleted Factor VIII
  source 1..4371: mol_type = other DNA
atgcagattgaactgtctacctgcttcttcctctgtttgctgaggttctgctttagcgccactagacggtactaccttggcgctgtggagctgtcctgggactatatgcagagtgatttgggagagcttcccgtcgacgcacgatttcctcctcgcgttccaaagtcatttccctttaacacaagccaggtgtacaagaagacgctcttcgtcgaattcaccgatcacctgttcaatatcgccaaacccagaccaccatggatgggtcttttggggcctaccatacaagcggaggtgtatgacacagttgttatcactctcaagaacatggcttctcatccggtaagtcttcacgcagtgggcgtgtcctactggaaagcttcagaaggagccgagtatgatgatcagacatcccagagggagaaagaagacgacaaggtatttccaggtgggtctcatacctatgtgtggcaagtgctcaaagagaatggccctatggccagcgatccgccgtgtttgacttacagctacctgtcacacgttgacctcgtcaaggacctcaactccgggttgattggagccttgttggtatgcagggaaggatctcttgccaaagagaagacacagaccctggccaagtttatccttctctttgctgtgttcgatgagggcaaaagttggcatagcgaaacgaagaattccctcatgcaggatcgcgacgcagccagcgccagagcttggcccaagatgcacactgtgaacggatatgtcaataggacgcttcctggcttgattgggtgtcatcggaaaagtgtctactggcacgtgatcggaatggggacaacaccagaggtccactccatatttctcgaaggccataccttccttgttcgaaaccacagacaggcatccttggggatctctcccattacctttctcactgcccaaacgggtcttcgtgacttgggtcagttccttctcttttgccatatcccgtcacaccagcatgatggtatggaagcttatgtgaaagtcgacagttgtcctgaggagccacagttgcgcatgaagaataatgaagaagccgaggattacgacgacgatctcaccgattctgagatggacgtggtgaggtttgatgacgacaactctccctccatcattcaagctcggagcggggcgaagaaacaccccaagacttgggtccactatatagcggcggaagaggaggattgggattacgctcctcttgtattggcaccagatgaccgctcatacaaaagccagtacctcaacaacggaccgcagagaattggccggaagtataagaaagtgcgatttatggcctatacagacgaaacctttaagacaagggaggccatccagcatgagagtgggattttgggacctcttctttacggcgaagttggtgataccctcctcatcatcttcaagaatcaagcttctcgcccctataacatttacccacacgggatcactgacgttaggcctttgtatagcagaagacttcccaaaggcgtgaagcatctcaaagacttccccattttgccaggcgagatctttaagtacaaatggaccattacagtggaagatggaccgactaaatcggaccctcgatgccttacgcggtactattcctccttcgtgaattgggagagagatttggcaagcggactcataggaccactcctcatctgttacaaggaatctgtagaccagaggggtaaccagattatgagtgataaacgcaatgtgatcctttttagcgtcttcgacgagaaccggtcctggtacttgaccgagaatatacaaaggttccttcccaaccccgcaggcgttcagttggaagaccctgagtttcaggccagcaatattatgcactcaatcaacggctatgtgtttgatagtctccagctttctgtttgcctccatgaagtagcctattggtacatcttgtcaattggtgctcaaacagacttcctctccgtcttcttctccggctacacctttaagcacaagggcgtgtatgaggacactctcacactctttccattttctggagaaaccgtgttcatgagtatggagaatccaggcctttggatcttgggttgccacaacagtgattttcgcaatcggggaatgactgctctcctcaaagtcagcagctgtgattggaacacaggcgactatgaggaagattcttacgaggacataagtgcctactttgactccaagaataacgccattgagcccagatcattctcccagaatcctcccgtgcttaaaaggcatcagcgcgaaggtaccagaactactcttcagtctgatcaagaggagattgactatgacgacaccattagcgtggaaatgaagaaggaagatttcgatatccaggacgaggacgggaaccagtctccgcggagctttcagaagaagacgcgacactacttcattgcagcagtcgaaaggctttgggactacggtatgtcatcatcccctcatgtgttgcgcaatagagctcagagtggaagtgttccacagttcaagaaagtcgtctttcaagagtttacagatggcagcttcacacagcctctctatcggggcgagcttaacgaacatttgggactccttggtccctatatccgagccgaagtggaggacaacattatggttacctttaggaatcaagcctctcgcccctacagcttctactcctccctcatcagttatgaggaggatcagagacaaggcgctgaaccacggaagaactttgtgaaaccgaatgagacgaagacctacttctggaaagtacagcaccacatggcccccacaaaagacgaattcgattgcaaagcatgggcgtatttttcagacgttgacttggagaaagatgtacattcaggacttattggtcctttgttggtgtgtcacactaacactctcaatccagcccatggcaggcaggtgacagtccaggaattcgctcttttctttaccatctttgatgagaccaagtcctggtacttcacggaaaacatggagcgcaattgcagagccccctgtaacatacagatggaggaccctacctttaaggaaaattatcggttccacgcaatcaacggatacattatggatacactccctggccttgtgatggctcaggaccaacgaatcaggtggtacctcctcagcatgggttctaatgagaacatacactccattcacttttcaggacatgtgttcactgtccggaagaaagaagagtataagatggccctctacaatttgtatccaggcgtgtttgagaccgttgaaatgcttcccattaaagctggcatctggagagtagagtgcttgatcggagaacatcttcacgcaggtatgagcaccttgttcctcgtgtacagcaacaaatgtcagaatccacttggcatggccagtggacacattcgcgactttcagatcacagcatctggccagtatggacaatgggccccaaagttggctcgcctccattactccggtagcataaatgcgtggtccactaaagaacctttcagctggattaaggtcgatcttcttgcccccatgatcatccacggcattaagacacagggagcgaggcagaaattctcctccctctacatctcacagttcattattatgtatagtttggacggcaagaagtggcaaacttatagaggtaacagtactggaacagacatggtgttcttcggcaacgttgatagctctggcatcaaacacaacatctttaatcctcccataatagctcggtacatcagattgcatccgacccactacagcattaggagtacactccgaatggagcttatgggttgcgacttgaattcctgttcaatgccactcggaatggagtctaaagccatctctgatgcacagataaccgccagtagctactttacgaacatgtttgctacgtggtcaccctctaaggcaaggcttcatttgcaaggccggtctaatgcctggagacctcaggtgaacaacccgaaagaatggctccaggtggactttcagaagaccatgaaagtaacaggtgtcactactcagggagttaagtccttggatactagcatgtatgtgaaggagttccttatttcctcatcacaagatggccaccagtggaccctcttctttcagaatggtaaggtcaaagtgtttcagggcaatcaagacagcttcacacccgtggtgaacagtcttgatcctccactcttgacacgataccttcgaatccatccacagtcttgggagcaccagattgcattgcgcatggaagtacttggatgcgaggctcaggacctctac

SEQ ID NO: 2346 - protein, 1457 aa, synthetic construct
  REGION 1..1457: note = Variant of human B-domain deleted Factor VIII
MQIELSTCFFLCLLRFCFSATRRYYLGAVELSWDYMQSDLGELPVDARFPPRVPKSFPFNTSQVYKKTLFVEFTDHLFNIAKPRPPWMGLLGPTIQAEVYDTVVITLKNMASHPVSLHAVGVSYWKASEGAEYDDQTSQREKEDDKVFPGGSHTYVWQVLKENGPMASDPPCLTYSYLSHVDLVKDLNSGLIGALLVCREGSLAKEKTQTLAKFILLFAVFDEGKSWHSETKNSLMQDRDAASARAWPKMHTVNGYVNRTLPGLIGCHRKSVYWHVIGMGTTPEVHSIFLEGHTFLVRNHRQASLGISPITFLTAQTGLRDLGQFLLFCHIPSHQHDGMEAYVKVDSCPEEPQLRMKNNEEAEDYDDDLTDSEMDVVRFDDDNSPSIIQARSGAKKHPKTWVHYIAAEEEDWDYAPLVLAPDDRSYKSQYLNNGPQRIGRKYKKVRFMAYTDETFKTREAIQHESGILGPLLYGEVGDTLLIIFKNQASRPYNIYPHGITDVRPLYSRRLPKGVKHLKDFPILPGEIFKYKWTITVEDGPTKSDPRCLTRYYSSFVNWERDLASGLIGPLLICYKESVDQRGNQIMSDKRNVILFSVFDENRSWYLTENIQRFLPNPAGVQLEDPEFQASNIMHSINGYVFDSLQLSVCLHEVAYWYILSIGAQTDFLSVFFSGYTFKHKGVYEDTLTLFPFSGETVFMSMENPGLWILGCHNSDFRNRGMTALLKVSSCDWNTGDYEEDSYEDISAYFDSKNNAIEPRSFSQNPPVLKRHQREGTRTTLQSDQEEIDYDDTISVEMKKEDFDIQDEDGNQSPRSFQKKTRHYFIAAVERLWDYGMSSSPHVLRNRAQSGSVPQFKKVVFQEFTDGSFTQPLYRGELNEHLGLLGPYIRAEVEDNIMVTFRNQASRPYSFYSSLISYEEDQRQGAEPRKNFVKPNETKTYFWKVQHHMAPTKDEFDCKAWAYFSDVDLEKDVHSGLIGPLLVCHTNTLNPAHGRQVTVQEFALFFTIFDETKSWYFTENMERNCRAPCNIQMEDPTFKENYRFHAINGYIMDTLPGLVMAQDQRIRWYLLSMGSNENIHSIHFSGHVFTVRKKEEYKMALYNLYPGVFETVEMLPIKAGIWRVECLIGEHLHAGMSTLFLVYSNKCQNPLGMASGHIRDFQITASGQYGQWAPKLARLHYSGSINAWSTKEPFSWIKVDLLAPMIIHGIKTQGARQKFSSLYISQFIIMYSLDGKKWQTYRGNSTGTDMVFFGNVDSSGIKHNIFNPPIIARYIRLHPTHYSIRSTLRMELMGCDLNSCSMPLGMESKAISDAQITASSYFTNMFATWSPSKARLHLQGRSNAWRPQVNNPKEWLQVDFQKTMKVTGVTTQGVKSLDTSMYVKEFLISSSQDGHQWTLFFQNGKVKVFQGNQDSFTPVVNSLDPPLLTRYLRIHPQSWEHQIALRMEVLGCEAQDLY

SEQ ID NO: 2347 - protein, 15 aa, synthetic construct
  REGION 1..15: note = Peptide
ISPITFLTAQTLLMD

SEQ ID NO: 2348 - protein, 15 aa, synthetic construct
  REGION 1..15: note = Mutant Peptide
ISPITFLTAQTGLMD

SEQ ID NO: 2349 - DNA, 4254 bp, synthetic construct
  misc_feature 1..4254: note = Variant of human B-domain deleted Factor VIII
  source 1..4254: mol_type = other DNA
atgcagattgaactgtctacctgcttcttcctctgtttgctgaggttctgctttagcgccactagacggtactaccttggcgctgtggagctgtcctgggactatatgcagagtgatttgggagagcttcccgtcgacgcacgatttcctcctcgcgttccaaagtcatttcccttcaacacaagcgtggtgtacaagaagacgctcttcgtcgaattcaccgatcacctgttcaatatcgccaaacccagaccaccatggatgggtcttttggggcctaccatacaagcggaggtgtatgacacagttgttatcactctcaagaacatggcttctcatccggtaagtcttcacgcagtgggcgtgtcctactggaaagcttcagaaggagccgagtatgatgatcagacatcccagagggagaaagaagacgacaaggtatttccaggtgggtctcatacctatgtgtggcaagtgctcaaagagaatggccctatggcaagcgatccgctctgtttgacttacagctacctttcacacgttgacctcgtcaaggacctcaactccgggttgattggagccttgttggtatgcagggaaggatctcttgccaaagagaagacacagaccctccacaagtttatccttctctttgctgtgttcgatgagggcaaaagttggcatagcgaaacgaagaattccctcatgcaggatcgcgacgcagccagcgccagagcttggcccaagatgcacactgtgaacggatatgtcaataggtcacttcctggcttgattgggtgtcatcggaaaagtgtctactggcacgtgatcggaatggggacaacaccagaggtccactccatatttctcgaaggccataccttccttgttcgaaaccacagacaggcatccttggagatctctcccattacctttctcactgcccaaacgctccttatggacttgggtcagttccttctcttctgccatatcagctcacaccagcatgatggtatggaagcttatgtgaaagtcgacagttgtcctgaggagccacagttgcgcatgaagaataatgaagaagccgaggattacgacgacgatctcaccgattctgagatggacgtggtgaggtttgatgacgacaactctccctccttcattcaaatccggagcgtggcgaagaaacaccccaagacttgggtccactatatagcggcggaagaggaggattgggattacgctcctcttgtattggcaccagatgaccgctcatacaaaagccagtacctcaacaacggaccgcagagaattggccggaagtataagaaagtgcgatttatggcctatacagacgaaacctttaagacaagggaggccatccagcatgagagtgggattttgggacctcttctttacggcgaagttggtgataccctcctcatcatcttcaagaatcaagcttctcgcccctataacatttacccacacgggatcactgacgttaggcctttgtatagcagaagacttcccaaaggcgtgaagcatctcaaagacttccccattttgccaggcgagatctttaagtacaaatggaccgtcacagtggaagatggaccgactaaatcagaccctcgatgccttacgcggtactattcctccttcgtgaatatggagagagatttggcaagcggactcataggaccactcctcatctgttacaaggaatctgtagaccagaggggtaaccagattatgagtgataaacgcaatgtgatcctttttagcgtcttcgacgagaaccggtcctggtacttgaccgagaatatacaaaggttccttcccaaccccgcaggcgttcagttggaagaccctgagtttcaggccagcaatattatgcactcaatcaacggctatgtgtttgatagtctccagctttctgtttgcctccatgaagtagcctattggtacatcttgtcaattggtgctcaaacagacttcctctccgtcttcttctccggctacacctttaagcacaagatggtgtatgaggacactctcacactctttccattttctggagaaaccgtgttcatgagcatggagaatccaggcctttggatcttgggttgccacaacagtgattttcgcaatcggggaatgactgctctcctcaaagtcagcagctgtgataagaacacaggcgactattacgaagattcttacgaggacataagtgcctacttgttgtccaagaataacgccattgagcccagatcattctcccagaatcctcccgtgcttaaaaggcatcagcgccggagctttcagaagaagacgcgacactacttcattgcagcagtcgaaaggctttgggactacggtatgtcatcatcccctcatgtgttgcgcaatagagctcagagtggaagtgttccacagttcaagaaagtcgtctttcaagagtttacagatggcagcttcacacagcctctctatcggggcgagcttaacgaacatttgggactccttggtccctatatccgagccgaagtggaggacaacattatggttacctttaggaatcaagcctctcgcccctacagcttctactcctccctcatcagttatgaggaggatcagagacaaggcgctgaaccacggaagaactttgtgaaaccgaatgagacgaagacctacttctggaaagtacagcaccacatggcccccacaaaagacgaattcgattgcaaagcatgggcgtatttttcagacgttgacttggagaaagatgtacattcaggacttattggtcctttgttggtgtgtcacactaacactctcaatccagcccatggcaggcaggtgacagtccaggaattcgctcttttctttaccatctttgatgagaccaagtcctggtacttcacggaaaacatggagcgcaattgcagagccccctgtaacatacagatggaggaccctacctttaaggaaaattatcggttccacgcaatcaacggatacattatggatacactccctggccttgtgatggctcaggaccaacgaatcaggtggtacctcctcagcatgggttctaatgagaacatacactccattcacttttcaggacatgtgttcactgtccggaagaaagaagagtataagatggccctctacaatttgtatccaggcgtgtttgagaccgttgaaatgcttccctctaaagctggcatctggagagtagagtgcttgatcggagaacatcttcacgcaggtatgagcaccttgttcctcgtgtacagcaacaaatgtcagaccccacttggcatggccagtggacacattcgcgactttcagatcacagcatctggccagtatggacaatgggccccaaagttggctcgcctccattactccggtagcataaatgcgtggtccactaaagaacctttcagctggattaaggtcgatcttcttgcccccatgatcatccacggcattaagacacagggagcgaggcagaaattctcctccctctacatctcacagttcattattatgtatagtttggacggcaagaagtggcaaacttatagaggtaacagtactggaacactcatggtgttcttcggcaacgttgatagctctggcatcaaacacaacatctttaatcctcccataatagctcggtacatcagattgcatccgacccactacagcattaggagtacactccgaatggagcttatgggttgcgacttgaattcctgttcaatgccactcggaatggagtctaaagccatctctgatgcacagataaccgccagtagctactttacgaacatgtttgctacgtggtcaccctctaaggcaaggcttcatttgcaaggccggtctaatgcctggagacctcaggtgaacaacccgaaagaatggctccaggtggactttcagaagaccatgaaagtaacaggtgtcactactcagggagttaagtccttgctcaccagcatgtatgtgaaggagttccttatttcctcatcacaagatggccaccagtggaccctcttctttcagaatggtaaggtcaaagtgtttcagggcaatcaagacagcttcacacccgtggtgaacagtcttgatcctccactcttgacacgataccttcgaatccatccacagtcttgggttcaccagattgcattgcgcatggaagtacttggatgcgaggctcaggacctctactag

SEQ ID NO: 2350 - protein, 1417 aa, synthetic construct
  REGION 1..1417: note = Variant of human B-domain deleted Factor VIII
MQIELSTCFFLCLLRFCFSATRRYYLGAVELSWDYMQSDLGELPVDARFPPRVPKSFPFNTSVVYKKTLFVEFTDHLFNIAKPRPPWMGLLGPTIQAEVYDTVVITLKNMASHPVSLHAVGVSYWKASEGAEYDDQTSQREKEDDKVFPGGSHTYVWQVLKENGPMASDPLCLTYSYLSHVDLVKDLNSGLIGALLVCREGSLAKEKTQTLHKFILLFAVFDEGKSWHSETKNSLMQDRDAASARAWPKMHTVNGYVNRSLPGLIGCHRKSVYWHVIGMGTTPEVHSIFLEGHTFLVRNHRQASLEISPITFLTAQTLLMDLGQFLLFCHISSHQHDGMEAYVKVDSCPEEPQLRMKNNEEAEDYDDDLTDSEMDVVRFDDDNSPSFIQIRSVAKKHPKTWVHYIAAEEEDWDYAPLVLAPDDRSYKSQYLNNGPQRIGRKYKKVRFMAYTDETFKTREAIQHESGILGPLLYGEVGDTLLIIFKNQASRPYNIYPHGITDVRPLYSRRLPKGVKHLKDFPILPGEIFKYKWTVTVEDGPTKSDPRCLTRYYSSFVNMERDLASGLIGPLLICYKESVDQRGNQIMSDKRNVILFSVFDENRSWYLTENIQRFLPNPAGVQLEDPEFQASNIMHSINGYVFDSLQLSVCLHEVAYWYILSIGAQTDFLSVFFSGYTFKHKMVYEDTLTLFPFSGETVFMSMENPGLWILGCHNSDFRNRGMTALLKVSSCDKNTGDYYEDSYEDISAYLLSKNNAIEPRSFSQNPPVLKRHQRRSFQKKTRHYFIAAVERLWDYGMSSSPHVLRNRAQSGSVPQFKKVVFQEFTDGSFTQPLYRGELNEHLGLLGPYIRAEVEDNIMVTFRNQASRPYSFYSSLISYEEDQRQGAEPRKNFVKPNETKTYFWKVQHHMAPTKDEFDCKAWAYFSDVDLEKDVHSGLIGPLLVCHTNTLNPAHGRQVTVQEFALFFTIFDETKSWYFTENMERNCRAPCNIQMEDPTFKENYRFHAINGYIMDTLPGLVMAQDQRIRWYLLSMGSNENIHSIHFSGHVFTVRKKEEYKMALYNLYPGVFETVEMLPSKAGIWRVECLIGEHLHAGMSTLFLVYSNKCQTPLGMASGHIRDFQITASGQYGQWAPKLARLHYSGSINAWSTKEPFSWIKVDLLAPMIIHGIKTQGARQKFSSLYISQFIIMYSLDGKKWQTYRGNSTGTLMVFFGNVDSSGIKHNIFNPPIIARYIRLHPTHYSIRSTLRMELMGCDLNSCSMPLGMESKAISDAQITASSYFTNMFATWSPSKARLHLQGRSNAWRPQVNNPKEWLQVDFQKTMKVTGVTTQGVKSLLTSMYVKEFLISSSQDGHQWTLFFQNGKVKVFQGNQDSFTPVVNSLDPPLLTRYLRIHPQSWVHQIALRMEVLGCEAQDLY

SEQ ID NO: 2351 - DNA, 4332 bp, synthetic construct
  misc_feature 1..4332: note = Variant of human B-domain deleted Factor VIII
  source 1..4332: mol_type = other DNA
atgcagattgaactgtctacctgcttcttcctctgtttgctgaggttctgctttagcgccactagacggtactaccttggcgctgtggagctgtcctgggactatatgcagagtgatttgggagagcttcccgtcgacgcacgatttcctcctcgcgttccaaagtcatttcccttcaacacaagcgtggtgtacaagaagacgctcttcgtcgaattcaccgatcacctgttcaatatcgccaaacccagaccaccatggatgggtcttttggggcctaccatacaagcggaggtgtatgacacagttgttatcactctcaagaacatggcttctcatccggtaagtcttcacgcagtgggcgtgtcctactggaaagcttcagaaggagccgagtatgatgatcagacatcccagagggagaaagaagacgacaaggtatttccaggtgggtctcatacctatgtgtggcaagtgctcaaagagaatggccctatggcaagcgatccgctctgtttgacttacagctacctttcacacgttgacctcgtcaaggacctcaactccgggttgattggagccttgttggtatgcagggaaggatctcttgccaaagagaagacacagaccctccacaagtttatccttctctttgctgtgttcgatgagggcaaaagttggcatagcgaaacgaagaattccctcatgcaggatcgcgacgcagccagcgccagagcttggcccaagatgcacactgtgaacggatatgtcaataggtcacttcctggcttgattgggtgtcatcggaaaagtgtctactggcacgtgatcggaatggggacaacaccagaggtccactccatatttctcgaaggccataccttccttgttcgaaaccacagacaggcatccttggagatctctcccattacctttctcactgcccaaacgctccttatggacttgggtcagttccttctcttctgccatatcagctcacaccagcatgatggtatggaagcttatgtgaaagtcgacagttgtcctgaggagccacagttgcgcatgaagaataatgaagaagccgaggattacgacgacgatctcaccgattctgagatggacgtggtgaggtttgatgacgacaactctccctccttcattcaaatccggagcgtggcgaagaaacaccccaagacttgggtccactatatagcggcggaagaggaggattgggattacgctcctcttgtattggcaccagatgaccgctcatacaaaagccagtacctcaacaacggaccgcagagaattggccggaagtataagaaagtgcgatttatggcctatacagacgaaacctttaagacaagggaggccatccagcatgagagtgggattttgggacctcttctttacggcgaagttggtgataccctcctcatcatcttcaagaatcaagcttctcgcccctataacatttacccacacgggatcactgacgttaggcctttgtatagcagaagacttcccaaaggcgtgaagcatctcaaagacttccccattttgccaggcgagatctttaagtacaaatggaccgtcacagtggaagatggaccgactaaatcagaccctcgatgccttacgcggtactattcctccttcgtgaatatggagagagatttggcaagcggactcataggaccactcctcatctgttacaaggaatctgtagaccagaggggtaaccagattatgagtgataaacgcaatgtgatcctttttagcgtcttcgacgagaaccggtcctggtacttgaccgagaatatacaaaggttccttcccaaccccgcaggcgttcagttggaagaccctgagtttcaggccagcaatattatgcactcaatcaacggctatgtgtttgatagtctccagctttctgtttgcctccatgaagtagcctattggtacatcttgtcaattggtgctcaaacagacttcctctccgtcttcttctccggctacacctttaagcacaagatggtgtatgaggacactctcacactctttccattttctggagaaaccgtgttcatgagcatggagaatccaggcctttggatcttgggttgccacaacagtgattttcgcaatcggggaatgactgctctcctcaaagtcagcagctgtgataagaacacaggcgactattacgaagattcttacgaggacataagtgcctacttgttgtccaagaataacgccattgagcccagagaaatcaccagaactactcttcagtctgatcaagaggagattgactatgacgacaccataagcgtggaaatgaagaaggaggatttcgatatctatgacgaagatgagaaccagtctccgcggagctttcagaagaagacgcgacactacttcattgcagcagtcgaaaggctttgggactacggtatgtcatcatcccctcatgtgttgcgcaatagagctcagagtggaagtgttccacagttcaagaaagtcgtctttcaagagtttacagatggcagcttcacacagcctctctatcggggcgagcttaacgaacatttgggactccttggtccctatatccgagccgaagtggaggacaacattatggttacctttaggaatcaagcctctcgcccctacagcttctactcctccctcatcagttatgaggaggatcagagacaaggcgctgaaccacggaagaactttgtgaaaccgaatgagacgaagacctacttctggaaagtacagcaccacatggcccccacaaaagacgaattcgattgcaaagcatgggcgtatttttcagacgttgacttggagaaagatgtacattcaggacttattggtcctttgttggtgtgtcacactaacactctcaatccagcccatggcaggcaggtgacagtccaggaattcgctcttttctttaccatctttgatgagaccaagtcctggtacttcacggaaaacatggagcgcaattgcagagccccctgtaacatacagatggaggaccctacctttaaggaaaattatcggttccacgcaatcaacggatacattatggatacactccctggccttgtgatggctcaggaccaacgaatcaggtggtacctcctcagcatgggttctaatgagaacatacactccattcacttttcaggacatgtgttcactgtccggaagaaagaagagtataagatggccctctacaatttgtatccaggcgtgtttgagaccgttgaaatgcttccctctaaagctggcatctggagagtagagtgcttgatcggagaacatcttcacgcaggtatgagcaccttgttcctcgtgtacagcaacaaatgtcagaccccacttggcatggccagtggacacattcgcgactttcagatcacagcatctggccagtatggacaatgggccccaaagttggctcgcctccattactccggtagcataaatgcgtggtccactaaagaacctttcagctggattaaggtcgatcttcttgcccccatgatcatccacggcattaagacacagggagcgaggcagaaattctcctccctctacatctcacagttcattattatgtatagtttggacggcaagaagtggcaaacttatagaggtaacagtactggaacactcatggtgttcttcggcaacgttgatagctctggcatcaaacacaacatctttaatcctcccataatagctcggtacatcagattgcatccgacccactacagcattaggagtacactccgaatggagcttatgggttgcgacttgaattcctgttcaatgccactcggaatggagtctaaagccatctctgatgcacagataaccgccagtagctactttacgaacatgtttgctacgtggtcaccctctaaggcaaggcttcatttgcaaggccggtctaatgcctggagacctcaggtgaacaacccgaaagaatggctccaggtggactttcagaagaccatgaaagtaacaggtgtcactactcagggagttaagtccttgctcaccagcatgtatgtgaaggagttccttatttcctcatcacaagatggccaccagtggaccctcttctttcagaatggtaaggtcaaagtgtttcagggcaatcaagacagcttcacacccgtggtgaacagtcttgatcctccactcttgacacgataccttcgaatccatccacagtcttgggttcaccagattgcattgcgcatggaagtacttggatgcgaggctcaggacctctactag

SEQ ID NO: 2352 - protein, 1443 aa, synthetic construct
  REGION 1..1443: note = Variant of human B-domain deleted Factor VIII
MQIELSTCFFLCLLRFCFSATRRYYLGAVELSWDYMQSDLGELPVDARFPPRVPKSFPFNTSVVYKKTLFVEFTDHLFNIAKPRPPWMGLLGPTIQAEVYDTVVITLKNMASHPVSLHAVGVSYWKASEGAEYDDQTSQREKEDDKVFPGGSHTYVWQVLKENGPMASDPLCLTYSYLSHVDLVKDLNSGLIGALLVCREGSLAKEKTQTLHKFILLFAVFDEGKSWHSETKNSLMQDRDAASARAWPKMHTVNGYVNRSLPGLIGCHRKSVYWHVIGMGTTPEVHSIFLEGHTFLVRNHRQASLEISPITFLTAQTLLMDLGQFLLFCHISSHQHDGMEAYVKVDSCPEEPQLRMKNNEEAEDYDDDLTDSEMDVVRFDDDNSPSFIQIRSVAKKHPKTWVHYIAAEEEDWDYAPLVLAPDDRSYKSQYLNNGPQRIGRKYKKVRFMAYTDETFKTREAIQHESGILGPLLYGEVGDTLLIIFKNQASRPYNIYPHGITDVRPLYSRRLPKGVKHLKDFPILPGEIFKYKWTVTVEDGPTKSDPRCLTRYYSSFVNMERDLASGLIGPLLICYKESVDQRGNQIMSDKRNVILFSVFDENRSWYLTENIQRFLPNPAGVQLEDPEFQASNIMHSINGYVFDSLQLSVCLHEVAYWYILSIGAQTDFLSVFFSGYTFKHKMVYEDTLTLFPFSGETVFMSMENPGLWILGCHNSDFRNRGMTALLKVSSCDKNTGDYYEDSYEDISAYLLSKNNAIEPREITRTTLQSDQEEIDYDDTISVEMKKEDFDIYDEDENQSPRSFQKKTRHYFIAAVERLWDYGMSSSPHVLRNRAQSGSVPQFKKVVFQEFTDGSFTQPLYRGELNEHLGLLGPYIRAEVEDNIMVTFRNQASRPYSFYSSLISYEEDQRQGAEPRKNFVKPNETKTYFWKVQHHMAPTKDEFDCKAWAYFSDVDLEKDVHSGLIGPLLVCHTNTLNPAHGRQVTVQEFALFFTIFDETKSWYFTENMERNCRAPCNIQMEDPTFKENYRFHAINGYIMDTLPGLVMAQDQRIRWYLLSMGSNENIHSIHFSGHVFTVRKKEEYKMALYNLYPGVFETVEMLPSKAGIWRVECLIGEHLHAGMSTLFLVYSNKCQTPLGMASGHIRDFQITASGQYGQWAPKLARLHYSGSINAWSTKEPFSWIKVDLLAPMIIHGIKTQGARQKFSSLYISQFIIMYSLDGKKWQTYRGNSTGTLMVFFGNVDSSGIKHNIFNPPIIARYIRLHPTHYSIRSTLRMELMGCDLNSCSMPLGMESKAISDAQITASSYFTNMFATWSPSKARLHLQGRSNAWRPQVNNPKEWLQVDFQKTMKVTGVTTQGVKSLLTSMYVKEFLISSSQDGHQWTLFFQNGKVKVFQGNQDSFTPVVNSLDPPLLTRYLRIHPQSWVHQIALRMEVLGCEAQDLY

SEQ ID NO: 2353 - DNA, 4332 bp, synthetic construct
  misc_feature 1..4332: note = Variant of human B-domain deleted Factor VIII
  source 1..4332: mol_type = other DNA
atgcagattgaactgtctacctgcttcttcctctgtttgctgaggttctgctttagcgccactagacggtactaccttggcgctgtggagctgtcctgggactatatgcagagtgatttgggagagcttcccgtcgacgcacgatttcctcctcgcgttccaaagtcatttcccttcaacacaagcgtggtgtacaagaagacgctcttcgtcgaattcaccgatcacctgttcaatatcgccaaacccagaccaccatggatgggtcttttggggcctaccatacaagcggaggtgtatgacacagttgttatcactctcaagaacatggcttctcatccggtaagtcttcacgcagtgggcgtgtcctactggaaagcttcagaaggagccgagtatgatgatcagacatcccagagggagaaagaagacgacaaggtatttccaggtgggtctcatacctatgtgtggcaagtgctcaaagagaatggccctatggcaagcgatccgctctgtttgacttacagctacctttcacacgttgacctcgtcaaggacctcaactccgggttgattggagccttgttggtatgcagggaaggatctcttgccaaagagaagacacagaccctccacaagtttatccttctctttgctgtgttcgatgagggcaaaagttggcatagcgaaacgaagaattccctcatgcaggatcgcgacgcagccagcgccagagcttggcccaagatgcacactgtgaacggatatgtcaataggtcacttcctggcttgattgggtgtcatcggaaaagtgtctactggcacgtgatcggaatggggacaacaccagaggtccactccatatttctcgaaggccataccttccttgttcgaaaccacagacaggcatccttggagatctctcccattacctttctcactgcccaaacgctccttatggacttgggtcagttccttctcttctgccatatcagctcacaccagcatgatggtatggaagcttatgtgaaagtcgacagttgtcctgaggagccacagttgcgcatgaagaataatgaagaagccgaggattacgacgacgatctcaccgattctgagatggacgtggtgaggtttgatgacgacaactctccctccttcattcaaatccggagcgtggcgaagaaacaccccaagacttgggtccactatatagcggcggaagaggaggattgggattacgctcctcttgtattggcaccagatgaccgctcatacaaaagccagtacctcaacaacggaccgcagagaattggccggaagtataagaaagtgcgatttatggcctatacagacgaaacctttaagacaagggaggccatccagcatgagagtgggattttgggacctcttctttacggcgaagttggtgataccctcctcatcatcttcaagaatcaagcttctcgcccctataacatttacccacacgggatcactgacgttaggcctttgtatagcagaagacttcccaaaggcgtgaagcatctcaaagacttccccattttgccaggcgagatctttaagtacaaatggaccgtcacagtggaagatggaccgactaaatcagaccctcgatgccttacgcggtactattcctccttcgtgaatatggagagagatttggcaagcggactcataggaccactcctcatctgttacaaggaatctgtagaccagaggggtaaccagattatgagtgataaacgcaatgtgatcctttttagcgtcttcgacgagaaccggtcctggtacttgaccgagaatatacaaaggttccttcccaaccccgcaggcgttcagttggaagaccctgagtttcaggccagcaatattatgcactcaatcaacggctatgtgtttgatagtctccagctttctgtttgcctccatgaagtagcctattggtacatcttgtcaattggtgctcaaacagacttcctctccgtcttcttctccggctacacctttaagcacaagatggtgtatgaggacactctcacactctttccattttctggagaaaccgtgttcatgagcatggagaatccaggcctttggatcttgggttgccacaacagtgattttcgcaatcggggaatgactgctctcctcaaagtcagcagctgtgataagaacacaggcgactattacgaagattcttacgaggacagatcattctcccagaatcctcccgtgcttaaaaggcatcagcgcgaaatcaccagaactactcttcagtctgatcaagaggagattgactatgacgacaccataagcgtggaaatgaagaaggaggatttcgatatctatgacgaagatgagaaccagtctccgcggagctttcagaagaagacgcgacactacttcattgcagcagtcgaaaggctttgggactacggtatgtcatcatcccctcatgtgttgcgcaatagagctcagagtggaagtgttccacagttcaagaaagtcgtctttcaagagtttacagatggcagcttcacacagcctctctatcggggcgagcttaacgaacatttgggactccttggtccctatatccgagccgaagtggaggacaacattatggttacctttaggaatcaagcctctcgcccctacagcttctactcctccctcatcagttatgaggaggatcagagacaaggcgctgaaccacggaagaactttgtgaaaccgaatgagacgaagacctacttctggaaagtacagcaccacatggcccccacaaaagacgaattcgattgcaaagcatgggcgtatttttcagacgttgacttggagaaagatgtacattcaggacttattggtcctttgttggtgtgtcacactaacactctcaatccagcccatggcaggcaggtgacagtccaggaattcgctcttttctttaccatctttgatgagaccaagtcctggtacttcacggaaaacatggagcgcaattgcagagccccctgtaacatacagatggaggaccctacctttaaggaaaattatcggttccacgcaatcaacggatacattatggatacactccctggccttgtgatggctcaggaccaacgaatcaggtggtacctcctcagcatgggttctaatgagaacatacactccattcacttttcaggacatgtgttcactgtccggaagaaagaagagtataagatggccctctacaatttgtatccaggcgtgtttgagaccgttgaaatgcttccctctaaagctggcatctggagagtagagtgcttgatcggagaacatcttcacgcaggtatgagcaccttgttcctcgtgtacagcaacaaatgtcagaccccacttggcatggccagtggacacattcgcgactttcagatcacagcatctggccagtatggacaatgggccccaaagttggctcgcctccattactccggtagcataaatgcgtggtccactaaagaacctttcagctggattaaggtcgatcttcttgcccccatgatcatccacggcattaagacacagggagcgaggcagaaattctcctccctctacatctcacagttcattattatgtatagtttggacggcaagaagtggcaaacttatagaggtaacagtactggaacactcatggtgttcttcggcaacgttgatagctctggcatcaaacacaacatctttaatcctcccataatagctcggtacatcagattgcatccgacccactacagcattaggagtacactccgaatggagcttatgggttgcgacttgaattcctgttcaatgccactcggaatggagtctaaagccatctctgatgcacagataaccgccagtagctactttacgaacatgtttgctacgtggtcaccctctaaggcaaggcttcatttgcaaggccggtctaatgcctggagacctcaggtgaacaacccgaaagaatggctccaggtggactttcagaagaccatgaaagtaacaggtgtcactactcagggagttaagtccttgctcaccagcatgtatgtgaaggagttccttatttcctcatcacaagatggccaccagtggaccctcttctttcagaatggtaaggtcaaagtgtttcagggcaatcaagacagcttcacacccgtggtgaacagtcttgatcctccactcttgacacgataccttcgaatccatccacagtcttgggttcaccagattgcattgcgcatggaagtacttggatgcgaggctcaggacctctactag

SEQ ID NO: 2354 - protein, 1443 aa, synthetic construct
  REGION 1..1443: note = Variant of human B-domain deleted Factor VIII
MQIELSTCFFLCLLRFCFSATRRYYLGAVELSWDYMQSDLGELPVDARFPPRVPKSFPFNTSVVYKKTLFVEFTDHLFNIAKPRPPWMGLLGPTIQAEVYDTVVITLKNMASHPVSLHAVGVSYWKASEGAEYDDQTSQREKEDDKVFPGGSHTYVWQVLKENGPMASDPLCLTYSYLSHVDLVKDLNSGLIGALLVCREGSLAKEKTQTLHKFILLFAVFDEGKSWHSETKNSLMQDRDAASARAWPKMHTVNGYVNRSLPGLIGCHRKSVYWHVIGMGTTPEVHSIFLEGHTFLVRNHRQASLEISPITFLTAQTLLMDLGQFLLFCHISSHQHDGMEAYVKVDSCPEEPQLRMKNNEEAEDYDDDLTDSEMDVVRFDDDNSPSFIQIRSVAKKHPKTWVHYIAAEEEDWDYAPLVLAPDDRSYKSQYLNNGPQRIGRKYKKVRFMAYTDETFKTREAIQHESGILGPLLYGEVGDTLLIIFKNQASRPYNIYPHGITDVRPLYSRRLPKGVKHLKDFPILPGEIFKYKWTVTVEDGPTKSDPRCLTRYYSSFVNMERDLASGLIGPLLICYKESVDQRGNQIMSDKRNVILFSVFDENRSWYLTENIQRFLPNPAGVQLEDPEFQASNIMHSINGYVFDSLQLSVCLHEVAYWYILSIGAQTDFLSVFFSGYTFKHKMVYEDTLTLFPFSGETVFMSMENPGLWILGCHNSDFRNRGMTALLKVSSCDKNTGDYYEDSYEDRSFSQNPPVLKRHQREITRTTLQSDQEEIDYDDTISVEMKKEDFDIYDEDENQSPRSFQKKTRHYFIAAVERLWDYGMSSSPHVLRNRAQSGSVPQFKKVVFQEFTDGSFTQPLYRGELNEHLGLLGPYIRAEVEDNIMVTFRNQASRPYSFYSSLISYEEDQRQGAEPRKNFVKPNETKTYFWKVQHHMAPTKDEFDCKAWAYFSDVDLEKDVHSGLIGPLLVCHTNTLNPAHGRQVTVQEFALFFTIFDETKSWYFTENMERNCRAPCNIQMEDPTFKENYRFHAINGYIMDTLPGLVMAQDQRIRWYLLSMGSNENIHSIHFSGHVFTVRKKEEYKMALYNLYPGVFETVEMLPSKAGIWRVECLIGEHLHAGMSTLFLVYSNKCQTPLGMASGHIRDFQITASGQYGQWAPKLARLHYSGSINAWSTKEPFSWIKVDLLAPMIIHGIKTQGARQKFSSLYISQFIIMYSLDGKKWQTYRGNSTGTLMVFFGNVDSSGIKHNIFNPPIIARYIRLHPTHYSIRSTLRMELMGCDLNSCSMPLGMESKAISDAQITASSYFTNMFATWSPSKARLHLQGRSNAWRPQVNNPKEWLQVDFQKTMKVTGVTTQGVKSLLTSMYVKEFLISSSQDGHQWTLFFQNGKVKVFQGNQDSFTPVVNSLDPPLLTRYLRIHPQSWVHQIALRMEVLGCEAQDLY

SEQ ID NO: 2355 - DNA, 4350 bp, synthetic construct
  misc_feature 1..4350: note = Variant of human B-domain deleted Factor VIII
  source 1..4350: mol_type = other DNA
atgcagattgaactgtctacctgcttcttcctctgtttgctgaggttctgctttagcgccactagacggtactaccttggcgctgtggagctgtcctgggactatatgcagagtgatttgggagagcttcccgtcgacgcacgatttcctcctcgcgttccaaagtcatttcccttcaacacaagcgtggtgtacaagaagacgctcttcgtcgaattcaccgatcacctgttcaatatcgccaaacccagaccaccatggatgggtcttttggggcctaccatacaagcggaggtgtatgacacagttgttatcactctcaagaacatggcttctcatccggtaagtcttcacgcagtgggcgtgtcctactggaaagcttcagaaggagccgagtatgatgatcagacatcccagagggagaaagaagacgacaaggtatttccaggtgggtctcatacctatgtgtggcaagtgctcaaagagaatggccctatggcaagcgatccgctctgtttgacttacagctacctttcacacgttgacctcgtcaaggacctcaactccgggttgattggagccttgttggtatgcagggaaggatctcttgccaaagagaagacacagaccctccacaagtttatccttctctttgctgtgttcgatgagggcaaaagttggcatagcgaaacgaagaattccctcatgcaggatcgcgacgcagccagcgccagagcttggcccaagatgcacactgtgaacggatatgtcaataggtcacttcctggcttgattgggtgtcatcggaaaagtgtctactggcacgtgatcggaatggggacaacaccagaggtccactccatatttctcgaaggccataccttccttgttcgaaaccacagacaggcatccttggagatctctcccattacctttctcactgcccaaacgctccttatggacttgggtcagttccttctcttctgccatatcagctcacaccagcatgatggtatggaagcttatgtgaaagtcgacagttgtcctgaggagccacagttgcgcatgaagaataatgaagaagccgaggattacgacgacgatctcaccgattctgagatggacgtggtgaggtttgatgacgacaactctccctccttcattcaaatccggagcgtggcgaagaaacaccccaagacttgggtccactatatagcggcggaagaggaggattgggattacgctcctcttgtattggcaccagatgaccgctcatacaaaagccagtacctcaacaacggaccgcagagaattggccggaagtataagaaagtgcgatttatggcctatacagacgaaacctttaagacaagggaggccatccagcatgagagtgggattttgggacctcttctttacggcgaagttggtgataccctcctcatcatcttcaagaatcaagcttctcgcccctataacatttacccacacgggatcactgacgttaggcctttgtatagcagaagacttcccaaaggcgtgaagcatctcaaagacttccccattttgccaggcgagatctttaagtacaaatggaccgtcacagtggaagatggaccgactaaatcagaccctcgatgccttacgcggtactattcctccttcgtgaatatggagagagatttggcaagcggactcataggaccactcctcatctgttacaaggaatctgtagaccagaggggtaaccagattatgagtgataaacgcaatgtgatcctttttagcgtcttcgacgagaaccggtcctggtacttgaccgagaatatacaaaggttccttcccaaccccgcaggcgttcagttggaagaccctgagtttcaggccagcaatattatgcactcaatcaacggctatgtgtttgatagtctccagctttctgtttgcctccatgaagtagcctattggtacatcttgtcaattggtgctcaaacagacttcctctccgtcttcttctccggctacacctttaagcacaagatggtgtatgaggacactctcacactctttccattttctggagaaaccgtgttcatgagcatggagaatccaggcctttggatcttgggttgccacaacagtgattttcgcaatcggggaatgactgctctcctcaaagtcagcagctgtgataagaacacaggcgactattacgaagattcttacgaggacataagtgcctacttgttgtccaagaataacgccattgagcccagatcaaaaaggcatcagcgcgaaatcaccagaactactcttcagtctgatcaagaggagattgactatgacgacaccataagcgtggaaatgaagaaggaggatttcgatatctatgacgaagatgagaaccagtctccgcggagctttcagaagaagacgcgacactacttcattgcagcagtcgaaaggctttgggactacggtatgtcatcatcccctcatgtgttgcgcaatagagctcagagtggaagtgttccacagttcaagaaagtcgtctttcaagagtttacagatggcagcttcacacagcctctctatcggggcgagcttaacgaacatttgggactccttggtccctatatccgagccgaagtggaggacaacattatggttacctttaggaatcaagcctctcgcccctacagcttctactcctccctcatcagttatgaggaggatcagagacaaggcgctgaaccacggaagaactttgtgaaaccgaatgagacgaagacctacttctggaaagtacagcaccacatggcccccacaaaagacgaattcgattgcaaagcatgggcgtatttttcagacgttgacttggagaaagatgtacattcaggacttattggtcctttgttggtgtgtcacactaacactctcaatccagcccatggcaggcaggtgacagtccaggaattcgctcttttctttaccatctttgatgagaccaagtcctggtacttcacggaaaacatggagcgcaattgcagagccccctgtaacatacagatggaggaccctacctttaaggaaaattatcggttccacgcaatcaacggatacattatggatacactccctggccttgtgatggctcaggaccaacgaatcaggtggtacctcctcagcatgggttctaatgagaacatacactccattcacttttcaggacatgtgttcactgtccggaagaaagaagagtataagatggccctctacaatttgtatccaggcgtgtttgagaccgttgaaatgcttccctctaaagctggcatctggagagtagagtgcttgatcggagaacatcttcacgcaggtatgagcaccttgttcctcgtgtacagcaacaaatgtcagaccccacttggcatggccagtggacacattcgcgactttcagatcacagcatctggccagtatggacaatgggccccaaagttggctcgcctccattactccggtagcataaatgcgtggtccactaaagaacctttcagctggattaaggtcgatcttcttgcccccatgatcatccacggcattaagacacagggagcgaggcagaaattctcctccctctacatctcacagttcattattatgtatagtttggacggcaagaagtggcaaacttatagaggtaacagtactggaacactcatggtgttcttcggcaacgttgatagctctggcatcaaacacaacatctttaatcctcccataatagctcggtacatcagattgcatccgacccactacagcattaggagtacactccgaatggagcttatgggttgcgacttgaattcctgttcaatgccactcggaatggagtctaaagccatctctgatgcacagataaccgccagtagctactttacgaacatgtttgctacgtggtcaccctctaaggcaaggcttcatttgcaaggccggtctaatgcctggagacctcaggtgaacaacccgaaagaatggctccaggtggactttcagaagaccatgaaagtaacaggtgtcactactcagggagttaagtccttgctcaccagcatgtatgtgaaggagttccttatttcctcatcacaagatggccaccagtggaccctcttctttcagaatggtaaggtcaaagtgtttcagggcaatcaagacagcttcacacccgtggtgaacagtcttgatcctccactcttgacacgataccttcgaatccatccacagtcttgggttcaccagattgcattgcgcatggaagtacttggatgcgaggctcaggacctctactag

SEQ ID NO: 2356 - protein, 1449 aa, synthetic construct
  REGION 1..1449: note = Variant of human B-domain deleted Factor VIII
MQIELSTCFFLCLLRFCFSATRRYYLGAVELSWDYMQSDLGELPVDARFPPRVPKSFPFNTSVVYKKTLFVEFTDHLFNIAKPRPPWMGLLGPTIQAEVYDTVVITLKNMASHPVSLHAVGVSYWKASEGAEYDDQTSQREKEDDKVFPGGSHTYVWQVLKENGPMASDPLCLTYSYLSHVDLVKDLNSGLIGALLVCREGSLAKEKTQTLHKFILLFAVFDEGKSWHSETKNSLMQDRDAASARAWPKMHTVNGYVNRSLPGLIGCHRKSVYWHVIGMGTTPEVHSIFLEGHTFLVRNHRQASLEISPITFLTAQTLLMDLGQFLLFCHISSHQHDGMEAYVKVDSCPEEPQLRMKNNEEAEDYDDDLTDSEMDVVRFDDDNSPSFIQIRSVAKKHPKTWVHYIAAEEEDWDYAPLVLAPDDRSYKSQYLNNGPQRIGRKYKKVRFMAYTDETFKTREAIQHESGILGPLLYGEVGDTLLIIFKNQASRPYNIYPHGITDVRPLYSRRLPKGVKHLKDFPILPGEIFKYKWTVTVEDGPTKSDPRCLTRYYSSFVNMERDLASGLIGPLLICYKESVDQRGNQIMSDKRNVILFSVFDENRSWYLTENIQRFLPNPAGVQLEDPEFQASNIMHSINGYVFDSLQLSVCLHEVAYWYILSIGAQTDFLSVFFSGYTFKHKMVYEDTLTLFPFSGETVFMSMENPGLWILGCHNSDFRNRGMTALLKVSSCDKNTGDYYEDSYEDISAYLLSKNNAIEPRSKRHQREITRTTLQSDQEEIDYDDTISVEMKKEDFDIYDEDENQSPRSFQKKTRHYFIAAVERLWDYGMSSSPHVLRNRAQSGSVPQFKKVVFQEFTDGSFTQPLYRGELNEHLGLLGPYIRAEVEDNIMVTFRNQASRPYSFYSSLISYEEDQRQGAEPRKNFVKPNETKTYFWKVQHHMAPTKDEFDCKAWAYFSDVDLEKDVHSGLIGPLLVCHTNTLNPAHGRQVTVQEFALFFTIFDETKSWYFTENMERNCRAPCNIQMEDPTFKENYRFHAINGYIMDTLPGLVMAQDQRIRWYLLSMGSNENIHSIHFSGHVFTVRKKEEYKMALYNLYPGVFETVEMLPSKAGIWRVECLIGEHLHAGMSTLFLVYSNKCQTPLGMASGHIRDFQITASGQYGQWAPKLARLHYSGSINAWSTKEPFSWIKVDLLAPMIIHGIKTQGARQKFSSLYISQFIIMYSLDGKKWQTYRGNSTGTLMVFFGNVDSSGIKHNIFNPPIIARYIRLHPTHYSIRSTLRMELMGCDLNSCSMPLGMESKAISDAQITASSYFTNMFATWSPSKARLHLQGRSNAWRPQVNNPKEWLQVDFQKTMKVTGVTTQGVKSLLTSMYVKEFLISSSQDGHQWTLFFQNGKVKVFQGNQDSFTPVVNSLDPPLLTRYLRIHPQSWVHQIALRMEVLGCEAQDLY

SEQ ID NO: 2357 - DNA, 4356 bp, synthetic construct
  misc_feature 1..4356: note = Variant of human B-domain deleted Factor VIII
  source 1..4356: mol_type = other DNA
atgcagattgaactgtctacctgcttcttcctctgtttgctgaggttctgctttagcgccactagacggtactaccttggcgctgtggagctgtcctgggactatatgcagagtgatttgggagagcttcccgtcgacgcacgatttcctcctcgcgttccaaagtcatttcccttcaacacaagcgtggtgtacaagaagacgctcttcgtcgaattcaccgatcacctgttcaatatcgccaaacccagaccaccatggatgggtcttttggggcctaccatacaagcggaggtgtatgacacagttgttatcactctcaagaacatggcttctcatccggtaagtcttcacgcagtgggcgtgtcctactggaaagcttcagaaggagccgagtatgatgatcagacatcccagagggagaaagaagacgacaaggtatttccaggtgggtctcatacctatgtgtggcaagtgctcaaagagaatggccctatggcaagcgatccgctctgtttgacttacagctacctttcacacgttgacctcgtcaaggacctcaactccgggttgattggagccttgttggtatgcagggaaggatctcttgccaaagagaagacacagaccctccacaagtttatccttctctttgctgtgttcgatgagggcaaaagttggcatagcgaaacgaagaattccctcatgcaggatcgcgacgcagccagcgccagagcttggcccaagatgcacactgtgaacggatatgtcaataggtcacttcctggcttgattgggtgtcatcggaaaagtgtctactggcacgtgatcggaatggggacaacaccagaggtccactccatatttctcgaaggccataccttccttgttcgaaaccacagacaggcatccttggagatctctcccattacctttctcactgcccaaacgctccttatggacttgggtcagttccttctcttctgccatatcagctcacaccagcatgatggtatggaagcttatgtgaaagtcgacagttgtcctgaggagccacagttgcgcatgaagaataatgaagaagccgaggattacgacgacgatctcaccgattctgagatggacgtggtgaggtttgatgacgacaactctccctccttcattcaaatccggagcgtggcgaagaaacaccccaagacttgggtccactatatagcggcggaagaggaggattgggattacgctcctcttgtattggcaccagatgaccgctcatacaaaagccagtacctcaacaacggaccgcagagaattggccggaagtataagaaagtgcgatttatggcctatacagacgaaacctttaagacaagggaggccatccagcatgagagtgggattttgggacctcttctttacggcgaagttggtgataccctcctcatcatcttcaagaatcaagcttctcgcccctataacatttacccacacgggatcactgacgttaggcctttgtatagcagaagacttcccaaaggcgtgaagcatctcaaagacttccccattttgccaggcgagatctttaagtacaaatggaccgtcacagtggaagatggaccgactaaatcagaccctcgatgccttacgcggtactattcctccttcgtgaatatggagagagatttggcaagcggactcataggaccactcctcatctgttacaaggaatctgtagaccagaggggtaaccagattatgagtgataaacgcaatgtgatcctttttagcgtcttcgacgagaaccggtcctggtacttgaccgagaatatacaaaggttccttcccaaccccgcaggcgttcagttggaagaccctgagtttcaggccagcaatattatgcactcaatcaacggctatgtgtttgatagtctccagctttctgtttgcctccatgaagtagcctattggtacatcttgtcaattggtgctcaaacagacttcctctccgtcttcttctccggctacacctttaagcacaagatggtgtatgaggacactctcacactctttccattttctggagaaaccgtgttcatgagcatggagaatccaggcctttggatcttgggttgccacaacagtgattttcgcaatcggggaatgactgctctcctcaaagtcagcagctgtgataagaacacaggcgactattacgaagattcttacgaggacataagtgcctacttgttgtccaagaataacgccattgagcccagatcattctcccagaatcctcccgtgcttaaaaggcatcagcgcgaaatcaccagaactactcttcagtctgatcaagaggagattgactatgacgacaccataagcgtggaaatgaagaaggaggatttcgatatctatgacgaagatgagaaccagtctccgcggagctttcagaagaagacgcgacactacttcattgcagcagtcgaaaggctttgggactacggtatgtcatcatcccctcatgtgttgcgcaatagagctcagagtggaagtgttccacagttcaagaaagtcgtctttcaagagtttacagatggcagcttcacacagcctctctatcggggcgagcttaacgaacatttgggactccttggtccctatatccgagccgaagtggaggacaacattatggttacctttaggaatcaagcctctcgcccctacagcttctactcctccctcatcagttatgaggaggatcagagacaaggcgctgaaccacggaagaactttgtgaaaccgaatgagacgaagacctacttctggaaagtacagcaccacatggcccccacaaaagacgaattcgattgcaaagcatgggcgtatttttcagacgttgacttggagaaagatgtacattcaggacttattggtcctttgttggtgtgtcacactaacactctcaatccagcccatggcaggcaggtgacagtccaggaattcgctcttttctttaccatctttgatgagaccaagtcctggtacttcacggaaaacatggagcgcaattgcagagccccctgtaacatacagatggaggaccctacctttaaggaaaattatcggttccacgcaatcaacggatacattatggatacactccctggccttgtgatggctcaggaccaacgaatcaggtggtacctcctcagcatgggttctaatgagaacatacactccattcacttttcaggacatgtgttcactgtccggaagaaagaagagtataagatggccctctacaatttgtatccaggcgtgtttgagaccgttgaaatgcttccctctaaagctggcatctggagagtagagtgcttgatcggagaacatcttcacgcaggtatgagcaccttgttcctcgtgtacagcaacaaatgtcagaccccacttggcatggccagtggacacattcgcgactttcagatcacagcatctggccagtatggacaatgggccccaaagttggctcgcctccattactccggtagcataaatgcgtggtccactaaagaacctttcagctggattaaggtcgatcttcttgcccccatgatcatccacggcattaagacacagggagcgaggcagaaattctcctccctctacatctcacagttcattattatgtatagtttggacggcaagaagtggcaaacttatagaggtaacagtactggaacactcatggtgttcttcggcaacgttgatagctctggcatcaaacacaacatctttaatcctcccataatagctcggtacatcagattgcatccgacccactacagcattaggagtacactccgaatggagcttatgggttgcgacttgaattcctgttcaatgccactcggaatggagtctaaagccatctctgatgcacagataaccgccagtagctactttacgaacatgtttgctacgtggtcaccctctaaggcaaggcttcatttgcaaggccggtctaatgcctggagacctcaggtgaacaacccgaaagaatggctccaggtggactttcagaagaccatgaaagtaacaggtgtcactactcagggagttaagtccttgctcaccagcatgtatgtgaaggagttccttatttcctcatcacaagatggccaccagtggaccctcttctttcagaatggtaaggtcaaagtgtttcagggcaatcaagacagcttcacacccgtggtgaacagtcttgatcctccactcttgacacgataccttcgaatccatccacagtcttgggttcaccagattgcattgcgcatggaagtacttggatgctag

SEQ ID NO: 2358 - protein, 1451 aa, synthetic construct
  REGION 1..1451: note = Variant of human B-domain deleted Factor VIII
MQIELSTCFFLCLLRFCFSATRRYYLGAVELSWDYMQSDLGELPVDARFPPRVPKSFPFNTSVVYKKTLFVEFTDHLFNIAKPRPPWMGLLGPTIQAEVYDTVVITLKNMASHPVSLHAVGVSYWKASEGAEYDDQTSQREKEDDKVFPGGSHTYVWQVLKENGPMASDPLCLTYSYLSHVDLVKDLNSGLIGALLVCREGSLAKEKTQTLHKFILLFAVFDEGKSWHSETKNSLMQDRDAASARAWPKMHTVNGYVNRSLPGLIGCHRKSVYWHVIGMGTTPEVHSIFLEGHTFLVRNHRQASLEISPITFLTAQTLLMDLGQFLLFCHISSHQHDGMEAYVKVDSCPEEPQLRMKNNEEAEDYDDDLTDSEMDVVRFDDDNSPSFIQIRSVAKKHPKTWVHYIAAEEEDWDYAPLVLAPDDRSYKSQYLNNGPQRIGRKYKKVRFMAYTDETFKTREAIQHESGILGPLLYGEVGDTLLIIFKNQASRPYNIYPHGITDVRPLYSRRLPKGVKHLKDFPILPGEIFKYKWTVTVEDGPTKSDPRCLTRYYSSFVNMERDLASGLIGPLLICYKESVDQRGNQIMSDKRNVILFSVFDENRSWYLTENIQRFLPNPAGVQLEDPEFQASNIMHSINGYVFDSLQLSVCLHEVAYWYILSIGAQTDFLSVFFSGYTFKHKMVYEDTLTLFPFSGETVFMSMENPGLWILGCHNSDFRNRGMTALLKVSSCDKNTGDYYEDSYEDISAYLLSKNNAIEPRSFSQNPPVLKRHQREITRTTLQSDQEEIDYDDTISVEMKKEDFDIYDEDENQSPRSFQKKTRHYFIAAVERLWDYGMSSSPHVLRNRAQSGSVPQFKKVVFQEFTDGSFTQPLYRGELNEHLGLLGPYIRAEVEDNIMVTFRNQASRPYSFYSSLISYEEDQRQGAEPRKNFVKPNETKTYFWKVQHHMAPTKDEFDCKAWAYFSDVDLEKDVHSGLIGPLLVCHTNTLNPAHGRQVTVQEFALFFTIFDETKSWYFTENMERNCRAPCNIQMEDPTFKENYRFHAINGYIMDTLPGLVMAQDQRIRWYLLSMGSNENIHSIHFSGHVFTVRKKEEYKMALYNLYPGVFETVEMLPSKAGIWRVECLIGEHLHAGMSTLFLVYSNKCQTPLGMASGHIRDFQITASGQYGQWAPKLARLHYSGSINAWSTKEPFSWIKVDLLAPMIIHGIKTQGARQKFSSLYISQFIIMYSLDGKKWQTYRGNSTGTLMVFFGNVDSSGIKHNIFNPPIIARYIRLHPTHYSIRSTLRMELMGCDLNSCSMPLGMESKAISDAQITASSYFTNMFATWSPSKARLHLQGRSNAWRPQVNNPKEWLQVDFQKTMKVTGVTTQGVKSLLTSMYVKEFLISSSQDGHQWTLFFQNGKVKVFQGNQDSFTPVVNSLDPPLLTRYLRIHPQSWVHQIALRMEVLGC

SEQ ID NO: 2359 - DNA, 4371 bp, synthetic construct
  misc_feature 1..4371: note = Variant of human B-domain deleted Factor VIII
  source 1..4371: mol_type = other DNA
atgcagattgaactgtctacctgcttcttcctctgtttgctgaggttctgctttagcgccactagacggtactaccttggcgctgtggagctgtcctgggactatatgcagagtgatttgggagagcttcccgtcgacgcacgatttcctcctcgcgttccaaagtcatttcccttcaacacaagcgtggtgtacaagaagacgctcttcgtcgaattcaccgatcacctgttcaatatcgccaaacccagaccaccatggatgggtcttttggggcctaccatacaagcggaggtgtatgacacagttgttatcactctcaagaacatggcttctcatccggtaagtcttcacgcagtgggcgtgtcctactggaaagcttcagaaggagccgagtatgatgatcagacatcccagagggagaaagaagacgacaaggtatttccaggtgggtctcatacctatgtgtggcaagtgctcaaagagaatggccctatggcaagcgatccgctctgtttgacttacagctacctttcacacgttgacctcgtcaaggacctcaactccgggttgattggagccttgttggtatgcagggaaggatctcttgccaaagagaagacacagaccctccacaagtttatccttctctttgctgtgttcgatgagggcaaaagttggcatagcgaaacgaagaattccctcatgcaggatcgcgacgcagccagcgccagagcttggcccaagatgcacactgtgaacggatatgtcaataggtcacttcctggcttgattgggtgtcatcggaaaagtgtctactggcacgtgatcggaatggggacaacaccagaggtccactccatatttctcgaaggccataccttccttgttcgaaaccacagacaggcatccttgacgatctctcccattacctttctcactgcccaaacgctccttatggacttgggtcagttccttctcttctgccatatcagctcacaccagcatgatggtatggaagcttatgtgaaagtcgacagttgtcctgaggagccacagttgcgcatgaagaataatgaagaagccgaggattacgacgacgatctcaccgattctgagatggacgtggtgaggtttgatgacgacaactctccctccttcattcaaatccggagcgtggcgaagaaacaccccaagacttgggtccactatatagcggcggaagaggaggattgggattacgctcctcttgtattggcaccagatgaccgctcatacaaaagccagtacctcaacaacggaccgcagagaattggccggaagtataagaaagtgcgatttatggcctatacagacgaaacctttaagacaagggaggccatccagcatgagagtgggattttgggacctcttctttacggcgaagttggtgataccctcctcatcatcttcaagaatcaagcttctcgcccctataacatttacccacacgggatcactgacgttaggcctttgtatagcagaagacttcccaaaggcgtgaagcatctcaaagacttccccattttgccaggcgagatctttaagtacaaatggaccgtcacagtggaagatggaccgactaaatcagaccctcgatgccttacgcggtactattcctccttcgtgaatatggagagagatttggcaagcggactcataggaccactcctcatctgttacaaggaatctgtagaccagaggggtaaccagattatgagtgataaacgcaatgtgatcctttttagcgtcttcgacgagaaccggtcctggtacttgaccgagaatatacaaaggttccttcccaaccccgcaggcgttcagttggaagaccctgagtttcaggccagcaatattatgcactcaatcaacggctatgtgtttgatagtctccagctttctgtttgcctccatgaagtagcctattggtacatcttgtcaattggtgctcaaacagacttcctctccgtcttcttctccggctacacctttaagcacaagatggtgtatgaggacactctcacactctttccattttctggagaaaccgtgttcatgagcatggagaatccaggcctttggatcttgggttgccacaacagtgattttcgcaatcggggaatgactgctctcctcaaagtcagcagctgtgataagaacacaggcgactattacgaagattcttacgaggacataagtgcctacttgttgtccaagaataacgccattgagcccagatcattctcccagaatcctcccgtgcttaaaaggcatcagcgcgaaatcaccagaactactcttcagtctgatcaagaggagattgactatgacgacaccataagcgtggaaatgaagaaggaggatttcgatatctatgacgaagatgagaaccagtctccgcggagctttcagaagaagacgcgacactacttcattgcagcagtcgaaaggctttgggactacggtatgtcatcatcccctcatgtgttgcgcaatagagctcagagtggaagtgttccacagttcaagaaagtcgtctttcaagagtttacagatggcagcttcacacagcctctctatcggggcgagcttaacgaacatttgggactccttggtccctatatccgagccgaagtggaggacaacattatggttacctttaggaatcaagcctctcgcccctacagcttctactcctccctcatcagttatgaggaggatcagagacaaggcgctgaaccacggaagaactttgtgaaaccgaatgagacgaagacctacttctggaaagtacagcaccacatggcccccacaaaagacgaattcgattgcaaagcatgggcgtatttttcagacgttgacttggagaaagatgtacattcaggacttattggtcctttgttggtgtgtcacactaacactctcaatccagcccatggcaggcaggtgacagtccaggaattcgctcttttctttaccatctttgatgagaccaagtcctggtacttcacggaaaacatggagcgcaattgcagagccccctgtaacatacagatggaggaccctacctttaaggaaaattatcggttccacgcaatcaacggatacattatggatacactccctggccttgtgatggctcaggaccaacgaatcaggtggtacctcctcagcatgggttctaatgagaacatacactccattcacttttcaggacatgtgttcactgtccggaagaaagaagagtataagatggccctctacaatttgtatccaggcgtgtttgagaccgttgaaatgcttccctctaaagctggcatctggagagtagagtgcttgatcggagaacatcttcacgcaggtatgagcaccttgttcctcgtgtacagcaacaaatgtcagaccccacttggcatggccagtggacacattcgcgactttcagatcacagcatctggccagtatggacaatgggccccaaagttggctcgcctccattactccggtagcataaatgcgtggtccactaaagaacctttcagctggattaaggtcgatcttcttgcccccatgatcatccacggcattaagacacagggagcgaggcagaaattctcctccctctacatctcacagttcattattatgtatagtttggacggcaagaagtggcaaacttatagaggtaacagtactggaacactcatggtgttcttcggcaacgttgatagctctggcatcaaacacaacatctttaatcctcccataatagctcggtacatcagattgcatccgacccactacagcattaggagtacactccgaatggagcttatgggttgcgacttgaattcctgttcaatgccactcggaatggagtctaaagccatctctgatgcacagataaccgccagtagctactttacgaacatgtttgctacgtggtcaccctctaaggcaaggcttcatttgcaaggccggtctaatgcctggagacctcaggtgaacaacccgaaagaatggctccaggtggactttcagaagaccatgaaagtaacaggtgtcactactcagggagttaagtccttgctcaccagcatgtatgtgaaggagttccttatttcctcatcacaagatggccaccagtggaccctcttctttcagaatggtaaggtcaaagtgtttcagggcaatcaagacagcttcacacccgtggtgaacagtcttgatcctccactcttgacacgataccttcgaatccatccacagtcttgggttcaccagattgcattgcgcatggaagtacttggatgcgaggctcaggacctctac

SEQ ID NO: 2360 - protein, 1457 aa, synthetic construct
  REGION 1..1457: note = Variant of human B-domain deleted Factor VIII
MQIELSTCFFLCLLRFCFSATRRYYLGAVELSWDYMQSDLGELPVDARFPPRVPKSFPFNTSVVYKKTLFVEFTDHLFNIAKPRPPWMGLLGPTIQAEVYDTVVITLKNMASHPVSLHAVGVSYWKASEGAEYDDQTSQREKEDDKVFPGGSHTYVWQVLKENGPMASDPLCLTYSYLSHVDLVKDLNSGLIGALLVCREGSLAKEKTQTLHKFILLFAVFDEGKSWHSETKNSLMQDRDAASARAWPKMHTVNGYVNRSLPGLIGCHRKSVYWHVIGMGTTPEVHSIFLEGHTFLVRNHRQASLTISPITFLTAQTLLMDLGQFLLFCHISSHQHDGMEAYVKVDSCPEEPQLRMKNNEEAEDYDDDLTDSEMDVVRFDDDNSPSFIQIRSVAKKHPKTWVHYIAAEEEDWDYAPLVLAPDDRSYKSQYLNNGPQRIGRKYKKVRFMAYTDETFKTREAIQHESGILGPLLYGEVGDTLLIIFKNQASRPYNIYPHGITDVRPLYSRRLPKGVKHLKDFPILPGEIFKYKWTVTVEDGPTKSDPRCLTRYYSSFVNMERDLASGLIGPLLICYKESVDQRGNQIMSDKRNVILFSVFDENRSWYLTENIQRFLPNPAGVQLEDPEFQASNIMHSINGYVFDSLQLSVCLHEVAYWYILSIGAQTDFLSVFFSGYTFKHKMVYEDTLTLFPFSGETVFMSMENPGLWILGCHNSDFRNRGMTALLKVSSCDKNTGDYYEDSYEDISAYLLSKNNAIEPRSFSQNPPVLKRHQREITRTTLQSDQEEIDYDDTISVEMKKEDFDIYDEDENQSPRSFQKKTRHYFIAAVERLWDYGMSSSPHVLRNRAQSGSVPQFKKVVFQEFTDGSFTQPLYRGELNEHLGLLGPYIRAEVEDNIMVTFRNQASRPYSFYSSLISYEEDQRQGAEPRKNFVKPNETKTYFWKVQHHMAPTKDEFDCKAWAYFSDVDLEKDVHSGLIGPLLVCHTNTLNPAHGRQVTVQEFALFFTIFDETKSWYFTENMERNCRAPCNIQMEDPTFKENYRFHAINGYIMDTLPGLVMAQDQRIRWYLLSMGSNENIHSIHFSGHVFTVRKKEEYKMALYNLYPGVFETVEMLPSKAGIWRVECLIGEHLHAGMSTLFLVYSNKCQTPLGMASGHIRDFQITASGQYGQWAPKLARLHYSGSINAWSTKEPFSWIKVDLLAPMIIHGIKTQGARQKFSSLYISQFIIMYSLDGKKWQTYRGNSTGTLMVFFGNVDSSGIKHNIFNPPIIARYIRLHPTHYSIRSTLRMELMGCDLNSCSMPLGMESKAISDAQITASSYFTNMFATWSPSKARLHLQGRSNAWRPQVNNPKEWLQVDFQKTMKVTGVTTQGVKSLLTSMYVKEFLISSSQDGHQWTLFFQNGKVKVFQGNQDSFTPVVNSLDPPLLTRYLRIHPQSWVHQIALRMEVLGCEAQDLY

SEQ ID NO: 2361 - DNA, 4371 bp, synthetic construct
  misc_feature 1..4371: note = Variant of human B-domain deleted Factor VIII
  source 1..4371: mol_type = other DNA
atgcagattgaactgtctacctgcttcttcctctgtttgctgaggttctgctttagcgccactagacggtactaccttggcgctgtggagctgtcctgggactatatgcagagtgatttgggagagcttcccgtcgacgcacgatttcctcctcgcgttccaaagtcatttcccttcaacacaagcgtggtgtacaagaagacgctcttcgtcgaattcaccgatcacctgttcaatatcgccaaacccagaccaccatggatgggtcttttggggcctaccatacaagcggaggtgtatgacacagttgttatcactctcaagaacatggcttctcatccggtaagtcttcacgcagtgggcgtgtcctactggaaagcttcagaaggagccgagtatgatgatcagacatcccagagggagaaagaagacgacaaggtatttccaggtgggtctcatacctatgtgtggcaagtgctcaaagagaatggccctatggcaagcgatccgctctgtttgacttacagctacctttcacacgttgacctcgtcaaggacctcaactccgggttgattggagccttgttggtatgcagggaaggatctcttgccaaagagaagacacagaccctccacaagtttatccttctctttgctgtgttcgatgagggcaaaagttggcatagcgaaacgaagaattccctcatgcaggatcgcgacgcagccagcgccagagcttggcccaagatgcacactgtgaacggatatgtcaataggtcacttcctggcttgattgggtgtcatcggaaaagtgtctactggcacgtgatcggaatggggacaacaccagaggtccactccatatttctcgaaggccataccttccttgttcgaaaccacagacaggcatccttggagatctctcccattacctttctcactgcccaaacgctccttatggacttgggtcagttccttctcttctgccatatcagctcacaccagcatgatggtatggaagcttatgtgaaagtcgacagttgtcctgaggagccacagttgcgcatgaagaataatgaagaagccgaggattacgacgacgatctcaccgattctgagatggacgtggtgaggtttgatgacgacaactctccctccttcattcaaatccggagcgtggcgaagaaacaccccaagacttgggtccactatatagcggcggaagaggaggattgggattacgctcctcttgtattggcaccagatgaccgctcatacaaaagccagtacctcaacaacggaccgcagagaattggccggaagtataagaaagtgcgatttatggcctatacagacgaaacctttaagacaagggaggccatccagcatgagagtgggattttgggacctcttctttacggcgaagttggtgataccctcctcatcatcttcaagaatcaagcttctcgcccctataacatttacccacacgggatcactgacgttaggcctttgtatagcagaagacttcccaaaggcgtgaagcatctcaaagacttccccattttgccaggcgagatctttaagtacaaatggaccgtcacagtggaagatggaccgactaaatcagaccctcgatgccttacgcggtactattcctccttcgtgaatatggagagagatttggcaagcggactcataggaccactcctcatctgttacaaggaatctgtagaccagaggggtaaccagattatgagtgataaacgcaatgtgatcctttttagcgtcttcgacgagaaccggtcctggtacttgaccgagaatatacaaaggttccttcccaaccccgcaggcgttcagttggaagaccctgagtttcaggccagcaatattatgcactcaatcaacggctatgtgtttgatagtctccagctttctgtttgcctccatgaagtagcctattggtacatcttgtcaattggtgctcaaacagacttcctctccgtcttcttctccggctacacctttaagcacaagatggtgtatgaggacactctcacactctttccattttctggagaaaccgtgttcatgagcatggagaatccaggcctttggatcttgggttgccacaacagtgattttcgcaatcggggaatgactgctctcctcaaagtcagcagctgtgataagaacacaggcgactattacgaagattcttacgaggacataagtgcctacttgttgtccaagaataacgccattgagcccagatcattctcccagaatcctcccgtgcttaaaaggcatcagcgcgaaatcaccagaactactcttcagtctgatcaagaggagattgactatgacgacaccataagcgtggaaatgaagaaggaggatttcgatatctatgacgaagatcttaaccagtctccgcggagctttcagaagaagacgcgacactacttcattgcagcagtcgaaaggctttgggactacggtatgtcatcatcccctcatgtgttgcgcaatagagctcagagtggaagtgttccacagttcaagaaagtcgtctttcaagagtttacagatggcagcttcacacagcctctctatcggggcgagcttaacgaacatttgggactccttggtccctatatccgagccgaagtggaggacaacattatggttacctttaggaatcaagcctctcgcccctacagcttctactcctccctcatcagttatgaggaggatcagagacaaggcgctgaaccacggaagaactttgtgaaaccgaatgagacgaagacctacttctggaaagtacagcaccacatggcccccacaaaagacgaattcgattgcaaagcatgggcgtatttttcagacgttgacttggagaaagatgtacattcaggacttattggtcctttgttggtgtgtcacactaacactctcaatccagcccatggcaggcaggtgacagtccaggaattcgctcttttctttaccatctttgatgagaccaagtcctggtacttcacggaaaacatggagcgcaattgcagagccccctgtaacatacagatggaggaccctacctttaaggaaaattatcggttccacgcaatcaacggatacattatggatacactccctggccttgtgatggctcaggaccaacgaatcaggtggtacctcctcagcatgggttctaatgagaacatacactccattcacttttcaggacatgtgttcactgtccggaagaaagaagagtataagatggccctctacaatttgtatccaggcgtgtttgagaccgttgaaatgcttccctctaaagctggcatctggagagtagagtgcttgatcggagaacatcttcacgcaggtatgagcaccttgttcctcgtgtacagcaacaaatgtcagaccccacttggcatggccagtggacacattcgcgactttcagatcacagcatctggccagtatggacaatgggccccaaagttggctcgcctccattactccggtagcataaatgcgtggtccactaaagaacctttcagctggattaaggtcgatcttcttgcccccatgatcatccacggcattaagacacagggagcgaggcagaaattctcctccctctacatctcacagttcattattatgtatagtttggacggcaagaagtggcaaacttatagaggtaacagtactggaacactcatggtgttcttcggcaacgttgatagctctggcatcaaacacaacatctttaatcctcccataatagctcggtacatcagattgcatccgacccactacagcattaggagtacactccgaatggagcttatgggttgcgacttgaattcctgttcaatgccactcggaatggagtctaaagccatctctgatgcacagataaccgccagtagctactttacgaacatgtttgctacgtggtcaccctctaaggcaaggcttcatttgcaaggccggtctaatgcctggagacctcaggtgaacaacccgaaagaatggctccaggtggactttcagaagaccatgaaagtaacaggtgtcactactcagggagttaagtccttgctcaccagcatgtatgtgaaggagttccttatttcctcatcacaagatggccaccagtggaccctcttctttcagaatggtaaggtcaaagtgtttcagggcaatcaagacagcttcacacccgtggtgaacagtcttgatcctccactcttgacacgataccttcgaatccatccacagtcttgggttcaccagattgcattgcgcatggaagtacttggatgcgaggctcaggacctctac

SEQ ID NO: 2362 - protein, 1457 aa, synthetic construct
  REGION 1..1457: note = Variant of human B-domain deleted Factor VIII
MQIELSTCFFLCLLRFCFSATRRYYLGAVELSWDYMQSDLGELPVDARFPPRVPKSFPFNTSVVYKKTLFVEFTDHLFNIAKPRPPWMGLLGPTIQAEVYDTVVITLKNMASHPVSLHAVGVSYWKASEGAEYDDQTSQREKEDDKVFPGGSHTYVWQVLKENGPMASDPLCLTYSYLSHVDLVKDLNSGLIGALLVCREGSLAKEKTQTLHKFILLFAVFDEGKSWHSETKNSLMQDRDAASARAWPKMHTVNGYVNRSLPGLIGCHRKSVYWHVIGMGTTPEVHSIFLEGHTFLVRNHRQASLEISPITFLTAQTLLMDLGQFLLFCHISSHQHDGMEAYVKVDSCPEEPQLRMKNNEEAEDYDDDLTDSEMDVVRFDDDNSPSFIQIRSVAKKHPKTWVHYIAAEEEDWDYAPLVLAPDDRSYKSQYLNNGPQRIGRKYKKVRFMAYTDETFKTREAIQHESGILGPLLYGEVGDTLLIIFKNQASRPYNIYPHGITDVRPLYSRRLPKGVKHLKDFPILPGEIFKYKWTVTVEDGPTKSDPRCLTRYYSSFVNMERDLASGLIGPLLICYKESVDQRGNQIMSDKRNVILFSVFDENRSWYLTENIQRFLPNPAGVQLEDPEFQASNIMHSINGYVFDSLQLSVCLHEVAYWYILSIGAQTDFLSVFFSGYTFKHKMVYEDTLTLFPFSGETVFMSMENPGLWILGCHNSDFRNRGMTALLKVSSCDKNTGDYYEDSYEDISAYLLSKNNAIEPRSFSQNPPVLKRHQREITRTTLQSDQEEIDYDDTISVEMKKEDFDIYDEDLNQSPRSFQKKTRHYFIAAVERLWDYGMSSSPHVLRNRAQSGSVPQFKKVVFQEFTDGSFTQPLYRGELNEHLGLLGPYIRAEVEDNIMVTFRNQASRPYSFYSSLISYEEDQRQGAEPRKNFVKPNETKTYFWKVQHHMAPTKDEFDCKAWAYFSDVDLEKDVHSGLIGPLLVCHTNTLNPAHGRQVTVQEFALFFTIFDETKSWYFTENMERNCRAPCNIQMEDPTFKENYRFHAINGYIMDTLPGLVMAQDQRIRWYLLSMGSNENIHSIHFSGHVFTVRKKEEYKMALYNLYPGVFETVEMLPSKAGIWRVECLIGEHLHAGMSTLFLVYSNKCQTPLGMASGHIRDFQITASGQYGQWAPKLARLHYSGSINAWSTKEPFSWIKVDLLAPMIIHGIKTQGARQKFSSLYISQFIIMYSLDGKKWQTYRGNSTGTLMVFFGNVDSSGIKHNIFNPPIIARYIRLHPTHYSIRSTLRMELMGCDLNSCSMPLGMESKAISDAQITASSYFTNMFATWSPSKARLHLQGRSNAWRPQVNNPKEWLQVDFQKTMKVTGVTTQGVKSLLTSMYVKEFLISSSQDGHQWTLFFQNGKVKVFQGNQDSFTPVVNSLDPPLLTRYLRIHPQSWVHQIALRMEVLGCEAQDLY

SEQ ID NO: 2363 - DNA, 4371 bp, synthetic construct
  misc_feature 1..4371: note = Variant of human B-domain deleted Factor VIII
  source 1..4371: mol_type = other DNA
atgcagattgaactgtctacctgcttcttcctctgtttgctgaggttctgctttagcgccactagacggtactaccttggcgctgtggagctgtcctgggactatatgcagagtgatttgggagagcttcccgtcgacgcacgatttcctcctcgcgttccaaagtcatttcccttcaacacaagcgtggtgtacaagaagacgctcttcgtcgaattcaccgatcacctgttcaatatcgccaaacccagaccaccatggatgggtcttttggggcctaccatacaagcggaggtgtatgacacagttgttatcactctcaagaacatggcttctcatccggtaagtcttcacgcagtgggcgtgtcctactggaaagcttcagaaggagccgagtatgatgatcagacatcccagagggagaaagaagacgacaaggtatttccaggtgggtctcatacctatgtgtggcaagtgctcaaagagaatggccctatggcaagcgatccgctctgtttgacttacagctacctttcacacgttgacctcgtcaaggacctcaactccgggttgattggagccttgttggtatgcagggaaggatctcttgccaaagagaagacacagaccctccacaagtttatccttctctttgctgtgttcgatgagggcaaaagttggcatagcgaaacgaagaattccctcatgcaggatcgcgacgcagccagcgccagagcttggcccaagatgcacactgtgaacggatatgtcaataggtcacttcctggcttgattgggtgtcatcggaaaagtgtctactggcacgtgatcggaatggggacaacaccagaggtccactccatatttctcgaaggccataccttccttgttcgaaaccacagacaggcatccttggagatctctcccattacctttctcactgcccaaacgctccttatggacttgggtcagttccttctcttctgccatatcagctcacaccagcatgatggtatggaagcttatgtgaaagtcgacagttgtcctgaggagccacagttgcgcatgaagaataatgaagaagccgaggattacgacgacgatctcaccgattctgagatggacgtggtgaggtttgatgacgacaactctccctccttcattcaaatccggagcgtggcgaagaaacaccccaagacttgggtccactatatagcggcggaagaggaggattgggattacgctcctcttgtattggcaccagatgaccgctcatacaaaagccagtacctcaacaacggaccgcagagaattggccggaagtataagaaagtgcgatttatggcctatacagacgaaacctttaagacaagggaggccatccagcatgagagtgggattttgggacctcttctttacggcgaagttggtgataccctcctcatcatcttcaagaatcaagcttctcgcccctataacatttacccacacgggatcactgacgttaggcctttgtatagcagaagacttcccaaaggcgtgaagcatctcaaagacttccccattttgccaggcgagatctttaagtacaaatggaccgtcacagtggaagatggaccgactaaatcagaccctcgatgccttacgcggtactattcctccttcgtgaatatggagagagatttggcaagcggactcataggaccactcctcatctgttacaaggaatctgtagaccagaggggtaaccagattatgagtgataaacgcaatgtgatcctttttagcgtcttcgacgagaaccggtcctggtacttgaccgagaatatacaaaggttccttcccaaccccgcaggcgttcagttggaagaccctgagtttcaggccagcaatattatgcactcaatcaacggctatgtgtttgatagtctccagctttctgtttgcctccatgaagtagcctattggtacatcttgtcaattggtgctcaaacagacttcctctccgtcttcttctccggctacacctttaagcacaagatggtgtatgaggacactctcacactctttccattttctggagaaaccgtgttcatgagcatggagaatccaggcctttggatcttgggttgccacaacagtgattttcgcaatcggggaatgactgctctcctcaaagtcagcagctgtgataagaacacaggcgactattacgaagattcttacgaggacataagtgcctacttgttgtccaagaataacgccattgagcccagatcattctcccagaatcctcccgtgcttaaaaggcatcagcgcgaaatcaccagaactactcttcagtctgatcaagaggagattgactatgacgacaccataagcgtggaaatgaagaagttggatttcgatatctatgacgaagatgagaaccagtctccgcggagctttcagaagaagacgcgacactacttcattgcagcagtcgaaaggctttgggactacggtatgtcatcatcccctcatgtgttgcgcaatagagctcagagtggaagtgttccacagttcaagaaagtcgtctttcaagagtttacagatggcagcttcacacagcctctctatcggggcgagcttaacgaacatttgggactccttggtccctatatccgagccgaagtggaggacaacattatggttacctttaggaatcaagcctctcgcccctacagcttctactcctccctcatcagttatgaggaggatcagagacaaggcgctgaaccacggaagaactttgtgaaaccgaatgagacgaagacctacttctggaaagtacagcaccacatggcccccacaaaagacgaattcgattgcaaagcatgggcgtatttttcagacgttgacttggagaaagatgtacattcaggacttattggtcctttgttggtgtgtcacactaacactctcaatccagcccatggcaggcaggtgacagtccaggaattcgctcttttctttaccatctttgatgagaccaagtcctggtacttcacggaaaacatggagcgcaattgcagagccccctgtaacatacagatggaggaccctacctttaaggaaaattatcggttccacgcaatcaacggatacattatggatacactccctggccttgtgatggctcaggaccaacgaatcaggtggtacctcctcagcatgggttctaatgagaacatacactccattcacttttcaggacatgtgttcactgtccggaagaaagaagagtataagatggccctctacaatttgtatccaggcgtgtttgagaccgttgaaatgcttccctctaaagctggcatctggagagtagagtgcttgatcggagaacatcttcacgcaggtatgagcaccttgttcctcgtgtacagcaacaaatgtcagaccccacttggcatggccagtggacacattcgcgactttcagatcacagcatctggccagtatggacaatgggccccaaagttggctcgcctccattactccggtagcataaatgcgtggtccactaaagaacctttcagctggattaaggtcgatcttcttgcccccatgatcatccacggcattaagacacagggagcgaggcagaaattctcctccctctacatctcacagttcattattatgtatagtttggacggcaagaagtggcaaacttatagaggtaacagtactggaacactcatggtgttcttcggcaacgttgatagctctggcatcaaacacaacatctttaatcctcccataatagctcggtacatcagattgcatccgacccactacagcattaggagtacactccgaatggagcttatgggttgcgacttgaattcctgttcaatgccactcggaatggagtctaaagccatctctgatgcacagataaccgccagtagctactttacgaacatgtttgctacgtggtcaccctctaaggcaaggcttcatttgcaaggccggtctaatgcctggagacctcaggtgaacaacccgaaagaatggctccaggtggactttcagaagaccatgaaagtaacaggtgtcactactcagggagttaagtccttgctcaccagcatgtatgtgaaggagttccttatttcctcatcacaagatggccaccagtggaccctcttctttcagaatggtaaggtcaaagtgtttcagggcaatcaagacagcttcacacccgtggtgaacagtcttgatcctccactcttgacacgataccttcgaatccatccacagtcttgggttcaccagattgcattgcgcatggaagtacttggatgcgaggctcaggacctctac

SEQ ID NO: 2364 - protein, 1457 aa, synthetic construct
  REGION 1..1457: note = Variant of human B-domain deleted Factor VIII
MQIELSTCFFLCLLRFCFSATRRYYLGAVELSWDYMQSDLGELPVDARFPPRVPKSFPFNTSVVYKKTLFVEFTDHLFNIAKPRPPWMGLLGPTIQAEVYDTVVITLKNMASHPVSLHAVGVSYWKASEGAEYDDQTSQREKEDDKVFPGGSHTYVWQVLKENGPMASDPLCLTYSYLSHVDLVKDLNSGLIGALLVCREGSLAKEKTQTLHKFILLFAVFDEGKSWHSETKNSLMQDRDAASARAWPKMHTVNGYVNRSLPGLIGCHRKSVYWHVIGMGTTPEVHSIFLEGHTFLVRNHRQASLEISPITFLTAQTLLMDLGQFLLFCHISSHQHDGMEAYVKVDSCPEEPQLRMKNNEEAEDYDDDLTDSEMDVVRFDDDNSPSFIQIRSVAKKHPKTWVHYIAAEEEDWDYAPLVLAPDDRSYKSQYLNNGPQRIGRKYKKVRFMAYTDETFKTREAIQHESGILGPLLYGEVGDTLLIIFKNQASRPYNIYPHGITDVRPLYSRRLPKGVKHLKDFPILPGEIFKYKWTVTVEDGPTKSDPRCLTRYYSSFVNMERDLASGLIGPLLICYKESVDQRGNQIMSDKRNVILFSVFDENRSWYLTENIQRFLPNPAGVQLEDPEFQASNIMHSINGYVFDSLQLSVCLHEVAYWYILSIGAQTDFLSVFFSGYTFKHKMVYEDTLTLFPFSGETVFMSMENPGLWILGCHNSDFRNRGMTALLKVSSCDKNTGDYYEDSYEDISAYLLSKNNAIEPRSFSQNPPVLKRHQREITRTTLQSDQEEIDYDDTISVEMKKLDFDIYDEDENQSPRSFQKKTRHYFIAAVERLWDYGMSSSPHVLRNRAQSGSVPQFKKVVFQEFTDGSFTQPLYRGELNEHLGLLGPYIRAEVEDNIMVTFRNQASRPYSFYSSLISYEEDQRQGAEPRKNFVKPNETKTYFWKVQHHMAPTKDEFDCKAWAYFSDVDLEKDVHSGLIGPLLVCHTNTLNPAHGRQVTVQEFALFFTIFDETKSWYFTENMERNCRAPCNIQMEDPTFKENYRFHAINGYIMDTLPGLVMAQDQRIRWYLLSMGSNENIHSIHFSGHVFTVRKKEEYKMALYNLYPGVFETVEMLPSKAGIWRVECLIGEHLHAGMSTLFLVYSNKCQTPLGMASGHIRDFQITASGQYGQWAPKLARLHYSGSINAWSTKEPFSWIKVDLLAPMIIHGIKTQGARQKFSSLYISQFIIMYSLDGKKWQTYRGNSTGTLMVFFGNVDSSGIKHNIFNPPIIARYIRLHPTHYSIRSTLRMELMGCDLNSCSMPLGMESKAISDAQITASSYFTNMFATWSPSKARLHLQGRSNAWRPQVNNPKEWLQVDFQKTMKVTGVTTQGVKSLLTSMYVKEFLISSSQDGHQWTLFFQNGKVKVFQGNQDSFTPVVNSLDPPLLTRYLRIHPQSWVHQIALRMEVLGCEAQDLY

SEQ ID NO: 2365 - DNA, 4371 bp, synthetic construct
  misc_feature 1..4371: note = Variant of human B-domain deleted Factor VIII
  source 1..4371: mol_type = other DNA
atgcagattgaactgtctacctgcttcttcctctgtttgctgaggttctgctttagcgccactagacggtactaccttggcgctgtggagctgtcctgggactatatgcagagtgatttgggagagcttcccgtcgacgcacgatttcctcctcgcgttccaaagtcatttcccttcaacacaagcgtggtgtacaagaagacgctcttcgtcgaattcaccgatcacctgttcaatatcgccaaacccagaccaccatggatgggtcttttggggcctaccatacaagcggaggtgtatgacacagttgttatcactctcaagaacatggcttctcatccggtaagtcttcacgcagtgggcgtgtcctactggaaagcttcagaaggagccgagtatgatgatcagacatcccagagggagaaagaagacgacaaggtatttccaggtgggtctcatacctatgtgtggcaagtgctcaaagagaatggccctatggcaagcgatccgctctgtttgacttacagctacctttcacacgttgacctcgtcaaggacctcaactccgggttgattggagccttgttggtatgcagggaaggatctcttgccaaagagaagacacagaccctccacaagtttatccttctctttgctgtgttcgatgagggcaaaagttggcatagcgaaacgaagaattccctcatgcaggatcgcgacgcagccagcgccagagcttggcccaagatgcacactgtgaacggatatgtcaataggtcacttcctggcttgattgggtgtcatcggaaaagtgtctactggcacgtgatcggaatggggacaacaccagaggtccactccatatttctcgaaggccataccttccttgttcgaaaccacagacaggcatccttggagatctctcccattacctttctcactgcccaaacgctccttatggacttgggtcagttccttctcttctgccatatcagctcacaccagcatgatggtatggaagcttatgtgaaagtcgacagttgtcctgaggagccacagttgcgcatgaagaataatgaagaagccgaggattacgacgacgatctcaccgattctgagatggacgtggtgaggtttgatgacgacaactctccctccgcgattcaaatccggagcgtggcgaagaaacaccccaagacttgggtccactatatagcggcggaagaggaggattgggattacgctcctcttgtattggcaccagatgaccgctcatacaaaagccagtacctcaacaacggaccgcagagaattggccggaagtataagaaagtgcgatttatggcctatacagacgaaacctttaagacaagggaggccatccagcatgagagtgggattttgggacctcttctttacggcgaagttggtgataccctcctcatcatcttcaagaatcaagcttctcgcccctataacatttacccacacgggatcactgacgttaggcctttgtatagcagaagacttcccaaaggcgtgaagcatctcaaagacttccccattttgccaggcgagatctttaagtacaaatggaccgtcacagtggaagatggaccgactaaatcagaccctcgatgccttacgcggtactattcctccttcgtgaatatggagagagatttggcaagcggactcataggaccactcctcatctgttacaaggaatctgtagaccagaggggtaaccagattatgagtgataaacgcaatgtgatcctttttagcgtcttcgacgagaaccggtcctggtacttgaccgagaatatacaaaggttccttcccaaccccgcaggcgttcagttggaagaccctgagtttcaggccagcaatattatgcactcaatcaacggctatgtgtttgatagtctccagctttctgtttgcctccatgaagtagcctattggtacatcttgtcaattggtgctcaaacagacttcctctccgtcttcttctccggctacacctttaagcacaagatggtgtatgaggacactctcacactctttccattttctggagaaaccgtgttcatgagcatggagaatccaggcctttggatcttgggttgccacaacagtgattttcgcaatcggggaatgactgctctcctcaaagtcagcagctgtgataagaacacaggcgactattacgaagattcttacgaggacataagtgcctacttgttgtccaagaataacgccattgagcccagatcattctcccagaatcctcccgtgcttaaaaggcatcagcgcgaaatcaccagaactactcttcagtctgatcaagaggagattgactatgacgacaccataagcgtggaaatgaagaaggaggatttcgatatctatgacgaagatgagaaccagtctccgcggagctttcagaagaagacgcgacactacttcattgcagcagtcgaaaggctttgggactacggtatgtcatcatcccctcatgtgttgcgcaatagagctcagagtggaagtgttccacagttcaagaaagtcgtctttcaagagtttacagatggcagcttcacacagcctctctatcggggcgagcttaacgaacatttgggactccttggtccctatatccgagccgaagtggaggacaacattatggttacctttaggaatcaagcctctcgcccctacagcttctactcctccctcatcagttatgaggaggatcagagacaaggcgctgaaccacggaagaactttgtgaaaccgaatgagacgaagacctacttctggaaagtacagcaccacatggcccccacaaaagacgaattcgattgcaaagcatgggcgtatttttcagacgttgacttggagaaagatgtacattcaggacttattggtcctttgttggtgtgtcacactaacactctcaatccagcccatggcaggcaggtgacagtccaggaattcgctcttttctttaccatctttgatgagaccaagtcctggtacttcacggaaaacatggagcgcaattgcagagccccctgtaacatacagatggaggaccctacctttaaggaaaattatcggttccacgcaatcaacggatacattatggatacactccctggccttgtgatggctcaggaccaacgaatcaggtggtacctcctcagcatgggttctaatgagaacatacactccattcacttttcaggacatgtgttcactgtccggaagaaagaagagtataagatggccctctacaatttgtatccaggcgtgtttgagaccgttgaaatgcttccctctaaagctggcatctggagagtagagtgcttgatcggagaacatcttcacgcaggtatgagcaccttgttcctcgtgtacagcaacaaatgtcagaccccacttggcatggccagtggacacattcgcgactttcagatcacagcatctggccagtatggacaatgggccccaaagttggctcgcctccattactccggtagcataaatgcgtggtccactaaagaacctttcagctggattaaggtcgatcttcttgcccccatgatcatccacggcattaagacacagggagcgaggcagaaattctcctccctctacatctcacagttcattattatgtatagtttggacggcaagaagtggcaaacttatagaggtaacagtactggaacactcatggtgttcttcggcaacgttgatagctctggcatcaaacacaacatctttaatcctcccataatagctcggtacatcagattgcatccgacccactacagcattaggagtacactccgaatggagcttatgggttgcgacttgaattcctgttcaatgccactcggaatggagtctaaagccatctctgatgcacagataaccgccagtagctactttacgaacatgtttgctacgtggtcaccctctaaggcaaggcttcatttgcaaggccggtctaatgcctggagacctcaggtgaacaacccgaaagaatggctccaggtggactttcagaagaccatgaaagtaacaggtgtcactactcagggagttaagtccttgctcaccagcatgtatgtgaaggagttccttatttcctcatcacaagatggccaccagtggaccctcttctttcagaatggtaaggtcaaagtgtttcagggcaatcaagacagcttcacacccgtggtgaacagtcttgatcctccactcttgacacgataccttcgaatccatccacagtcttgggttcaccagattgcattgcgcatggaagtacttggatgcgaggctcaggacctctac

SEQ ID NO: 2366 - protein, 1457 aa, synthetic construct
  REGION 1..1457: note = Variant of human B-domain deleted Factor VIII
MQIELSTCFFLCLLRFCFSATRRYYLGAVELSWDYMQSDLGELPVDARFPPRVPKSFPFNTSVVYKKTLFVEFTDHLFNIAKPRPPWMGLLGPTIQAEVYDTVVITLKNMASHPVSLHAVGVSYWKASEGAEYDDQTSQREKEDDKVFPGGSHTYVWQVLKENGPMASDPLCLTYSYLSHVDLVKDLNSGLIGALLVCREGSLAKEKTQTLHKFILLFAVFDEGKSWHSETKNSLMQDRDAASARAWPKMHTVNGYVNRSLPGLIGCHRKSVYWHVIGMGTTPEVHSIFLEGHTFLVRNHRQASLEISPITFLTAQTLLMDLGQFLLFCHISSHQHDGMEAYVKVDSCPEEPQLRMKNNEEAEDYDDDLTDSEMDVVRFDDDNSPSAIQIRSVAKKHPKTWVHYIAAEEEDWDYAPLVLAPDDRSYKSQYLNNGPQRIGRKYKKVRFMAYTDETFKTREAIQHESGILGPLLYGEVGDTLLIIFKNQASRPYNIYPHGITDVRPLYSRRLPKGVKHLKDFPILPGEIFKYKWTVTVEDGPTKSDPRCLTRYYSSFVNMERDLASGLIGPLLICYKESVDQRGNQIMSDKRNVILFSVFDENRSWYLTENIQRFLPNPAGVQLEDPEFQASNIMHSINGYVFDSLQLSVCLHEVAYWYILSIGAQTDFLSVFFSGYTFKHKMVYEDTLTLFPFSGETVFMSMENPGLWILGCHNSDFRNRGMTALLKVSSCDKNTGDYYEDSYEDISAYLLSKNNAIEPRSFSQNPPVLKRHQREITRTTLQSDQEEIDYDDTISVEMKKEDFDIYDEDENQSPRSFQKKTRHYFIAAVERLWDYGMSSSPHVLRNRAQSGSVPQFKKVVFQEFTDGSFTQPLYRGELNEHLGLLGPYIRAEVEDNIMVTFRNQASRPYSFYSSLISYEEDQRQGAEPRKNFVKPNETKTYFWKVQHHMAPTKDEFDCKAWAYFSDVDLEKDVHSGLIGPLLVCHTNTLNPAHGRQVTVQEFALFFTIFDETKSWYFTENMERNCRAPCNIQMEDPTFKENYRFHAINGYIMDTLPGLVMAQDQRIRWYLLSMGSNENIHSIHFSGHVFTVRKKEEYKMALYNLYPGVFETVEMLPSKAGIWRVECLIGEHLHAGMSTLFLVYSNKCQTPLGMASGHIRDFQITASGQYGQWAPKLARLHYSGSINAWSTKEPFSWIKVDLLAPMIIHGIKTQGARQKFSSLYISQFIIMYSLDGKKWQTYRGNSTGTLMVFFGNVDSSGIKHNIFNPPIIARYIRLHPTHYSIRSTLRMELMGCDLNSCSMPLGMESKAISDAQITASSYFTNMFATWSPSKARLHLQGRSNAWRPQVNNPKEWLQVDFQKTMKVTGVTTQGVKSLLTSMYVKEFLISSSQDGHQWTLFFQNGKVKVFQGNQDSFTPVVNSLDPPLLTRYLRIHPQSWVHQIALRMEVLGCEAQDLY

SEQ ID NO: 2367 - DNA, 4371 bp, synthetic construct
  misc_feature 1..4371: note = Variant of human B-domain deleted Factor VIII
  source 1..4371: mol_type = other DNA
atgcagattgaactgtctacctgcttcttcctctgtttgctgaggttctgctttagcgccactagacggtactaccttggcgctgtggagctgtcctgggactatatgcagagtgatttgggagagcttcccgtcgacgcacgatttcctcctcgcgttccaaagtcatttcccttcaacacaagcgtggtgtacaagaagacgctcttcgtcgaattcaccgatcacctgttcaatatcgccaaacccagaccaccatggatgggtcttttggggcctaccatacaagcggaggtgtatgacacagttgttatcactctcaagaacatggcttctcatccggtaagtcttcacgcagtgggcgtgtcctactggaaagcttcagaaggagccgagtatgatgatcagacatcccagagggagaaagaagacgacaaggtatttccaggtgggtctcatacctatgtgtggcaagtgctcaaagagaatggccctatggcaagcgatccgctctgtttgacttacagctacctttcacacgttgacctcgtcaaggacctcaactccgggttgattggagccttgttggtatgcagggaaggatctcttgccaaagagaagacacagaccctccacaagtttatccttctctttgctgtgttcgatgagggcaaaagttggcatagcgaaacgaagaattccctcatgcaggatcgcgacgcagccagcgccagagcttggcccaagatgcacactgtgaacggatatgtcaataggtcacttcctggcttgattgggtgtcatcggaaaagtgtctactggcacgtgatcggaatggggacaacaccagaggtccactccatatttctcgaaggccataccttccttgttcgaaaccacagacaggcatccttggagatctctcccattacctttctcactgcccaaacgctccttatggacttgggtcagttccttctcttctgccatatcagctcacaccagcatgatggtatggaagcttatgtgaaagtcgacagttgtcctgaggagccacagttgcgcatgaagaataatgaagaagccgaggattacgacgacgatctcaccgattctgagatggacgtggtgaggtttgatgacgacaactctccctccttcattcaaatccggagcgtggcgaagaaacaccccaagacttgggtccactatatagcggcggaagaggaggattgggattacgctcctcttgtattggcaccagatgaccgctcatacaaaagccagtacctcaacaacggaccgcagagaattggccggaagtataagaaagtgcgatttatggcctatacagacgaaacctttaagacaagggaggccatccagcatgagagtgggattttgggacctcttctttacggcgaagttggtgataccctcctcatcatcttcaagaatcaagcttctcgcccctataacatttacccacacgggatcactgacgttaggcctttgtatagcagaagacttcccaaaggcgtgaagcatctcaaagacttccccattttgccaggcgagatctttaagtacaaatggaccgtcacagtggaagatggaccgactaaatcagaccctcgatgccttacgcggtactattcctccttcgtgaatatggagagagatttggcaagcggactcataggaccactcctcatctgttacaaggaatctgtagaccagaggggtaaccagattatgagtgataaacgcaatgtgatcctttttagcgtcttcgacgagaaccggtcctggtacttgaccgagaatatacaaaggttccttcccaaccccgcaggcgttcagttggaagaccctgagtttcaggccagcaatattatgcactcaatcaacggctatgtgtttgatagtctccagctttctgtttgcctccatgaagtagcctattggtacatcttgtcaattggtgctcaaacagacttcctctccgtcttcttctccggctacacctttaagcacaagatggtgtatgaggacactctcacactctttccattttctggagaaaccgtgttcatgagcatggagaatccaggcctttggatcttgggttgccacaacagtgattttcgcaatcggggaatgactgctctcctcaaagtcagcagctgtgataagaacacaggcgactatgctgaagattcttacgaggacataagtgcctacttgttgtccaagaataacgccattgagcccagatcattctcccagaatcctcccgtgcttaaaaggcatcagcgcgaaatcaccagaactactcttcagtctgatcaagaggagattgactatgacgacaccataagcgtggaaatgaagaaggaggatttcgatatctatgacgaagatgagaaccagtctccgcggagctttcagaagaagacgcgacactacttcattgcagcagtcgaaaggctttgggactacggtatgtcatcatcccctcatgtgttgcgcaatagagctcagagtggaagtgttccacagttcaagaaagtcgtctttcaagagtttacagatggcagcttcacacagcctctctatcggggcgagcttaacgaacatttgggactccttggtccctatatccgagccgaagtggaggacaacattatggttacctttaggaatcaagcctctcgcccctacagcttctactcctccctcatcagttatgaggaggatcagagacaaggcgctgaaccacggaagaactttgtgaaaccgaatgagacgaagacctacttctggaaagtacagcaccacatggcccccacaaaagacgaattcgattgcaaagcatgggcgtatttttcagacgttgacttggagaaagatgtacattcaggacttattggtcctttgttggtgtgtcacactaacactctcaatccagcccatggcaggcaggtgacagtccaggaattcgctcttttctttaccatctttgatgagaccaagtcctggtacttcacggaaaacatggagcgcaattgcagagccccctgtaacatacagatggaggaccctacctttaaggaaaattatcggttccacgcaatcaacggatacattatggatacactccctggccttgtgatggctcaggaccaacgaatcaggtggtacctcctcagcatgggttctaatgagaacatacactccattcacttttcaggacatgtgttcactgtccggaagaaagaagagtataagatggccctctacaatttgtatccaggcgtgtttgagaccgttgaaatgcttccctctaaagctggcatctggagagtagagtgcttgatcggagaacatcttcacgcaggtatgagcaccttgttcctcgtgtacagcaacaaatgtcagaccccacttggcatggccagtggacacattcgcgactttcagatcacagcatctggccagtatggacaatgggccccaaagttggctcgcctccattactccggtagcataaatgcgtggtccactaaagaacctttcagctggattaaggtcgatcttcttgcccccatgatcatccacggcattaagacacagggagcgaggcagaaattctcctccctctacatctcacagttcattattatgtatagtttggacggcaagaagtggcaaacttatagaggtaacagtactggaacactcatggtgttcttcggcaacgttgatagctctggcatcaaacacaacatctttaatcctcccataatagctcggtacatcagattgcatccgacccactacagcattaggagtacactccgaatggagcttatgggttgcgacttgaattcctgttcaatgccactcggaatggagtctaaagccatctctgatgcacagataaccgccagtagctactttacgaacatgtttgctacgtggtcaccctctaaggcaaggcttcatttgcaaggccggtctaatgcctggagacctcaggtgaacaacccgaaagaatggctccaggtggactttcagaagaccatgaaagtaacaggtgtcactactcagggagttaagtccttgctcaccagcatgtatgtgaaggagttccttatttcctcatcacaagatggccaccagtggaccctcttctttcagaatggtaaggtcaaagtgtttcagggcaatcaagacagcttcacacccgtggtgaacagtcttgatcctccactcttgacacgataccttcgaatccatccacagtcttgggttcaccagattgcattgcgcatggaagtacttggatgcgaggctcaggacctctac

SEQ ID NO: 2368 - protein, 1457 aa, synthetic construct
  REGION 1..1457: note = Variant of human B-domain deleted Factor VIII
MQIELSTCFFLCLLRFCFSATRRYYLGAVELSWDYMQSDLGELPVDARFPPRVPKSFPFNTSVVYKKTLFVEFTDHLFNIAKPRPPWMGLLGPTIQAEVYDTVVITLKNMASHPVSLHAVGVSYWKASEGAEYDDQTSQREKEDDKVFPGGSHTYVWQVLKENGPMASDPLCLTYSYLSHVDLVKDLNSGLIGALLVCREGSLAKEKTQTLHKFILLFAVFDEGKSWHSETKNSLMQDRDAASARAWPKMHTVNGYVNRSLPGLIGCHRKSVYWHVIGMGTTPEVHSIFLEGHTFLVRNHRQASLEISPITFLTAQTLLMDLGQFLLFCHISSHQHDGMEAYVKVDSCPEEPQLRMKNNEEAEDYDDDLTDSEMDVVRFDDDNSPSFIQIRSVAKKHPKTWVHYIAAEEEDWDYAPLVLAPDDRSYKSQYLNNGPQRIGRKYKKVRFMAYTDETFKTREAIQHESGILGPLLYGEVGDTLLIIFKNQASRPYNIYPHGITDVRPLYSRRLPKGVKHLKDFPILPGEIFKYKWTVTVEDGPTKSDPRCLTRYYSSFVNMERDLASGLIGPLLICYKESVDQRGNQIMSDKRNVILFSVFDENRSWYLTENIQRFLPNPAGVQLEDPEFQASNIMHSINGYVFDSLQLSVCLHEVAYWYILSIGAQTDFLSVFFSGYTFKHKMVYEDTLTLFPFSGETVFMSMENPGLWILGCHNSDFRNRGMTALLKVSSCDKNTGDYAEDSYEDISAYLLSKNNAIEPRSFSQNPPVLKRHQREITRTTLQSDQEEIDYDDTISVEMKKEDFDIYDEDENQSPRSFQKKTRHYFIAAVERLWDYGMSSSPHVLRNRAQSGSVPQFKKVVFQEFTDGSFTQPLYRGELNEHLGLLGPYIRAEVEDNIMVTFRNQASRPYSFYSSLISYEEDQRQGAEPRKNFVKPNETKTYFWKVQHHMAPTKDEFDCKAWAYFSDVDLEKDVHSGLIGPLLVCHTNTLNPAHGRQVTVQEFALFFTIFDETKSWYFTENMERNCRAPCNIQMEDPTFKENYRFHAINGYIMDTLPGLVMAQDQRIRWYLLSMGSNENIHSIHFSGHVFTVRKKEEYKMALYNLYPGVFETVEMLPSKAGIWRVECLIGEHLHAGMSTLFLVYSNKCQTPLGMASGHIRDFQITASGQYGQWAPKLARLHYSGSINAWSTKEPFSWIKVDLLAPMIIHGIKTQGARQKFSSLYISQFIIMYSLDGKKWQTYRGNSTGTLMVFFGNVDSSGIKHNIFNPPIIARYIRLHPTHYSIRSTLRMELMGCDLNSCSMPLGMESKAISDAQITASSYFTNMFATWSPSKARLHLQGRSNAWRPQVNNPKEWLQVDFQKTMKVTGVTTQGVKSLLTSMYVKEFLISSSQDGHQWTLFFQNGKVKVFQGNQDSFTPVVNSLDPPLLTRYLRIHPQSWVHQIALRMEVLGCEAQDLY

SEQ ID NO: 2369 - DNA, 4371 bp, synthetic construct
  misc_feature 1..4371: note = Variant of human B-domain deleted Factor VIII
  source 1..4371: mol_type = other DNA
atgcagattgaactgtctacctgcttcttcctctgtttgctgaggttctgctttagcgccactagacggtactaccttggcgctgtggagctgtcctgggactatatgcagagtgatttgggagagcttcccgtcgacgcacgatttcctcctcgcgttccaaagtcatttcccttcaacacaagcgtggtgtacaagaagacgctcttcgtcgaattcaccgatcacctgttcaatatcgccaaacccagaccaccatggatgggtcttttggggcctaccatacaagcggaggtgtatgacacagttgttatcactctcaagaacatggcttctcatccggtaagtcttcacgcagtgggcgtgtcctactggaaagcttcagaaggagccgagtatgatgatcagacatcccagagggagaaagaagacgacaaggtatttccaggtgggtctcatacctatgtgtggcaagtgctcaaagagaatggccctatggcaagcgatccgctctgtttgacttacagctacctttcacacgttgacctcgtcaaggacctcaactccgggttgattggagccttgttggtatgcagggaaggatctcttgccaaagagaagacacagaccctccacaagtttatccttctctttgctgtgttcgatgagggcaaaagttggcatagcgaaacgaagaattccctcatgcaggatcgcgacgcagccagcgccagagcttggcccaagatgcacactgtgaacggatatgtcaataggtcacttcctggcttgattgggtgtcatcggaaaagtgtctactggcacgtgatcggaatggggacaacaccagaggtccactccatatttctcgaaggccataccttccttgttcgaaaccacagacaggcatccttggagatctctcccattacctttctcactgcccaaacgctccttatggacttgggtcagttccttctcttctgccatatcagctcacaccagcatgatggtatggaagcttatgtgaaagtcgacagttgtcctgaggagccacagttgcgcatgaagaataatgaagaagccgaggattacgacgacgatctcaccgattctgagatggacgtggtgaggtttgatgacgacaactctccctccttcattcaaatccggagcgtggcgaagaaacaccccaagacttgggtccactatatagcggcggaagaggaggattgggattacgctcctcttgtattggcaccagatgaccgctcatacaaaagccagtacctcaacaacggaccgcagagaattggccggaagtataagaaagtgcgatttatggcctatacagacgaaacctttaagacaagggaggccatccagcatgagagtgggattttgggacctcttctttacggcgaagttggtgataccctcctcatcatcttcaagaatcaagcttctcgcccctataacatttacccacacgggtgtactgacgttaggcctttgtatagcagaagacttcccaaaggcgtgaagcatctcaaagacttccccattttgccaggcgagatctttaagtacaaatggaccgtcacagtggaagatggaccgactaaatcagaccctcgatgccttacgcggtactattcctccttcgtgaatatggagagagatttggcaagcggactcataggaccactcctcatctgttacaaggaatctgtagaccagaggggtaaccagattatgagtgataaacgcaatgtgatcctttttagcgtcttcgacgagaaccggtcctggtacttgaccgagaatatacaaaggttccttcccaaccccgcaggcgttcagttggaagaccctgagtttcaggccagcaatattatgcactcaatcaacggctatgtgtttgatagtctccagctttctgtttgcctccatgaagtagcctattggtacatcttgtcaattggtgctcaaacagacttcctctccgtcttcttctccggctacacctttaagcacaagatggtgtatgaggacactctcacactctttccattttctggagaaaccgtgttcatgagcatggagaatccaggcctttggatcttgggttgccacaacagtgattttcgcaatcggggaatgactgctctcctcaaagtcagcagctgtgataagaacacaggcgactattacgaagattcttacgaggacataagtgcctacttgttgtccaagaataacgccattgagcccagatcattctcccagaatcctcccgtgcttaaaaggcatcagcgcgaaatcaccagaactactcttcagtctgatcaagaggagattgactatgacgacaccataagcgtggaaatgaagaaggaggatttcgatatctatgacgaagatgagaaccagtctccgcggagctttcagaagaagacgcgacactacttcattgcagcagtcgaaaggctttgggactacggtatgtcatcatcccctcatgtgttgcgcaatagagctcagagtggaagtgttccacagttcaagaaagtcgtctttcaagagtttacagatggcagcttcacacagcctctctatcggggcgagcttaacgaacatttgggactccttggtccctatatccgagccgaagtggaggacaacattatggttacctttaggaatcaagcctctcgcccctacagcttctactcctccctcatcagttatgaggaggatcagagacaaggcgctgaaccacggaagaactttgtgaaaccgaatgagacgaagacctacttctggaaagtacagcaccacatggcccccacaaaagacgaattcgattgcaaagcatgggcgtatttttcagacgttgacttggagaaagatgtacattcaggacttattggtcctttgttggtgtgtcacactaacactctcaatccagcccatggcaggcaggtgacagtccaggaattcgctcttttctttaccatctttgatgagaccaagtcctggtacttcacggaaaacatggagcgcaattgcagagccccctgtaacatacagatggaggaccctacctttaaggaaaattatcggttccacgcaatcaacggatacattatggatacactccctggccttgtgatggctcaggaccaacgaatcaggtggtacctcctcagcatgggttctaatgagaacatacactccattcacttttcaggacatgtgttcactgtccggaagaaagaagagtataagatggccctctacaatttgtatccaggcgtgtttgagaccgttgaaatgcttccctctaaagctggcatctggagagtagagtgcttgatcggagaacatcttcacgcaggtatgagcaccttgttcctcgtgtacagcaacaaatgtcagaccccacttggcatggccagtggacacattcgcgactttcagatcacagcatctggccagtatggacaatgggccccaaagttggctcgcctccattactccggtagcataaatgcgtggtccactaaagaacctttcagctggattaaggtcgatcttcttgcccccatgatcatccacggcattaagacacagggagcgaggcagaaattctcctccctctacatctcacagttcattattatgtatagtttggacggcaagaagtggcaaacttatagaggtaacagtactggaacactcatggtgttcttcggcaacgttgatagctctggcatcaaacacaacatctttaatcctcccataatagctcggtacatcagattgcatccgacccactacagcattaggagtacactccgaatggagcttatgggttgcgacttgaattcctgttcaatgccactcggaatggagtctaaagccatctctgatgcacagataaccgccagtagctactttacgaacatgtttgctacgtggtcaccctctaaggcaaggcttcatttgcaaggccggtctaatgcctggagacctcaggtgaacaacccgaaagaatggctccaggtggactttcagaagaccatgaaagtaacaggtgtcactactcagggagttaagtccttgctcaccagcatgtatgtgaaggagttccttatttcctcatcacaagatggccaccagtggaccctcttctttcagaatggtaaggtcaaagtgtttcagggcaatcaagacagcttcacacccgtggtgaacagtcttgatcctccactcttgacacgataccttcgaatccatccacagtcttgggttcaccagattgcattgcgcatggaagtacttggatgcgaggctcaggacctctac

SEQ ID NO: 2370 - protein, 1457 aa, synthetic construct
  REGION 1..1457: note = Variant of human B-domain deleted Factor VIII
MQIELSTCFFLCLLRFCFSATRRYYLGAVELSWDYMQSDLGELPVDARFPPRVPKSFPFNTSVVYKKTLFVEFTDHLFNIAKPRPPWMGLLGPTIQAEVYDTVVITLKNMASHPVSLHAVGVSYWKASEGAEYDDQTSQREKEDDKVFPGGSHTYVWQVLKENGPMASDPLCLTYSYLSHVDLVKDLNSGLIGALLVCREGSLAKEKTQTLHKFILLFAVFDEGKSWHSETKNSLMQDRDAASARAWPKMHTVNGYVNRSLPGLIGCHRKSVYWHVIGMGTTPEVHSIFLEGHTFLVRNHRQASLEISPITFLTAQTLLMDLGQFLLFCHISSHQHDGMEAYVKVDSCPEEPQLRMKNNEEAEDYDDDLTDSEMDVVRFDDDNSPSFIQIRSVAKKHPKTWVHYIAAEEEDWDYAPLVLAPDDRSYKSQYLNNGPQRIGRKYKKVRFMAYTDETFKTREAIQHESGILGPLLYGEVGDTLLIIFKNQASRPYNIYPHGCTDVRPLYSRRLPKGVKHLKDFPILPGEIFKYKWTVTVEDGPTKSDPRCLTRYYSSFVNMERDLASGLIGPLLICYKESVDQRGNQIMSDKRNVILFSVFDENRSWYLTENIQRFLPNPAGVQLEDPEFQASNIMHSINGYVFDSLQLSVCLHEVAYWYILSIGAQTDFLSVFFSGYTFKHKMVYEDTLTLFPFSGETVFMSMENPGLWILGCHNSDFRNRGMTALLKVSSCDKNTGDYYEDSYEDISAYLLSKNNAIEPRSFSQNPPVLKRHQREITRTTLQSDQEEIDYDDTISVEMKKEDFDIYDEDENQSPRSFQKKTRHYFIAAVERLWDYGMSSSPHVLRNRAQSGSVPQFKKVVFQEFTDGSFTQPLYRGELNEHLGLLGPYIRAEVEDNIMVTFRNQASRPYSFYSSLISYEEDQRQGAEPRKNFVKPNETKTYFWKVQHHMAPTKDEFDCKAWAYFSDVDLEKDVHSGLIGPLLVCHTNTLNPAHGRQVTVQEFALFFTIFDETKSWYFTENMERNCRAPCNIQMEDPTFKENYRFHAINGYIMDTLPGLVMAQDQRIRWYLLSMGSNENIHSIHFSGHVFTVRKKEEYKMALYNLYPGVFETVEMLPSKAGIWRVECLIGEHLHAGMSTLFLVYSNKCQTPLGMASGHIRDFQITASGQYGQWAPKLARLHYSGSINAWSTKEPFSWIKVDLLAPMIIHGIKTQGARQKFSSLYISQFIIMYSLDGKKWQTYRGNSTGTLMVFFGNVDSSGIKHNIFNPPIIARYIRLHPTHYSIRSTLRMELMGCDLNSCSMPLGMESKAISDAQITASSYFTNMFATWSPSKARLHLQGRSNAWRPQVNNPKEWLQVDFQKTMKVTGVTTQGVKSLLTSMYVKEFLISSSQDGHQWTLFFQNGKVKVFQGNQDSFTPVVNSLDPPLLTRYLRIHPQSWVHQIALRMEVLGCEAQDLY

SEQ ID NO: 2371 - DNA, 4371 bp, synthetic construct
  misc_feature 1..4371: note = Variant of human B-domain deleted Factor VIII
  source 1..4371: mol_type = other DNA
atgcagattgaactgtctacctgcttcttcctctgtttgctgaggttctgctttagcgccactagacggtactaccttggcgctgtggagctgtcctgggactatatgcagagtgatttgggagagcttcccgtcgacgcacgatttcctcctcgcgttccaaagtcatttcccttcaacacaagcgtggtgtacaagaagacgctcttcgtcgaattcaccgatcacctgttcaatatcgccaaacccagaccaccatggatgggtcttttggggcctaccatacaagcggaggtgtatgacacagttgttatcactctcaagaacatggcttctcatccggtaagtcttcacgcagtgggcgtgtcctactggaaagcttcagaaggagccgagtatgatgatcagacatcccagagggagaaagaagacgacaaggtatttccaggtgggtctcatacctatgtgtggcaagtgctcaaagagaatggccctatggcaagcgatccgctctgtttgacttacagctacctttcacacgttgacctcgtcaaggacctcaactccgggttgattggagccttgttggtatgcagggaaggatctcttgccaaagagaagacacagaccctccacaagtttatccttctctttgctgtgttcgatgagggcaaaagttggcatagcgaaacgaagaattccctcatgcaggatcgcgacgcagccagcgccagagcttggcccaagatgcacactgtgaacggatatgtcaataggtcacttcctggcttgattgggtgtcatcggaaaagtgtctactggcacgtgatcggaatggggacaacaccagaggtccactccatatttctcgaaggccataccttccttgttcgaaaccacagacaggcatccttggagatctctcccattacctttctcactgcccaaacgctccttatggacttgggtcagttccttctcttctgccatatcagctcacaccagcatgatggtatggaagcttatgtgaaagtcgacagttgtcctgaggagccacagttgcgcatgaagaataatgaagaagccgaggattacgacgacgatctcaccgattctgagatggacgtggtgaggtttgatgacgacaactctccctccttcattcaaatccggagcgtggcgaagaaacaccccaagacttgggtccactatatagcggcggaagaggaggattgggattacgctcctcttgtattggcaccagatgaccgctcatacaaaagccagtacctcaacaacggaccgcagagaattggccggaagtataagaaagtgcgatttatggcctatacagacgaaacctttaagacaagggaggccatccagcatgagagtgggattttgggacctcttctttacggcgaagttggtgataccctcctcatcatcttcaagaatcaagcttctcgcccctataacatttacccacacgggatcactgacgttaggcctttgtatagcagaagacttcccaaaggcgtgaagcatctcaaagacttccccattttgccaggcgagatctttaagtacaaatggaccgtcacagtggaagatggaccgactaaatcagaccctcgatgccttacgcggtactattcctccttcgtgaatatggagagagatttggcaagcggactcataggaccactcctcatctgttacaaggaatctgtagaccagaggggtaaccagattatgagtgataaacgcaatgtgatcctttttagcgtcttcgacgagaaccggtcctggtacttgaccgagaatatacaaaggttccttcccaaccccgcaggcgttcagttggaagaccctgagtttcaggccagcaatattatgcactcaatcaacggctatgtgtttgatagtctccagctttctgtttgcctccatgaagtagcctattggtacatcttgtcaattggtgctcaaacagacttcctctccgtcttcttctccggctacacctttaagcacaagagggtgtatgaggacactctcacactctttccattttctggagaaaccgtgttcatgagcatggagaatccaggcctttggatcttgggttgccacaacagtgattttcgcaatcggggaatgactgctctcctcaaagtcagcagctgtgataagaacacaggcgactattacgaagattcttacgaggacataagtgcctacttgttgtccaagaataacgccattgagcccagatcattctcccagaatcctcccgtgcttaaaaggcatcagcgcgaaatcaccagaactactcttcagtctgatcaagaggagattgactatgacgacaccataagcgtggaaatgaagaaggaggatttcgatatctatgacgaagatgagaaccagtctccgcggagctttcagaagaagacgcgacactacttcattgcagcagtcgaaaggctttgggactacggtatgtcatcatcccctcatgtgttgcgcaatagagctcagagtggaagtgttccacagttcaagaaagtcgtctttcaagagtttacagatggcagcttcacacagcctctctatcggggcgagcttaacgaacatttgggactccttggtccctatatccgagccgaagtggaggacaacattatggttacctttaggaatcaagcctctcgcccctacagcttctactcctccctcatcagttatgaggaggatcagagacaaggcgctgaaccacggaagaactttgtgaaaccgaatgagacgaagacctacttctggaaagtacagcaccacatggcccccacaaaagacgaattcgattgcaaagcatgggcgtatttttcagacgttgacttggagaaagatgtacattcaggacttattggtcctttgttggtgtgtcacactaacactctcaatccagcccatggcaggcaggtgacagtccaggaattcgctcttttctttaccatctttgatgagaccaagtcctggtacttcacggaaaacatggagcgcaattgcagagccccctgtaacatacagatggaggaccctacctttaaggaaaattatcggttccacgcaatcaacggatacattatggatacactccctggccttgtgatggctcaggaccaacgaatcaggtggtacctcctcagcatgggttctaatgagaacatacactccattcacttttcaggacatgtgttcactgtccggaagaaagaagagtataagatggccctctacaatttgtatccaggcgtgtttgagaccgttgaaatgcttccctctaaagctggcatctggagagtagagtgcttgatcggagaacatcttcacgcaggtatgagcaccttgttcctcgtgtacagcaacaaatgtcagaccccacttggcatggccagtggacacattcgcgactttcagatcacagcatctggccagtatggacaatgggccccaaagttggctcgcctccattactccggtagcataaatgcgtggtccactaaagaacctttcagctggattaaggtcgatcttcttgcccccatgatcatccacggcattaagacacagggagcgaggcagaaattctcctccctctacatctcacagttcattattatgtatagtttggacggcaagaagtggcaaacttatagaggtaacagtactggaacactcatggtgttcttcggcaacgttgatagctctggcatcaaacacaacatctttaatcctcccataatagctcggtacatcagattgcatccgacccactacagcattaggagtacactccgaatggagcttatgggttgcgacttgaattcctgttcaatgccactcggaatggagtctaaagccatctctgatgcacagataaccgccagtagctactttacgaacatgtttgctacgtggtcaccctctaaggcaaggcttcatttgcaaggccggtctaatgcctggagacctcaggtgaacaacccgaaagaatggctccaggtggactttcagaagaccatgaaagtaacaggtgtcactactcagggagttaagtccttgctcaccagcatgtatgtgaaggagttccttatttcctcatcacaagatggccaccagtggaccctcttctttcagaatggtaaggtcaaagtgtttcagggcaatcaagacagcttcacacccgtggtgaacagtcttgatcctccactcttgacacgataccttcgaatccatccacagtcttgggttcaccagattgcattgcgcatggaagtacttggatgcgaggctcaggacctctac

SEQ ID NO: 2372 - protein, 1457 aa, synthetic construct
  REGION 1..1457: note = Variant of human B-domain deleted Factor VIII
MQIELSTCFFLCLLRFCFSATRRYYLGAVELSWDYMQSDLGELPVDARFPPRVPKSFPFNTSVVYKKTLFVEFTDHLFNIAKPRPPWMGLLGPTIQAEVYDTVVITLKNMASHPVSLHAVGVSYWKASEGAEYDDQTSQREKEDDKVFPGGSHTYVWQVLKENGPMASDPLCLTYSYLSHVDLVKDLNSGLIGALLVCREGSLAKEKTQTLHKFILLFAVFDEGKSWHSETKNSLMQDRDAASARAWPKMHTVNGYVNRSLPGLIGCHRKSVYWHVIGMGTTPEVHSIFLEGHTFLVRNHRQASLEISPITFLTAQTLLMDLGQFLLFCHISSHQHDGMEAYVKVDSCPEEPQLRMKNNEEAEDYDDDLTDSEMDVVRFDDDNSPSFIQIRSVAKKHPKTWVHYIAAEEEDWDYAPLVLAPDDRSYKSQYLNNGPQRIGRKYKKVRFMAYTDETFKTREAIQHESGILGPLLYGEVGDTLLIIFKNQASRPYNIYPHGITDVRPLYSRRLPKGVKHLKDFPILPGEIFKYKWTVTVEDGPTKSDPRCLTRYYSSFVNMERDLASGLIGPLLICYKESVDQRGNQIMSDKRNVILFSVFDENRSWYLTENIQRFLPNPAGVQLEDPEFQASNIMHSINGYVFDSLQLSVCLHEVAYWYILSIGAQTDFLSVFFSGYTFKHKRVYEDTLTLFPFSGETVFMSMENPGLWILGCHNSDFRNRGMTALLKVSSCDKNTGDYYEDSYEDISAYLLSKNNAIEPRSFSQNPPVLKRHQREITRTTLQSDQEEIDYDDTISVEMKKEDFDIYDEDENQSPRSFQKKTRHYFIAAVERLWDYGMSSSPHVLRNRAQSGSVPQFKKVVFQEFTDGSFTQPLYRGELNEHLGLLGPYIRAEVEDNIMVTFRNQASRPYSFYSSLISYEEDQRQGAEPRKNFVKPNETKTYFWKVQHHMAPTKDEFDCKAWAYFSDVDLEKDVHSGLIGPLLVCHTNTLNPAHGRQVTVQEFALFFTIFDETKSWYFTENMERNCRAPCNIQMEDPTFKENYRFHAINGYIMDTLPGLVMAQDQRIRWYLLSMGSNENIHSIHFSGHVFTVRKKEEYKMALYNLYPGVFETVEMLPSKAGIWRVECLIGEHLHAGMSTLFLVYSNKCQTPLGMASGHIRDFQITASGQYGQWAPKLARLHYSGSINAWSTKEPFSWIKVDLLAPMIIHGIKTQGARQKFSSLYISQFIIMYSLDGKKWQTYRGNSTGTLMVFFGNVDSSGIKHNIFNPPIIARYIRLHPTHYSIRSTLRMELMGCDLNSCSMPLGMESKAISDAQITASSYFTNMFATWSPSKARLHLQGRSNAWRPQVNNPKEWLQVDFQKTMKVTGVTTQGVKSLLTSMYVKEFLISSSQDGHQWTLFFQNGKVKVFQGNQDSFTPVVNSLDPPLLTRYLRIHPQSWVHQIALRMEVLGCEAQDLY

SEQ ID NO: 2373 - DNA, 4371 bp, synthetic construct
  misc_feature 1..4371: note = Variant of human B-domain deleted Factor VIII
  source 1..4371: mol_type = other DNA
atgcagattgaactgtctacctgcttcttcctctgtttgctgaggttctgctttagcgccactagacggtactaccttggcgctgtggagctgtcctgggactatatgcagagtgatttgggagagcttcccgtcgacgcacgatttcctcctcgcgttccaaagtcatttcccttcaacacaagcgtggtgtacaagaagacgctcttcgtcgaattcaccgatcacctgttcaatatcgccaaacccagaccaccatggatgggtcttttggggcctaccatacaagcggaggtgtatgacacagttgttatcactctcaagaacatggcttctcatccggtaagtcttcacgcagtgggcgtgtcctactggaaagcttcagaaggagccgagtatgatgatcagacatcccagagggagaaagaagacgacaaggtatttccaggtgggtctcatacctatgtgtggcaagtgctcaaagagaatggccctatggcaagcgatccgctctgtttgacttacagctacctttcacacgttgacctcgtcaaggacctcaactccgggttgattggagccttgttggtatgcagggaaggatctcttgccaaagagaagacacagaccctccacaagtttatccttctctttgctgtgttcgatgagggcaaaagttggcatagcgaaacgaagaattccctcatgcaggatcgcgacgcagccagcgccagagcttggcccaagatgcacactgtgaacggatatgtcaataggtcacttcctggcttgattgggtgtcatcggaaaagtgtctactggcacgtgatcggaatggggacaacaccagaggtccactccatatttctcgaaggccataccttccttgttcgaaaccacagacaggcatccttggagatctctcccattacctttctcactgcccaaacgctccttatggacttgggtcagttccttctcttctgccatatcagctcacaccagcatgatggtatggaagcttatgtgaaagtcgacagttgtcctgaggagccacagttgcgcatgaagaataatgaagaagccgaggattacgacgacgatctcaccgattctgagatggacgtggtgaggtttgatgacgacaactctccctccttcattcaaatccggagcgtggcgaagaaacaccccaagacttgggtccactatatagcggcggaagaggaggattgggattacgctcctcttgtattggcaccagatgaccgctcatacaaaagccagtacctcaacaacggaccgcagagaattggccggaagtataagaaagtgcgatttatggcctatacagacgaaacctttaagacaagggaggccatccagcatgagagtgggattttgggacctcttctttacggcgaagttggtgataccctcctcatcatcttcaagaatcaagcttctcgcccctataacatttacccacacgggatcactgacgttaggcctttgtatagcagaagacttcccaaaggcgtgaagcatctcaaagacttccccattttgccaggcgagatctttaagtacaaatggaccgtcacagtggaagatggaccgactaaatcagaccctcgatgccttacgcggtactattcctccttcgtgaatatggagagagatttggcaagcggactcataggaccactcctcatctgttacaaggaatctgtagaccagaggggtaaccagattatgagtgataaacgcaatgtgatcctttttagcgtcttcgacgagaaccggtcctggtacttgaccgagaatatacaaaggttccttcccaaccccgcaggcgttcagttggaagaccctgagtttcaggccagcaatattatgcactcaatcaacggctatgtgtttgatagtctccagctttctgtttgcctccatgaagtagcctattggtacatcttgtcaattggtgctcaaacagacttcctctccgtcttcttctcaggctacacctttaagcacaagatggtgtatgaggacactctcacactctttccattttctggagaaaccgtgttcatgagcatggagaatccaggcctttggatcttgggttgccacaacagtgattttcgcaatcggggaatgactgctctcctcaaagtcagcagctgtgataagaacacaggcgactattacgaagattcttacgaggacataagtgcctacttgttgtccaagaataacgccattgagcccagatcattctcccagaatcctcccgtgcttaaaaggcatcagcgcgaaatcaccagaactactcttcagtctgatcaagaggagattgactatgacgacaccataagcgtggaaatgaagaaggaggatttcgatatctatgacgaagatgagaaccagtctccgcggagctttcagaagaagacgcgacactacttcattgcagcagtcgaaaggctttgggactacggtatgtcatcatcccctcatgtgttgcgcaatagagctcagagtggaagtgttccacagttcaagaaagtcgtctttcaagagtttacagatggcagcttcacacagcctctctatcggggcgagcttaacgaacatttgggactccttggtccctatatccgagccgaagtggaggacaacattatggttacctttaggaatcaagcctctcgcccctacagcttctactcctccctcatcagttatgaggaggatcagagacaaggcgctgaaccacggaagaactttgtgaaaccgaatgagacgaagacctacttctggaaagtacagcaccacatggcccccacaaaagacgaattcgattgcaaagcatgggcgtatttttcagacgttgacttggagaaagatgtacattcaggacttattggtcctttgttggtgtgtcacactaacactctcaatccagcccatggcaggcaggtgacagtccaggaattcgctcttttctttaccatctttgatgagaccaagtcctggtacttcacggaaaacatggagcgcaattgcagagccccctgtaacatacagatggaggaccctacctttaaggaaaattatcggttccacgcaatcaacggatacattatggatacactccctggccttgtgatggctcaggaccaacgaatcaggtggtacctcctcagcatgggttctaatgagaacatacactccattcacttttcaggacatgtgttcactgtccggaaggaggaagagtataagatggccctctacaatttgtatccaggcgtgtttgagaccgttgaaatgcttccctctaaagctggcatctggagagtagagtgcttgatcggagaacatcttcacgcaggtatgagcaccttgttcctcgtgtacagcaacaaatgtcagaccccacttggcatggccagtggacacattcgcgactttcagatcacagcatctggccagtatggacaatgggccccaaagttggctcgcctccattactcaggtagcataaatgcgtggtccactaaagaacctttcagctggattaaggtcgatcttcttgcccccatgatcatccacggcattaagacacagggagcgaggcagaaattctcctccctctacatctcacagttcattattatgtatagtttggacggcaagaagtggcaaacttatagaggtaacagtactggaacactcatggtgttcttcggcaacgttgatagctctggcatcaaacacaacatctttaatcctcccataatagctcggtacatcagattgcatccgacccactacagcattaggagtacactccgaatggagcttatgggttgcgacttgaattcctgttcaatgccactcggaatggagtctaaagccatctctgatgcacagataaccgccagtagctactttacgaacatgtttgctacgtggtcaccctctaaggcaaggcttcatttgcaaggccggtctaatgcctggagacctcaggtgaacaacccgaaagaatggctccaggtggactttcagaagaccatgaaagtaacaggtgtcactactcagggagttaagtccttgctcaccagcatgtatgtgaaggagttccttatttcctcatcacaagatggccaccagtggaccctcttctttcagaatggtaaggtcaaagtgtttcagggcaatcaagacagcttcacacccgtggtgaacagtcttgatcctccactcttgacacgataccttcgaatccatccacagtcttgggttcaccagattgcattgcgcatggaagtacttggatgcgaggctcaggacctctac

SEQ ID NO: 2374 - protein, 1457 aa, synthetic construct
  REGION 1..1457: note = Variant of human B-domain deleted Factor VIII
MQIELSTCFFLCLLRFCFSATRRYYLGAVELSWDYMQSDLGELPVDARFPPRVPKSFPFNTSVVYKKTLFVEFTDHLFNIAKPRPPWMGLLGPTIQAEVYDTVVITLKNMASHPVSLHAVGVSYWKASEGAEYDDQTSQREKEDDKVFPGGSHTYVWQVLKENGPMASDPLCLTYSYLSHVDLVKDLNSGLIGALLVCREGSLAKEKTQTLHKFILLFAVFDEGKSWHSETKNSLMQDRDAASARAWPKMHTVNGYVNRSLPGLIGCHRKSVYWHVIGMGTTPEVHSIFLEGHTFLVRNHRQASLEISPITFLTAQTLLMDLGQFLLFCHISSHQHDGMEAYVKVDSCPEEPQLRMKNNEEAEDYDDDLTDSEMDVVRFDDDNSPSFIQIRSVAKKHPKTWVHYIAAEEEDWDYAPLVLAPDDRSYKSQYLNNGPQRIGRKYKKVRFMAYTDETFKTREAIQHESGILGPLLYGEVGDTLLIIFKNQASRPYNIYPHGITDVRPLYSRRLPKGVKHLKDFPILPGEIFKYKWTVTVEDGPTKSDPRCLTRYYSSFVNMERDLASGLIGPLLICYKESVDQRGNQIMSDKRNVILFSVFDENRSWYLTENIQRFLPNPAGVQLEDPEFQASNIMHSINGYVFDSLQLSVCLHEVAYWYILSIGAQTDFLSVFFSGYTFKHKMVYEDTLTLFPFSGETVFMSMENPGLWILGCHNSDFRNRGMTALLKVSSCDKNTGDYYEDSYEDISAYLLSKNNAIEPRSFSQNPPVLKRHQREITRTTLQSDQEEIDYDDTISVEMKKEDFDIYDEDENQSPRSFQKKTRHYFIAAVERLWDYGMSSSPHVLRNRAQSGSVPQFKKVVFQEFTDGSFTQPLYRGELNEHLGLLGPYIRAEVEDNIMVTFRNQASRPYSFYSSLISYEEDQRQGAEPRKNFVKPNETKTYFWKVQHHMAPTKDEFDCKAWAYFSDVDLEKDVHSGLIGPLLVCHTNTLNPAHGRQVTVQEFALFFTIFDETKSWYFTENMERNCRAPCNIQMEDPTFKENYRFHAINGYIMDTLPGLVMAQDQRIRWYLLSMGSNENIHSIHFSGHVFTVRKEEEYKMALYNLYPGVFETVEMLPSKAGIWRVECLIGEHLHAGMSTLFLVYSNKCQTPLGMASGHIRDFQITASGQYGQWAPKLARLHYSGSINAWSTKEPFSWIKVDLLAPMIIHGIKTQGARQKFSSLYISQFIIMYSLDGKKWQTYRGNSTGTLMVFFGNVDSSGIKHNIFNPPIIARYIRLHPTHYSIRSTLRMELMGCDLNSCSMPLGMESKAISDAQITASSYFTNMFATWSPSKARLHLQGRSNAWRPQVNNPKEWLQVDFQKTMKVTGVTTQGVKSLLTSMYVKEFLISSSQDGHQWTLFFQNGKVKVFQGNQDSFTPVVNSLDPPLLTRYLRIHPQSWVHQIALRMEVLGCEAQDLY

SEQ ID NO: 2375 - DNA, 4371 bp, synthetic construct
  misc_feature 1..4371: note = Variant of human B-domain deleted Factor VIII
  source 1..4371: mol_type = other DNA
atgcagattgaactgtctacctgcttcttcctctgtttgctgaggttctgctttagcgccactagacggtactaccttggcgctgtggagctgtcctgggactatatgcagagtgatttgggagagcttcccgtcgacgcacgatttcctcctcgcgttccaaagtcatttcccttcaacacaagcgtggtgtacaagaagacgctcttcgtcgaattcaccgatcacctgttcaatatcgccaaacccagaccaccatggatgggtcttttggggcctaccatacaagcggaggtgtatgacacagttgttatcactctcaagaacatggcttctcatccggtaagtcttcacgcagtgggcgtgtcctactggaaagcttcagaaggagccgagtatgatgatcagacatcccagagggagaaagaagacgacaaggtatttccaggtgggtctcatacctatgtgtggcaagtgctcaaagagaatggccctatggcaagcgatccgctctgtttgacttacagctacctttcacacgttgacctcgtcaaggacctcaactccgggttgattggagccttgttggtatgcagggaaggatctcttgccaaagagaagacacagaccctccacaagtttatccttctctttgctgtgttcgatgagggcaaaagttggcatagcgaaacgaagaattccctcatgcaggatcgcgacgcagccagcgccagagcttggcccaagatgcacactgtgaacggatatgtcaataggtcacttcctggcttgattgggtgtcatcggaaaagtgtctactggcacgtgatcggaatggggacaacaccagaggtccactccatatttctcgaaggccataccttccttgttcgaaaccacagacaggcatccttggagatctctcccattacctttctcactgcccaaacgctccttatggacttgggtcagttccttctcttctgccatatcagctcacaccagcatgatggtatggaagcttatgtgaaagtcgacagttgtcctgaggagccacagttgcgcatgaagaataatgaagaagccgaggattacgacgacgatctcaccgattctgagatggacgtggtgaggtttgatgacgacaactctccctccttcattcaaatccggagcgtggcgaagaaacaccccaagacttgggtccactatatagcggcggaagaggaggattgggattacgctcctcttgtattggcaccagatgaccgctcatacaaaagccagtacctcaacaacggaccgcagagaattggccggaagtataagaaagtgcgatttatggcctatacagacgaaacctttaagacaagggaggccatccagcatgagagtgggattttgggacctcttctttacggcgaagttggtgataccctcctcatcatcttcaagaatcaagcttctcgcccctataacatttacccacacgggatcactgacgttaggcctttgtatagcagaagacttcccaaaggcgtgaagcatctcaaagacttccccattttgccaggcgagatctttaagtacaaatggaccgtcacagtggaagatggaccgactaaatcagaccctcgatgccttacgcggtactattcctccttcgtgaatatggagagagatttggcaagcggactcataggaccactcctcatctgttacaaggaatctgtagaccagaggggtaaccagattatgagtgataaacgcaatgtgatcctttttagcgtcttcgacgagaaccggtcctggtacttgaccgagaatatacaaaggttccttcccaaccccgcaggcgttcagttggaagaccctgagtttcaggccagcaatattatgcactcaatcaacggctatgtgtttgatagtctccagctttctgtttgcctccatgaagtagcctattggtacatcttgtcaattggtgctcaaacagacttcctctccgtcttcttctccggctacacctttaagcacaagatggtgtatgaggacactctcacactctttccattttctggagaaaccgtgttcatgagcatggagaatccaggcctttggatcttgggttgccacaacagtgattttcgcaatcggggaatgactgctctcctcaaagtcagcagctgtgataagaacacaggcgactattacgaagattcttacgaggacataagtgcctacttgttgtccaagaataacgccattgagcccagatcattctcccagaatcctcccgtgcttaaaaggcatcagcgcgaaatcaccagaactactcttcagtctgatcaagaggagattgactatgacgacaccataagcgtggaaatgaagaaggaggatttcgatatctatgacgaagatgagaaccagtctccgcggagctttcagaagaagacgcgacactacttcattgcagcagtcgaaaggctttgggactacggtatgtcatcatcccctcatgtgttgcgcaatagagctcagagtggaagtgttccacagttcaagaaagtcgtctttcaagagtttacagatggcagcttcacacagcctctctatcggggcgagcttaacgaacatttgggactccttggtccctatatccgagccgaagtggaggacaacattatggttacctttaggaatcaagcctctcgcccctacagcttctactcctccctcatcagttatgaggaggatcagagacaaggcgctgaaccacggaagaactttgtgaaaccgaatgagacgaagacctacttctggaaagtacagcaccacatggcccccacaaaagacgaattcgattgcaaagcatgggcgtatttttcagacgttgacttggagaaagatgtacattcaggacttattggtcctttgttggtgtgtcacactaacactctcaatccagcccatggcaggcaggtgacagtccaggaattcgctcttttctttaccatctttgatgagaccaagtcctggtacttcacggaaaacatggagcgcaattgcagagccccctgtaacatacagatggaggaccctacctttaaggaaaattatcggttccacgcaatcaacggatacattatggatacactccctggccttgtgatggctcaggaccaacgaatcaggtggtacctcctcagcatgggttctaatgagaacatacactccattcacttttcaggacatgtgttcactgtccggaagaaagaagagtataagatggccctctacaatttgtatccaggcgtgtttgagaccgttgaaatgcttccctctaaagctggcatctggagagtagagtgcttgatcggagaacatcttcacgcaggtatgagcaccttgttcctcgtgtacagcaacaaatgtcaggcgccacttggcatggccagtggacacattcgcgactttcagatcacagcatctggccagtatggacaatgggccccaaagttggctcgcctccattactccggtagcataaatgcgtggtccactaaagaacctttcagctggattaaggtcgatcttcttgcccccatgatcatccacggcattaagacacagggagcgaggcagaaattctcctccctctacatctcacagttcattattatgtatagtttggacggcaagaagtggcaaacttatagaggtaacagtactggaacactcatggtgttcttcggcaacgttgatagctctggcatcaaacacaacatctttaatcctcccataatagctcggtacatcagattgcatccgacccactacagcattaggagtacactccgaatggagcttatgggttgcgacttgaattcctgttcaatgccactcggaatggagtctaaagccatctctgatgcacagataaccgccagtagctactttacgaacatgtttgctacgtggtcaccctctaaggcaaggcttcatttgcaaggccggtctaatgcctggagacctcaggtgaacaacccgaaagaatggctccaggtggactttcagaagaccatgaaagtaacaggtgtcactactcagggagttaagtccttgctcaccagcatgtatgtgaaggagttccttatttcctcatcacaagatggccaccagtggaccctcttctttcagaatggtaaggtcaaagtgtttcagggcaatcaagacagcttcacacccgtggtgaacagtcttgatcctccactcttgacacgataccttcgaatccatccacagtcttgggttcaccagattgcattgcgcatggaagtacttggatgcgaggctcaggacctctac

SEQ ID NO: 2376 - protein, 1457 aa, synthetic construct
  REGION 1..1457: note = Variant of human B-domain deleted Factor VIII
MQIELSTCFFLCLLRFCFSATRRYYLGAVELSWDYMQSDLGELPVDARFPPRVPKSFPFNTSVVYKKTLFVEFTDHLFNIAKPRPPWMGLLGPTIQAEVYDTVVITLKNMASHPVSLHAVGVSYWKASEGAEYDDQTSQREKEDDKVFPGGSHTYVWQVLKENGPMASDPLCLTYSYLSHVDLVKDLNSGLIGALLVCREGSLAKEKTQTLHKFILLFAVFDEGKSWHSETKNSLMQDRDAASARAWPKMHTVNGYVNRSLPGLIGCHRKSVYWHVIGMGTTPEVHSIFLEGHTFLVRNHRQASLEISPITFLTAQTLLMDLGQFLLFCHISSHQHDGMEAYVKVDSCPEEPQLRMKNNEEAEDYDDDLTDSEMDVVRFDDDNSPSFIQIRSVAKKHPKTWVHYIAAEEEDWDYAPLVLAPDDRSYKSQYLNNGPQRIGRKYKKVRFMAYTDETFKTREAIQHESGILGPLLYGEVGDTLLIIFKNQASRPYNIYPHGITDVRPLYSRRLPKGVKHLKDFPILPGEIFKYKWTVTVEDGPTKSDPRCLTRYYSSFVNMERDLASGLIGPLLICYKESVDQRGNQIMSDKRNVILFSVFDENRSWYLTENIQRFLPNPAGVQLEDPEFQASNIMHSINGYVFDSLQLSVCLHEVAYWYILSIGAQTDFLSVFFSGYTFKHKMVYEDTLTLFPFSGETVFMSMENPGLWILGCHNSDFRNRGMTALLKVSSCDKNTGDYYEDSYEDISAYLLSKNNAIEPRSFSQNPPVLKRHQREITRTTLQSDQEEIDYDDTISVEMKKEDFDIYDEDENQSPRSFQKKTRHYFIAAVERLWDYGMSSSPHVLRNRAQSGSVPQFKKVVFQEFTDGSFTQPLYRGELNEHLGLLGPYIRAEVEDNIMVTFRNQASRPYSFYSSLISYEEDQRQGAEPRKNFVKPNETKTYFWKVQHHMAPTKDEFDCKAWAYFSDVDLEKDVHSGLIGPLLVCHTNTLNPAHGRQVTVQEFALFFTIFDETKSWYFTENMERNCRAPCNIQMEDPTFKENYRFHAINGYIMDTLPGLVMAQDQRIRWYLLSMGSNENIHSIHFSGHVFTVRKKEEYKMALYNLYPGVFETVEMLPSKAGIWRVECLIGEHLHAGMSTLFLVYSNKCQAPLGMASGHIRDFQITASGQYGQWAPKLARLHYSGSINAWSTKEPFSWIKVDLLAPMIIHGIKTQGARQKFSSLYISQFIIMYSLDGKKWQTYRGNSTGTLMVFFGNVDSSGIKHNIFNPPIIARYIRLHPTHYSIRSTLRMELMGCDLNSCSMPLGMESKAISDAQITASSYFTNMFATWSPSKARLHLQGRSNAWRPQVNNPKEWLQVDFQKTMKVTGVTTQGVKSLLTSMYVKEFLISSSQDGHQWTLFFQNGKVKVFQGNQDSFTPVVNSLDPPLLTRYLRIHPQSWVHQIALRMEVLGCEAQDLY

SEQ ID NO: 2377 - DNA, 4371 bp, synthetic construct
  misc_feature 1..4371: note = Variant of human B-domain deleted Factor VIII
  source 1..4371: mol_type = other DNA
atgcagattgaactgtctacctgcttcttcctctgtttgctgaggttctgctttagcgccactagacggtactaccttggcgctgtggagctgtcctgggactatatgcagagtgatttgggagagcttcccgtcgacgcacgatttcctcctcgcgttccaaagtcatttcccttcaacacaagctgggtgtacaagaagacgctcttcgtcgaattcaccgatcacctgttcaatatcgccaaacccagaccaccatggatgggtcttttggggcctaccatacaagcggaggtgtatgacacagttgttatcactctcaagaacatggcttctcatccggtaagtcttcacgcagtgggcgtgtcctactggaaagcttcagaaggagccgagtatgatgatcagacatcccagagggagaaagaagacgacaaggtatttccaggtgggtctcatacctatgtgtggcaagtgctcaaagagaatggccctatggcaagcgatccgctctgtttgacttacagctacctttcacacgttgacctcgtcaaggacctcaactccgggttgattggagccttgttggtatgcagggaaggatctcttgccaaagagaagacacagaccctccacaagtttatccttctctttgctgtgttcgatgagggcaaaagttggcatagcgaaacgaagaattccctcatgcaggatcgcgacgcagccagcgccagagcttggcccaagatgcacactgtgaacggatatgtcaataggtcacttcctggcttgattgggtgtcatcggaaaagtgtctactggcacgtgatcggaatggggacaacaccagaggtccactccatatttctcgaaggccataccttccttgttcgaaaccacagacaggcatccttggagatctctcccattacctttctcactgcccaaacgctccttatggacttgggtcagttccttctcttctgccatatcagctcacaccagcatgatggtatggaagcttatgtgaaagtcgacagttgtcctgaggagccacagttgcgcatgaagaataatgaagaagccgaggattacgacgacgatctcaccgattctgagatggacgtggtgaggtttgatgacgacaactctccctccttcattcaaatccggagcgtggcgaagaaacaccccaagacttgggtccactatatagcggcggaagaggaggattgggattacgctcctcttgtattggcaccagatgaccgctcatacaaaagccagtacctcaacaacggaccgcagagaattggccggaagtataagaaagtgcgatttatggcctatacagacgaaacctttaagacaagggaggccatccagcatgagagtgggattttgggacctcttctttacggcgaagttggtgataccctcctcatcatcttcaagaatcaagcttctcgcccctataacatttacccacacgggatcactgacgttaggcctttgtatagcagaagacttcccaaaggcgtgaagcatctcaaagacttccccattttgccaggcgagatctttaagtacaaatggaccgtcacagtggaagatggaccgactaaatcagaccctcgatgccttacgcggtactattcctccttcgtgaatatggagagagatttggcaagcggactcataggaccactcctcatctgttacaaggaatctgtagaccagaggggtaaccagattatgagtgataaacgcaatgtgatcctttttagcgtcttcgacgagaaccggtcctggtacttgaccgagaatatacaaaggttccttcccaaccccgcaggcgttcagttggaagaccctgagtttcaggccagcaatattatgcactcaatcaacggctatgtgtttgatagtctccagctttctgtttgcctccatgaagtagcctattggtacatcttgtcaattggtgctcaaacagacttcctctccgtcttcttctccggctacacctttaagcacaagatggtgtatgaggacactctcacactctttccattttctggagaaaccgtgttcatgagcatggagaatccaggcctttggatcttgggttgccacaacagtgattttcgcaatcggggaatgactgctctcctcaaagtcagcagctgtgataagaacacaggcgactattacgaagattcttacgaggacataagtgcctacttgttgtccaagaataacgccattgagcccagatcattctcccagaatcctcccgtgcttaaaaggcatcagcgcgaaatcaccagaactactcttcagtctgatcaagaggagattgactatgacgacaccataagcgtggaaatgaagaaggaggatttcgatatctatgacgaagatgagaaccagtctccgcggagctttcagaagaagacgcgacactacttcattgcagcagtcgaaaggctttgggactacggtatgtcatcatcccctcatgtgttgcgcaatagagctcagagtggaagtgttccacagttcaagaaagtcgtctttcaagagtttacagatggcagcttcacacagcctctctatcggggcgagcttaacgaacatttgggactccttggtccctatatccgagccgaagtggaggacaacattatggttacctttaggaatcaagcctctcgcccctacagcttctactcctccctcatcagttatgaggaggatcagagacaaggcgctgaaccacggaagaactttgtgaaaccgaatgagacgaagacctacttctggaaagtacagcaccacatggcccccacaaaagacgaattcgattgcaaagcatgggcgtatttttcagacgttgacttggagaaagatgtacattcaggacttattggtcctttgttggtgtgtcacactaacactctcaatccagcccatggcaggcaggtgacagtccaggaattcgctcttttctttaccatctttgatgagaccaagtcctggtacttcacggaaaacatggagcgcaattgcagagccccctgtaacatacagatggaggaccctacctttaaggaaaattatcggttccacgcaatcaacggatacattatggatacactccctggccttgtgatggctcaggaccaacgaatcaggtggtacctcctcagcatgggttctaatgagaacatacactccattcacttttcaggacatgtgttcactgtccggaagaaagaagagtataagatggccctctacaatttgtatccaggcgtgtttgagaccgttgaaatgcttccctctaaagctggcatctggagagtagagtgcttgatcggagaacatcttcacgcaggtatgagcaccttgttcctcgtgtacagcaacaaatgtcagaccccacttggcatggccagtggacacattcgcgactttcagatcacagcatctggccagtatggacaatgggccccaaagttggctcgcctccattactccggtagcataaatgcgtggtccactaaagaacctttcagctggattaaggtcgatcttcttgcccccatgatcatccacggcattaagacacagggagcgaggcagaaattctcctccctctacatctcacagttcattattatgtatagtttggacggcaagaagtggcaaacttatagaggtaacagtactggaacactcatggtgttcttcggcaacgttgatagctctggcatcaaacacaacatctttaatcctcccataatagctcggtacatcagattgcatccgacccactacagcattaggagtacactccgaatggagcttatgggttgcgacttgaattcctgttcaatgccactcggaatggagtctaaagccatctctgatgcacagataaccgccagtagctactttacgaacatgtttgctacgtggtcaccctctaaggcaaggcttcatttgcaaggccggtctaatgcctggagacctcaggtgaacaacccgaaagaatggctccaggtggactttcagaagaccatgaaagtaacaggtgtcactactcagggagttaagtccttgctcaccagcatgtatgtgaaggagttccttatttcctcatcacaagatggccaccagtggaccctcttctttcagaatggtaaggtcaaagtgtttcagggcaatcaagacagcttcacacccgtggtgaacagtcttgatcctccactcttgacacgataccttcgaatccatccacagtcttgggttcaccagattgcattgcgcatggaagtacttggatgcgaggctcaggacctctac

SEQ ID NO: 2378 - protein, 1457 aa, synthetic construct
  REGION 1..1457: note = Variant of human B-domain deleted Factor VIII
MQIELSTCFFLCLLRFCFSATRRYYLGAVELSWDYMQSDLGELPVDARFPPRVPKSFPFNTSWVYKKTLFVEFTDHLFNIAKPRPPWMGLLGPTIQAEVYDTVVITLKNMASHPVSLHAVGVSYWKASEGAEYDDQTSQREKEDDKVFPGGSHTYVWQVLKENGPMASDPLCLTYSYLSHVDLVKDLNSGLIGALLVCREGSLAKEKTQTLHKFILLFAVFDEGKSWHSETKNSLMQDRDAASARAWPKMHTVNGYVNRSLPGLIGCHRKSVYWHVIGMGTTPEVHSIFLEGHTFLVRNHRQASLEISPITFLTAQTLLMDLGQFLLFCHISSHQHDGMEAYVKVDSCPEEPQLRMKNNEEAEDYDDDLTDSEMDVVRFDDDNSPSFIQIRSVAKKHPKTWVHYIAAEEEDWDYAPLVLAPDDRSYKSQYLNNGPQRIGRKYKKVRFMAYTDETFKTREAIQHESGILGPLLYGEVGDTLLIIFKNQASRPYNIYPHGITDVRPLYSRRLPKGVKHLKDFPILPGEIFKYKWTVTVEDGPTKSDPRCLTRYYSSFVNMERDLASGLIGPLLICYKESVDQRGNQIMSDKRNVILFSVFDENRSWYLTENIQRFLPNPAGVQLEDPEFQASNIMHSINGYVFDSLQLSVCLHEVAYWYILSIGAQTDFLSVFFSGYTFKHKMVYEDTLTLFPFSGETVFMSMENPGLWILGCHNSDFRNRGMTALLKVSSCDKNTGDYYEDSYEDISAYLLSKNNAIEPRSFSQNPPVLKRHQREITRTTLQSDQEEIDYDDTISVEMKKEDFDIYDEDENQSPRSFQKKTRHYFIAAVERLWDYGMSSSPHVLRNRAQSGSVPQFKKVVFQEFTDGSFTQPLYRGELNEHLGLLGPYIRAEVEDNIMVTFRNQASRPYSFYSSLISYEEDQRQGAEPRKNFVKPNETKTYFWKVQHHMAPTKDEFDCKAWAYFSDVDLEKDVHSGLIGPLLVCHTNTLNPAHGRQVTVQEFALFFTIFDETKSWYFTENMERNCRAPCNIQMEDPTFKENYRFHAINGYIMDTLPGLVMAQDQRIRWYLLSMGSNENIHSIHFSGHVFTVRKKEEYKMALYNLYPGVFETVEMLPSKAGIWRVECLIGEHLHAGMSTLFLVYSNKCQTPLGMASGHIRDFQITASGQYGQWAPKLARLHYSGSINAWSTKEPFSWIKVDLLAPMIIHGIKTQGARQKFSSLYISQFIIMYSLDGKKWQTYRGNSTGTLMVFFGNVDSSGIKHNIFNPPIIARYIRLHPTHYSIRSTLRMELMGCDLNSCSMPLGMESKAISDAQITASSYFTNMFATWSPSKARLHLQGRSNAWRPQVNNPKEWLQVDFQKTMKVTGVTTQGVKSLLTSMYVKEFLISSSQDGHQWTLFFQNGKVKVFQGNQDSFTPVVNSLDPPLLTRYLRIHPQSWVHQIALRMEVLGCEAQDLY

SEQ ID NO: 2379 - DNA, 4371 bp, synthetic construct
  misc_feature 1..4371: note = Variant of human B-domain deleted Factor VIII
  source 1..4371: mol_type = other DNA
atgcagattgaactgtctacctgcttcttcctctgtttgctgaggttctgctttagcgccactagacggtactaccttggcgctgtggagctgtcctgggactatatgcagagtgatttgggagagcttcccgtcgacgcacgatttcctcctcgcgttccaaagtcatttcccttcaacacaagcgtggtgtacaagaagacgctcttcgtcgaattcaccgatcacctgttcaatatcgccaaacccagaccaccatggatgggtcttttggggcctaccatacaagcggaggtgtatgacacagttgttatcactctcaagaacatggcttctcatccggtaagtcttcacgcagtgggcgtgtcctactggaaagcttcagaaggagccgagtatgatgatcagacatcccagagggagaaagaagacgacaaggtatttccaggtgggtctcatacctatgtgtggcaagtgctcaaagagaatggccctatggcaagcgatccgctctgtttgacttacagctacctttcacacgttgacctcgtcaaggacctcaactccgggttgattggagccttgttggtatgcagggaaggatctcttgccaaagagaagacacagaccctccacaagtttatccttctctttgctgtgttcgatgagggcaaaagttggcatagcgaaacgaagaattccctcatgcaggatcgcgacgcagccagcgccagagcttggcccaagatgcacactgtgaacggatatgtcaataggtcacttcctggcttgattgggtgtcatcggaaaagtgtctactggcacgtgatcggaatggggacaacaccagaggtccactccatatttctcgaaggccataccttccttgttcgaaaccacagacaggcatccttggagatctctcccattacctttctcactgcccaaacgctccttatggacttgggtcagttccttctcttctgccatatcagctcacaccagcatgatggtatggaagcttatgtgaaagtcgacagttgtcctgaggagccacagttgcgcatgaagaataatgaagaagccgaggattacgacgacgatctcaccgattctgagatggacgtggtgaggtttgatgacgacaactctccctccttcattcaaatccggagcgtggcgaagaaacaccccaagacttgggtccactatatagcggcggaagaggaggattgggattacgctcctcttgtattggcaccagatgaccgctcatacaaaagccagtacctcaacaacggaccgcagagaattggccggaagtataagaaagtgcgatttatggcctatacagacgaaacctttaagacaagggaggccatccagcatgagagtgggattttgggacctcttctttacggcgaagttggtgataccctcctcatcatcttcaagaatcaagcttctcgcccctataacatttacccacacgggatcactgacgttaggcctttgtatagcagaagacttcccaaaggcgtgaagcatctcaaagacttccccattttgccaggcgagatctttaagtacaaatggaccgtcacagtggaagatggaccgactaaatcagaccctcgatgccttacgcggtactattcctccttcgtgaatatggagagagatttggcaagcggactcataggaccactcctcatctgttacaaggaatctgtagaccagaggggtaaccagattatgagtgataaacgcaatgtgatcctttttagcgtcttcgacgagaaccggtcctggtacttgaccgagaatatacaaaggttccttcccaaccccgcaggcgttcagttggaagaccctgagtttcaggccagcaatattatgcactcaatcaacggctatgtgtttgatagtctccagctttctgtttgcctccatgaagtagcctattggtacatcttgtcaattggtgctcaaacagacttcctctccgtcttcttctccggctacacctttaagcacaagatggtgtatgaggacactctcacactctttccattttctggagaaaccgtgttcatgagcatggagaatccaggcctttggatcttgggttgccacaacagtgattttcgcaatcggggaatgactgctctcctcaaagtcagcagctgtgataagaacacaggcgactattacgaagattcttacgaggacataagtgcctacttgttgtcccagaataacgccattgagcccagatcattctcccagaatcctcccgtgcttaaaaggcatcagcgcgaaatcaccagaactactcttcagtctgatcaagaggagattgactatgacgacaccataagcgtggaaatgaagaaggaggatttcgatatctatgacgaagatgagaaccagtctccgcggagctttcagaagaagacgcgacactacttcattgcagcagtcgaaaggctttgggactacggtatgtcatcatcccctcatgtgttgcgcaatagagctcagagtggaagtgttccacagttcaagaaagtcgtctttcaagagtttacagatggcagcttcacacagcctctctatcggggcgagcttaacgaacatttgggactccttggtccctatatccgagccgaagtggaggacaacattatggttacctttaggaatcaagcctctcgcccctacagcttctactcctccctcatcagttatgaggaggatcagagacaaggcgctgaaccacggaagaactttgtgaaaccgaatgagacgaagacctacttctggaaagtacagcaccacatggcccccacaaaagacgaattcgattgcaaagcatgggcgtatttttcagacgttgacttggagaaagatgtacattcaggacttattggtcctttgttggtgtgtcacactaacactctcaatccagcccatggcaggcaggtgacagtccaggaattcgctcttttctttaccatctttgatgagaccaagtcctggtacttcacggaaaacatggagcgcaattgcagagccccctgtaacatacagatggaggaccctacctttaaggaaaattatcggttccacgcaatcaacggatacattatggatacactccctggccttgtgatggctcaggaccaacgaatcaggtggtacctcctcagcatgggttctaatgagaacatacactccattcacttttcaggacatgtgttcactgtccggaagaaagaagagtataagatggccctctacaatttgtatccaggcgtgtttgagaccgttgaaatgcttccctctaaagctggcatctggagagtagagtgcttgatcggagaacatcttcacgcaggtatgagcaccttgttcctcgtgtacagcaacaaatgtcagaccccacttggcatggccagtggacacattcgcgactttcagatcacagcatctggccagtatggacaatgggccccaaagttggctcgcctccattactccggtagcataaatgcgtggtccactaaagaacctttcagctggattaaggtcgatcttcttgcccccatgatcatccacggcattaagacacagggagcgaggcagaaattctcctccctctacatctcacagttcattattatgtatagtttggacggcaagaagtggcaaacttatagaggtaacagtactggaacactcatggtgttcttcggcaacgttgatagctctggcatcaaacacaacatctttaatcctcccataatagctcggtacatcagattgcatccgacccactacagcattaggagtacactccgaatggagcttatgggttgcgacttgaattcctgttcaatgccactcggaatggagtctaaagccatctctgatgcacagataaccgccagtagctactttacgaacatgtttgctacgtggtcaccctctaaggcaaggcttcatttgcaaggccggtctaatgcctggagacctcaggtgaacaacccgaaagaatggctccaggtggactttcagaagaccatgaaagtaacaggtgtcactactcagggagttaagtccttgctcaccagcatgtatgtgaaggagttccttatttcctcatcacaagatggccaccagtggaccctcttctttcagaatggtaaggtcaaagtgtttcagggcaatcaagacagcttcacacccgtggtgaacagtcttgatcctccactcttgacacgataccttcgaatccatccacagtcttgggttcaccagattgcattgcgcatggaagtacttggatgcgaggctcaggacctctac

SEQ ID NO: 2380 - protein, 1457 aa, synthetic construct
  REGION 1..1457: note = Variant of human B-domain deleted Factor VIII
MQIELSTCFFLCLLRFCFSATRRYYLGAVELSWDYMQSDLGELPVDARFPPRVPKSFPFNTSVVYKKTLFVEFTDHLFNIAKPRPPWMGLLGPTIQAEVYDTVVITLKNMASHPVSLHAVGVSYWKASEGAEYDDQTSQREKEDDKVFPGGSHTYVWQVLKENGPMASDPLCLTYSYLSHVDLVKDLNSGLIGALLVCREGSLAKEKTQTLHKFILLFAVFDEGKSWHSETKNSLMQDRDAASARAWPKMHTVNGYVNRSLPGLIGCHRKSVYWHVIGMGTTPEVHSIFLEGHTFLVRNHRQASLEISPITFLTAQTLLMDLGQFLLFCHISSHQHDGMEAYVKVDSCPEEPQLRMKNNEEAEDYDDDLTDSEMDVVRFDDDNSPSFIQIRSVAKKHPKTWVHYIAAEEEDWDYAPLVLAPDDRSYKSQYLNNGPQRIGRKYKKVRFMAYTDETFKTREAIQHESGILGPLLYGEVGDTLLIIFKNQASRPYNIYPHGITDVRPLYSRRLPKGVKHLKDFPILPGEIFKYKWTVTVEDGPTKSDPRCLTRYYSSFVNMERDLASGLIGPLLICYKESVDQRGNQIMSDKRNVILFSVFDENRSWYLTENIQRFLPNPAGVQLEDPEFQASNIMHSINGYVFDSLQLSVCLHEVAYWYILSIGAQTDFLSVFFSGYTFKHKMVYEDTLTLFPFSGETVFMSMENPGLWILGCHNSDFRNRGMTALLKVSSCDKNTGDYYEDSYEDISAYLLSQNNAIEPRSFSQNPPVLKRHQREITRTTLQSDQEEIDYDDTISVEMKKEDFDIYDEDENQSPRSFQKKTRHYFIAAVERLWDYGMSSSPHVLRNRAQSGSVPQFKKVVFQEFTDGSFTQPLYRGELNEHLGLLGPYIRAEVEDNIMVTFRNQASRPYSFYSSLISYEEDQRQGAEPRKNFVKPNETKTYFWKVQHHMAPTKDEFDCKAWAYFSDVDLEKDVHSGLIGPLLVCHTNTLNPAHGRQVTVQEFALFFTIFDETKSWYFTENMERNCRAPCNIQMEDPTFKENYRFHAINGYIMDTLPGLVMAQDQRIRWYLLSMGSNENIHSIHFSGHVFTVRKKEEYKMALYNLYPGVFETVEMLPSKAGIWRVECLIGEHLHAGMSTLFLVYSNKCQTPLGMASGHIRDFQITASGQYGQWAPKLARLHYSGSINAWSTKEPFSWIKVDLLAPMIIHGIKTQGARQKFSSLYISQFIIMYSLDGKKWQTYRGNSTGTLMVFFGNVDSSGIKHNIFNPPIIARYIRLHPTHYSIRSTLRMELMGCDLNSCSMPLGMESKAISDAQITASSYFTNMFATWSPSKARLHLQGRSNAWRPQVNNPKEWLQVDFQKTMKVTGVTTQGVKSLLTSMYVKEFLISSSQDGHQWTLFFQNGKVKVFQGNQDSFTPVVNSLDPPLLTRYLRIHPQSWVHQIALRMEVLGCEAQDLY

SEQ ID NO: 2381 - DNA, 4371 bp, synthetic construct
  misc_feature 1..4371: note = Variant of human B-domain deleted Factor VIII
  source 1..4371: mol_type = other DNA
atgcagattgaactgtctacctgcttcttcctctgtttgctgaggttctgctttagcgccactagacggtactaccttggcgctgtggagctgtcctgggactatatgcagagtgatttgggagagcttcccgtcgacgcacgatttcctcctcgcgttccaaagtcatttcccttcaacacaagcgtggtgtacaagaagacgctcttcgtcgaattcaccgatcacctgttcaatatcgccaaacccagaccaccatggatgggtcttttggggcctaccatacaagcggaggtgtatgacacagttgttatcactctcaagaacatggcttctcatccggtaagtcttcacgcagtgggcgtgtcctactggaaagcttcagaaggagccgagtatgatgatcagacatcccagagggagaaagaagacgacaaggtatttccaggtgggtctcatacctatgtgtggcaagtgctcaaagagaatggccctatggcaagcgatccgctctgtttgacttacagctacctttcacacgttgacctcgtcaaggacctcaactccgggttgattggagccttgttggtatgcagggaaggatctcttgccaaagagaagacacagaccctccacaagtttatccttctctttgctgtgttcgatgagggcaaaagttggcatagcgaaacgaagaattccctcatgcaggatcgcgacgcagccagcgccagagcttggcccaagatgcacactgtgaacggatatgtcaataggtcacttcctggcttgattgggtgtcatcggaaaagtgtctactggcacgtgatcggaatggggacaacaccagaggtccactccatatttctcgaaggccataccttccttgttcgaaaccacagacaggcatccttggagatctctcccattacctttctcactgcccaaacgctccttatggacttgggtcagttccttctcttctgccatatcagctcacaccagcatgatggtatggaagcttatgtgaaagtcgacagttgtcctgaggagccacagttgcgcatgaagaataatgaagaagccgaggattacgacgacgatctcaccgattctgagatggacgtggtgaggtttgatgacgacaactctccctccttcattcaagagcggagcgtggcgaagaaacaccccaagacttgggtccactatatagcggcggaagaggaggattgggattacgctcctcttgtattggcaccagatgaccgctcatacaaaagccagtacctcaacaacggaccgcagagaattggccggaagtataagaaagtgcgatttatggcctatacagacgaaacctttaagacaagggaggccatccagcatgagagtgggattttgggacctcttctttacggcgaagttggtgataccctcctcatcatcttcaagaatcaagcttctcgcccctataacatttacccacacgggatcactgacgttaggcctttgtatagcagaagacttcccaaaggcgtgaagcatctcaaagacttccccattttgccaggcgagatctttaagtacaaatggaccgtcacagtggaagatggaccgactaaatcagaccctcgatgccttacgcggtactattcctccttcgtgaatatggagagagatttggcaagcggactcataggaccactcctcatctgttacaaggaatctgtagaccagaggggtaaccagattatgagtgataaacgcaatgtgatcctttttagcgtcttcgacgagaaccggtcctggtacttgaccgagaatatacaaaggttccttcccaaccccgcaggcgttcagttggaagaccctgagtttcaggccagcaatattatgcactcaatcaacggctatgtgtttgatagtctccagctttctgtttgcctccatgaagtagcctattggtacatcttgtcaattggtgctcaaacagacttcctctccgtcttcttctccggctacacctttaagcacaagatggtgtatgaggacactctcacactctttccattttctggagaaaccgtgttcatgagcatggagaatccaggcctttggatcttgggttgccacaacagtgattttcgcaatcggggaatgactgctctcctcaaagtcagcagctgtgataagaacacaggcgactattacgaagattcttacgaggacataagtgcctacttgttgtccaagaataacgccattgagcccagatcattctcccagaatcctcccgtgcttaaaaggcatcagcgcgaaatcaccagaactactcttcagtctgatcaagaggagattgactatgacgacaccataagcgtggaaatgaagaaggaggatttcgatatctatgacgaagatgagaaccagtctccgcggagctttcagaagaagacgcgacactacttcattgcagcagtcgaaaggctttgggactacggtatgtcatcatcccctcatgtgttgcgcaatagagctcagagtggaagtgttccacagttcaagaaagtcgtctttcaagagtttacagatggcagcttcacacagcctctctatcggggcgagcttaacgaacatttgggactccttggtccctatatccgagccgaagtggaggacaacattatggttacctttaggaatcaagcctctcgcccctacagcttctactcctccctcatcagttatgaggaggatcagagacaaggcgctgaaccacggaagaactttgtgaaaccgaatgagacgaagacctacttctggaaagtacagcaccacatggcccccacaaaagacgaattcgattgcaaagcatgggcgtatttttcagacgttgacttggagaaagatgtacattcaggacttattggtcctttgttggtgtgtcacactaacactctcaatccagcccatggcaggcaggtgacagtccaggaattcgctcttttctttaccatctttgatgagaccaagtcctggtacttcacggaaaacatggagcgcaattgcagagccccctgtaacatacagatggaggaccctacctttaaggaaaattatcggttccacgcaatcaacggatacattatggatacactccctggccttgtgatggctcaggaccaacgaatcaggtggtacctcctcagcatgggttctaatgagaacatacactccattcacttttcaggacatgtgttcactgtccggaagaaagaagagtataagatggccctctacaatttgtatccaggcgtgtttgagaccgttgaaatgcttccctctaaagctggcatctggagagtagagtgcttgatcggagaacatcttcacgcaggtatgagcaccttgttcctcgtgtacagcaacaaatgtcagaccccacttggcatggccagtggacacattcgcgactttcagatcacagcatctggccagtatggacaatgggccccaaagttggctcgcctccattactccggtagcataaatgcgtggtccactaaagaacctttcagctggattaaggtcgatcttcttgcccccatgatcatccacggcattaagacacagggagcgaggcagaaattctcctccctctacatctcacagttcattattatgtatagtttggacggcaagaagtggcaaacttatagaggtaacagtactggaacactcatggtgttcttcggcaacgttgatagctctggcatcaaacacaacatctttaatcctcccataatagctcggtacatcagattgcatccgacccactacagcattaggagtacactccgaatggagcttatgggttgcgacttgaattcctgttcaatgccactcggaatggagtctaaagccatctctgatgcacagataaccgccagtagctactttacgaacatgtttgctacgtggtcaccctctaaggcaaggcttcatttgcaaggccggtctaatgcctggagacctcaggtgaacaacccgaaagaatggctccaggtggactttcagaagaccatgaaagtaacaggtgtcactactcagggagttaagtccttgctcaccagcatgtatgtgaaggagttccttatttcctcatcacaagatggccaccagtggaccctcttctttcagaatggtaaggtcaaagtgtttcagggcaatcaagacagcttcacacccgtggtgaacagtcttgatcctccactcttgacacgataccttcgaatccatccacagtcttgggttcaccagattgcattgcgcatggaagtacttggatgcgaggctcaggacctctac

SEQ ID NO: 2382 - protein, 1457 aa, synthetic construct
  REGION 1..1457: note = Variant of human B-domain deleted Factor VIII
MQIELSTCFFLCLLRFCFSATRRYYLGAVELSWDYMQSDLGELPVDARFPPRVPKSFPFNTSVVYKKTLFVEFTDHLFNIAKPRPPWMGLLGPTIQAEVYDTVVITLKNMASHPVSLHAVGVSYWKASEGAEYDDQTSQREKEDDKVFPGGSHTYVWQVLKENGPMASDPLCLTYSYLSHVDLVKDLNSGLIGALLVCREGSLAKEKTQTLHKFILLFAVFDEGKSWHSETKNSLMQDRDAASARAWPKMHTVNGYVNRSLPGLIGCHRKSVYWHVIGMGTTPEVHSIFLEGHTFLVRNHRQASLEISPITFLTAQTLLMDLGQFLLFCHISSHQHDGMEAYVKVDSCPEEPQLRMKNNEEAEDYDDDLTDSEMDVVRFDDDNSPSFIQERSVAKKHPKTWVHYIAAEEEDWDYAPLVLAPDDRSYKSQYLNNGPQRIGRKYKKVRFMAYTDETFKTREAIQHESGILGPLLYGEVGDTLLIIFKNQASRPYNIYPHGITDVRPLYSRRLPKGVKHLKDFPILPGEIFKYKWTVTVEDGPTKSDPRCLTRYYSSFVNMERDLASGLIGPLLICYKESVDQRGNQIMSDKRNVILFSVFDENRSWYLTENIQRFLPNPAGVQLEDPEFQASNIMHSINGYVFDSLQLSVCLHEVAYWYILSIGAQTDFLSVFFSGYTFKHKMVYEDTLTLFPFSGETVFMSMENPGLWILGCHNSDFRNRGMTALLKVSSCDKNTGDYYEDSYEDISAYLLSKNNAIEPRSFSQNPPVLKRHQREITRTTLQSDQEEIDYDDTISVEMKKEDFDIYDEDENQSPRSFQKKTRHYFIAAVERLWDYGMSSSPHVLRNRAQSGSVPQFKKVVFQEFTDGSFTQPLYRGELNEHLGLLGPYIRAEVEDNIMVTFRNQASRPYSFYSSLISYEEDQRQGAEPRKNFVKPNETKTYFWKVQHHMAPTKDEFDCKAWAYFSDVDLEKDVHSGLIGPLLVCHTNTLNPAHGRQVTVQEFALFFTIFDETKSWYFTENMERNCRAPCNIQMEDPTFKENYRFHAINGYIMDTLPGLVMAQDQRIRWYLLSMGSNENIHSIHFSGHVFTVRKKEEYKMALYNLYPGVFETVEMLPSKAGIWRVECLIGEHLHAGMSTLFLVYSNKCQTPLGMASGHIRDFQITASGQYGQWAPKLARLHYSGSINAWSTKEPFSWIKVDLLAPMIIHGIKTQGARQKFSSLYISQFIIMYSLDGKKWQTYRGNSTGTLMVFFGNVDSSGIKHNIFNPPIIARYIRLHPTHYSIRSTLRMELMGCDLNSCSMPLGMESKAISDAQITASSYFTNMFATWSPSKARLHLQGRSNAWRPQVNNPKEWLQVDFQKTMKVTGVTTQGVKSLLTSMYVKEFLISSSQDGHQWTLFFQNGKVKVFQGNQDSFTPVVNSLDPPLLTRYLRIHPQSWVHQIALRMEVLGCEAQDLY

SEQ ID NO: 2383 - DNA, 4371 bp, synthetic construct
  misc_feature 1..4371: note = Variant of human B-domain deleted Factor VIII
  source 1..4371: mol_type = other DNA
atgcagattgaactgtctacctgcttcttcctctgtttgctgaggttctgctttagcgccactagacggtactaccttggcgctgtggagctgtcctgggactatatgcagagtgatttgggagagcttcccgtcgacgcacgatttcctcctcgcgttccaaagtcatttcccttcaacacaagcgtggtgtacaagaagacgctcttcgtcgaattcaccgatcacctgttcaatatcgccaaacccagaccaccatggatgggtcttttggggcctaccatacaagcggaggtgtatgacacagttgttatcactctcaagaacatggcttctcatccggtaagtcttcacgcagtgggcgtgtcctactggaaagcttcagaaggagccgagtatgatgatcagacatcccagagggagaaagaagacgacaaggtatttccaggtgggtctcatacctatgtgtggcaagtgctcaaagagaatggccctatggcaagcgatccgctctgtttgacttacagctacctttcacacgttgacctcgtcaaggacctcaactccgggttgattggagccttgttggtatgcagggaaggatctcttgccaaagagaagacacagaccctccacaagtttatccttctctttgctgtgttcgatgagggcaaaagttggcatagcgaaacgaagaattccctcatgcaggatcgcgacgcagccagcgccagagcttggcccaagatgcacactgtgaacggatatgtcaataggtcacttcctggcttgattgggtgtcatcggaaaagtgtctactggcacgtgatcggaatggggacaacaccagaggtccactccatatttctcgaaggccataccttccttgttcgaaaccacagacaggcatccttggagatctctcccattacctttctcactgcccaaacgctccttatggacttgggtcagttccttctcttctgccatatcagctcacaccagcatgatggtatggaagcttatgtgaaagtcgacagttgtcctgaggagccacagttgcgcatgaagaataatgaagaagccgaggattacgacgacgatctcaccgattctgagatggacgtggtgaggtttgatgacgacaactctccctccttcattcaaatccggagcgtggcgaagaaacaccccaagacttgggtccactatatagcggcggaagaggaggattgggattacgctcctcttgtattggcaccagatgaccgctcatacaaaagccagtacctcaacaacggaccgcagagaattggccggaagtataagaaagtgcgatttatggcctatacagacgaaacctttaagacaagggaggccatccagcatgagagtgggattttgggacctcttctttacggcgaagttggtgataccctcctcatcatcttcaagaatcaagcttctcgcccctataacatttacccacacgggatcactgacgttaggcctttgtatagcagaagacttcccaaaggcgtgaagcatctcaaagacttccccattttgccaggcgagatctttaagtacaaatggaccatgacagtggaagatggaccgactaaatcagaccctcgatgccttacgcggtactattcctccttcgtgaatatggagagagatttggcaagcggactcataggaccactcctcatctgttacaaggaatctgtagaccagaggggtaaccagattatgagtgataaacgcaatgtgatcctttttagcgtcttcgacgagaaccggtcctggtacttgaccgagaatatacaaaggttccttcccaaccccgcaggcgttcagttggaagaccctgagtttcaggccagcaatattatgcactcaatcaacggctatgtgtttgatagtctccagctttctgtttgcctccatgaagtagcctattggtacatcttgtcaattggtgctcaaacagacttcctctccgtcttcttctccggctacacctttaagcacaagatggtgtatgaggacactctcacactctttccattttctggagaaaccgtgttcatgagcatggagaatccaggcctttggatcttgggttgccacaacagtgattttcgcaatcggggaatgactgctctcctcaaagtcagcagctgtgataagaacacaggcgactattacgaagattcttacgaggacataagtgcctacttgttgtccaagaataacgccattgagcccagatcattctcccagaatcctcccgtgcttaaaaggcatcagcgcgaaatcaccagaactactcttcagtctgatcaagaggagattgactatgacgacaccataagcgtggaaatgaagaaggaggatttcgatatctatgacgaagatgagaaccagtctccgcggagctttcagaagaagacgcgacactacttcattgcagcagtcgaaaggctttgggactacggtatgtcatcatcccctcatgtgttgcgcaatagagctcagagtggaagtgttccacagttcaagaaagtcgtctttcaagagtttacagatggcagcttcacacagcctctctatcggggcgagcttaacgaacatttgggactccttggtccctatatccgagccgaagtggaggacaacattatggttacctttaggaatcaagcctctcgcccctacagcttctactcctccctcatcagttatgaggaggatcagagacaaggcgctgaaccacggaagaactttgtgaaaccgaatgagacgaagacctacttctggaaagtacagcaccacatggcccccacaaaagacgaattcgattgcaaagcatgggcgtatttttcagacgttgacttggagaaagatgtacattcaggacttattggtcctttgttggtgtgtcacactaacactctcaatccagcccatggcaggcaggtgacagtccaggaattcgctcttttctttaccatctttgatgagaccaagtcctggtacttcacggaaaacatggagcgcaattgcagagccccctgtaacatacagatggaggaccctacctttaaggaaaattatcggttccacgcaatcaacggatacattatggatacactccctggccttgtgatggctcaggaccaacgaatcaggtggtacctcctcagcatgggttctaatgagaacatacactccattcacttttcaggacatgtgttcactgtccggaagaaagaagagtataagatggccctctacaatttgtatccaggcgtgtttgagaccgttgaaatgcttccctctaaagctggcatctggagagtagagtgcttgatcggagaacatcttcacgcaggtatgagcaccttgttcctcgtgtacagcaacaaatgtcagaccccacttggcatggccagtggacacattcgcgactttcagatcacagcatctggccagtatggacaatgggccccaaagttggctcgcctccattactccggtagcataaatgcgtggtccactaaagaacctttcagctggattaaggtcgatcttcttgcccccatgatcatccacggcattaagacacagggagcgaggcagaaattctcctccctctacatctcacagttcattattatgtatagtttggacggcaagaagtggcaaacttatagaggtaacagtactggaacactcatggtgttcttcggcaacgttgatagctctggcatcaaacacaacatctttaatcctcccataatagctcggtacatcagattgcatccgacccactacagcattaggagtacactccgaatggagcttatgggttgcgacttgaattcctgttcaatgccactcggaatggagtctaaagccatctctgatgcacagataaccgccagtagctactttacgaacatgtttgctacgtggtcaccctctaaggcaaggcttcatttgcaaggccggtctaatgcctggagacctcaggtgaacaacccgaaagaatggctccaggtggactttcagaagaccatgaaagtaacaggtgtcactactcagggagttaagtccttgctcaccagcatgtatgtgaaggagttccttatttcctcatcacaagatggccaccagtggaccctcttctttcagaatggtaaggtcaaagtgtttcagggcaatcaagacagcttcacacccgtggtgaacagtcttgatcctccactcttgacacgataccttcgaatccatccacagtcttgggttcaccagattgcattgcgcatggaagtacttggatgcgaggctcaggacctctac

SEQ ID NO: 2384 - protein, 1457 aa, synthetic construct
  REGION 1..1457: note = Variant of human B-domain deleted Factor VIII
MQIELSTCFFLCLLRFCFSATRRYYLGAVELSWDYMQSDLGELPVDARFPPRVPKSFPFNTSVVYKKTLFVEFTDHLFNIAKPRPPWMGLLGPTIQAEVYDTVVITLKNMASHPVSLHAVGVSYWKASEGAEYDDQTSQREKEDDKVFPGGSHTYVWQVLKENGPMASDPLCLTYSYLSHVDLVKDLNSGLIGALLVCREGSLAKEKTQTLHKFILLFAVFDEGKSWHSETKNSLMQDRDAASARAWPKMHTVNGYVNRSLPGLIGCHRKSVYWHVIGMGTTPEVHSIFLEGHTFLVRNHRQASLEISPITFLTAQTLLMDLGQFLLFCHISSHQHDGMEAYVKVDSCPEEPQLRMKNNEEAEDYDDDLTDSEMDVVRFDDDNSPSFIQIRSVAKKHPKTWVHYIAAEEEDWDYAPLVLAPDDRSYKSQYLNNGPQRIGRKYKKVRFMAYTDETFKTREAIQHESGILGPLLYGEVGDTLLIIFKNQASRPYNIYPHGITDVRPLYSRRLPKGVKHLKDFPILPGEIFKYKWTMTVEDGPTKSDPRCLTRYYSSFVNMERDLASGLIGPLLICYKESVDQRGNQIMSDKRNVILFSVFDENRSWYLTENIQRFLPNPAGVQLEDPEFQASNIMHSINGYVFDSLQLSVCLHEVAYWYILSIGAQTDFLSVFFSGYTFKHKMVYEDTLTLFPFSGETVFMSMENPGLWILGCHNSDFRNRGMTALLKVSSCDKNTGDYYEDSYEDISAYLLSKNNAIEPRSFSQNPPVLKRHQREITRTTLQSDQEEIDYDDTISVEMKKEDFDIYDEDENQSPRSFQKKTRHYFIAAVERLWDYGMSSSPHVLRNRAQSGSVPQFKKVVFQEFTDGSFTQPLYRGELNEHLGLLGPYIRAEVEDNIMVTFRNQASRPYSFYSSLISYEEDQRQGAEPRKNFVKPNETKTYFWKVQHHMAPTKDEFDCKAWAYFSDVDLEKDVHSGLIGPLLVCHTNTLNPAHGRQVTVQEFALFFTIFDETKSWYFTENMERNCRAPCNIQMEDPTFKENYRFHAINGYIMDTLPGLVMAQDQRIRWYLLSMGSNENIHSIHFSGHVFTVRKKEEYKMALYNLYPGVFETVEMLPSKAGIWRVECLIGEHLHAGMSTLFLVYSNKCQTPLGMASGHIRDFQITASGQYGQWAPKLARLHYSGSINAWSTKEPFSWIKVDLLAPMIIHGIKTQGARQKFSSLYISQFIIMYSLDGKKWQTYRGNSTGTLMVFFGNVDSSGIKHNIFNPPIIARYIRLHPTHYSIRSTLRMELMGCDLNSCSMPLGMESKAISDAQITASSYFTNMFATWSPSKARLHLQGRSNAWRPQVNNPKEWLQVDFQKTMKVTGVTTQGVKSLLTSMYVKEFLISSSQDGHQWTLFFQNGKVKVFQGNQDSFTPVVNSLDPPLLTRYLRIHPQSWVHQIALRMEVLGCEAQDLY

SEQ ID NO: 2385 - DNA, 4371 bp, synthetic construct
  misc_feature 1..4371: note = Variant of human B-domain deleted Factor VIII
  source 1..4371: mol_type = other DNA
atgcagattgaactgtctacctgcttcttcctctgtttgctgaggttctgctttagcgccactagacggtactaccttggcgctgtggagctgtcctgggactatatgcagagtgatttgggagagcttcccgtcgacgcacgatttcctcctcgcgttccaaagtcatttcccttcaacacaagcgtggtgtacaagaagacgctcttcgtcgaattcaccgatcacctgttcaatatcgccaaacccagaccaccatggatgggtcttttggggcctaccatacaagcggaggtgtatgacacagttgttatcactctcaagaacatggcttctcatccggtaagtcttcacgcagtgggcgtgtcctactggaaagcttcagaaggagccgagtatgatgatcagacatcccagagggagaaagaagacgacaaggtatttccaggtgggtctcatacctatgtgtggcaagtgctcaaagagaatggccctatggcaagcgatccgctctgtttgacttacagctacctttcacacgttgacctcgtcaaggacctcaactccgggttgattggagccttgttggtatgcagggaaggatctcttgccaaagagaagacacagaccctccacaagtttatccttctctttgctgtgttcgatgagggcaaaagttggcatagcgaaacgaagaattccctcatgcaggatcgcgacgcagccagcgccagagcttggcccaagatgcacactgtgaacggatatgtcaataggtcacttcctggcttgattgggtgtcatcggaaaagtgtctactggcacgtgatcggaatggggacaacaccagaggtccactccatatttctcgaaggccataccttccttgttcgaaaccacagacaggcatccttggagatctctcccattacctttctcactgcccaaacgctccttatggacttgggtcagttccttctcttctgccatatcagctcacaccagcatgatggtatggaagcttatgtgaaagtcgacagttgtcctgaggagccacagttgcgcatgaagaataatgaagaagccgaggattacgacgacgatctcaccgattctgagatggacgtggtgaggtttgatgacgacaactctccctccttcattcaaatccggagcgtggcgaagaaacaccccaagacttgggtccactatatagcggcggaagaggaggattgggattacgctcctcttgtattggcaccagatgaccgctcatacaaaagccagtacctcaacaacggaccgcagagaattggccggaagtataagaaagtgcgatttatggcctatacagacgaaacctttaagacaagggaggccatccagcatgagagtgggattttgggacctcttctttacggcgaagttggtgataccctcctcatcatcttcaagaatcaagcttctcgcccctataacatttacccacacgggatcactgacgttaggcctttgtatagcagaagacttcccaaaggcgtgaagcatctcaaagacttccccattttgccaggcgagatctttaagtacaaatggaccgtcacagtggaagatggaccgactaaatcagaccctcgatgccttacgcggtactattcctccttcgtgaatatggagagagatttggcaagcggactcataggaccactcctcatctgttacaaggaatctgtagaccagaggggtaaccagattatgagtgataaacgcaatgtgatcctttttagcgtcttcgacgagaaccggtcctggtacttgaccgagaatatacaaaggttccttcccaaccccgcaggcgttcagttggaagaccctgagtttcaggccagcaatattatgcactcaatcaacggctatgtgtttgatagtctccagctttctgtttgcctccatgaagtagcctattggtacatcttgtcaattggtgctcaaacagacttcctctccgtcttcttctccggctacacctttaagcacaagatggtgtatgaggacactctcacactctttccattttctggagaaaccgtgttcatgagcatggagaatccaggcctttggatcttgggttgccacaacagtgattttcgcaatcggggaatgactgctctcctcaaagtcagcagctgtgataagaacacaggcgactattacgaagattcttacgaggacataagtgcctacccgttgtccaagaataacgccattgagcccagatcattctcccagaatcctcccgtgcttaaaaggcatcagcgcgaaatcaccagaactactcttcagtctgatcaagaggagattgactatgacgacaccataagcgtggaaatgaagaaggaggatttcgatatctatgacgaagatgagaaccagtctccgcggagctttcagaagaagacgcgacactacttcattgcagcagtcgaaaggctttgggactacggtatgtcatcatcccctcatgtgttgcgcaatagagctcagagtggaagtgttccacagttcaagaaagtcgtctttcaagagtttacagatggcagcttcacacagcctctctatcggggcgagcttaacgaacatttgggactccttggtccctatatccgagccgaagtggaggacaacattatggttacctttaggaatcaagcctctcgcccctacagcttctactcctccctcatcagttatgaggaggatcagagacaaggcgctgaaccacggaagaactttgtgaaaccgaatgagacgaagacctacttctggaaagtacagcaccacatggcccccacaaaagacgaattcgattgcaaagcatgggcgtatttttcagacgttgacttggagaaagatgtacattcaggacttattggtcctttgttggtgtgtcacactaacactctcaatccagcccatggcaggcaggtgacagtccaggaattcgctcttttctttaccatctttgatgagaccaagtcctggtacttcacggaaaacatggagcgcaattgcagagccccctgtaacatacagatggaggaccctacctttaaggaaaattatcggttccacgcaatcaacggatacattatggatacactccctggccttgtgatggctcaggaccaacgaatcaggtggtacctcctcagcatgggttctaatgagaacatacactccattcacttttcaggacatgtgttcactgtccggaagaaagaagagtataagatggccctctacaatttgtatccaggcgtgtttgagaccgttgaaatgcttccctctaaagctggcatctggagagtagagtgcttgatcggagaacatcttcacgcaggtatgagcaccttgttcctcgtgtacagcaacaaatgtcagaccccacttggcatggccagtggacacattcgcgactttcagatcacagcatctggccagtatggacaatgggccccaaagttggctcgcctccattactccggtagcataaatgcgtggtccactaaagaacctttcagctggattaaggtcgatcttcttgcccccatgatcatccacggcattaagacacagggagcgaggcagaaattctcctccctctacatctcacagttcattattatgtatagtttggacggcaagaagtggcaaacttatagaggtaacagtactggaacactcatggtgttcttcggcaacgttgatagctctggcatcaaacacaacatctttaatcctcccataatagctcggtacatcagattgcatccgacccactacagcattaggagtacactccgaatggagcttatgggttgcgacttgaattcctgttcaatgccactcggaatggagtctaaagccatctctgatgcacagataaccgccagtagctactttacgaacatgtttgctacgtggtcaccctctaaggcaaggcttcatttgcaaggccggtctaatgcctggagacctcaggtgaacaacccgaaagaatggctccaggtggactttcagaagaccatgaaagtaacaggtgtcactactcagggagttaagtccttgctcaccagcatgtatgtgaaggagttccttatttcctcatcacaagatggccaccagtggaccctcttctttcagaatggtaaggtcaaagtgtttcagggcaatcaagacagcttcacacccgtggtgaacagtcttgatcctccactcttgacacgataccttcgaatccatccacagtcttgggttcaccagattgcattgcgcatggaagtacttggatgcgaggctcaggacctctac

SEQ ID NO: 2386 - protein, 1457 aa, synthetic construct
  REGION 1..1457: note = Variant of human B-domain deleted Factor VIII
MQIELSTCFFLCLLRFCFSATRRYYLGAVELSWDYMQSDLGELPVDARFPPRVPKSFPFNTSVVYKKTLFVEFTDHLFNIAKPRPPWMGLLGPTIQAEVYDTVVITLKNMASHPVSLHAVGVSYWKASEGAEYDDQTSQREKEDDKVFPGGSHTYVWQVLKENGPMASDPLCLTYSYLSHVDLVKDLNSGLIGALLVCREGSLAKEKTQTLHKFILLFAVFDEGKSWHSETKNSLMQDRDAASARAWPKMHTVNGYVNRSLPGLIGCHRKSVYWHVIGMGTTPEVHSIFLEGHTFLVRNHRQASLEISPITFLTAQTLLMDLGQFLLFCHISSHQHDGMEAYVKVDSCPEEPQLRMKNNEEAEDYDDDLTDSEMDVVRFDDDNSPSFIQIRSVAKKHPKTWVHYIAAEEEDWDYAPLVLAPDDRSYKSQYLNNGPQRIGRKYKKVRFMAYTDETFKTREAIQHESGILGPLLYGEVGDTLLIIFKNQASRPYNIYPHGITDVRPLYSRRLPKGVKHLKDFPILPGEIFKYKWTVTVEDGPTKSDPRCLTRYYSSFVNMERDLASGLIGPLLICYKESVDQRGNQIMSDKRNVILFSVFDENRSWYLTENIQRFLPNPAGVQLEDPEFQASNIMHSINGYVFDSLQLSVCLHEVAYWYILSIGAQTDFLSVFFSGYTFKHKMVYEDTLTLFPFSGETVFMSMENPGLWILGCHNSDFRNRGMTALLKVSSCDKNTGDYYEDSYEDISAYPLSKNNAIEPRSFSQNPPVLKRHQREITRTTLQSDQEEIDYDDTISVEMKKEDFDIYDEDENQSPRSFQKKTRHYFIAAVERLWDYGMSSSPHVLRNRAQSGSVPQFKKVVFQEFTDGSFTQPLYRGELNEHLGLLGPYIRAEVEDNIMVTFRNQASRPYSFYSSLISYEEDQRQGAEPRKNFVKPNETKTYFWKVQHHMAPTKDEFDCKAWAYFSDVDLEKDVHSGLIGPLLVCHTNTLNPAHGRQVTVQEFALFFTIFDETKSWYFTENMERNCRAPCNIQMEDPTFKENYRFHAINGYIMDTLPGLVMAQDQRIRWYLLSMGSNENIHSIHFSGHVFTVRKKEEYKMALYNLYPGVFETVEMLPSKAGIWRVECLIGEHLHAGMSTLFLVYSNKCQTPLGMASGHIRDFQITASGQYGQWAPKLARLHYSGSINAWSTKEPFSWIKVDLLAPMIIHGIKTQGARQKFSSLYISQFIIMYSLDGKKWQTYRGNSTGTLMVFFGNVDSSGIKHNIFNPPIIARYIRLHPTHYSIRSTLRMELMGCDLNSCSMPLGMESKAISDAQITASSYFTNMFATWSPSKARLHLQGRSNAWRPQVNNPKEWLQVDFQKTMKVTGVTTQGVKSLLTSMYVKEFLISSSQDGHQWTLFFQNGKVKVFQGNQDSFTPVVNSLDPPLLTRYLRIHPQSWVHQIALRMEVLGCEAQDLY

SEQ ID NO: 2387 - DNA, 4371 bp, synthetic construct
  misc_feature 1..4371: note = Variant of human B-domain deleted Factor VIII
  source 1..4371: mol_type = other DNA
atgcagattgaactgtctacctgcttcttcctctgtttgctgaggttctgctttagcgccactagacggtactaccttggcgctgtggagctgtcctgggactatatgcagagtgatttgggagagcttcccgtcgacgcacgatttcctcctcgcgttccaaagtcatttcccttcaacacaagcgtggtgtacaagaagacgctcttcgtcgaattcaccgatcacctgttcaatatcgccaaacccagaccaccatggatgggtcttttggggcctaccatacaagcggaggtgtatgacacagttgttatcactctcaagaacatggcttctcatccggtaagtcttcacgcagtgggcgtgtcctactggaaagcttcagaaggagccgagtatgatgatcagacatcccagagggagaaagaagacgacaaggtatttccaggtgggtctcatacctatgtgtggcaagtgctcaaagagaatggccctatggcaagcgatccgctctgtttgacttacagctacctttcacacgttgacctcgtcaaggacctcaactccgggttgattggagccttgttggtatgcagggaaggatctcttgccaaagagaagacacagaccctccacaagtttatccttctctttgctgtgttcgatgagggcaaaagttggcatagcgaaacgaagaattccctcatgcaggatcgcgacgcagccagcgccagagcttggcccaagatgcacactgtgaacggatatgtcaataggtcacttcctggcttgattgggtgtcatcggaaaagtgtctactggcacgtgatcggaatggggacaacaccagaggtccactccatatttctcgaaggccataccttccttgttcgaaaccacagacaggcatccttggagatctctcccattacctttctcactgcccaaacgctccttatggacttgggtcagttccttctcttctgccatatcagctcacaccagcatgatggtatggaagcttatgtgaaagtcgacagttgtcctgaggagccacagttgcgcatgaagaataatgaagaagccgaggattacgacgacgatctcaccgattctgagatggacgtggtgaggtttgatgacgacaactctccctccttcattcaaatccggagcgtggcgaagaaacaccccaagacttgggtccactatatagcggcggaagaggaggattgggattacgctcctcttgtattggcaccagatgaccgctcatacaaaagccagtacctcaacaacggaccgcagagaattggccggaagtataagaaagtgcgatttatggcctatacagacgaaacctttaagacaagggaggccatccagcatgagagtgggattttgggacctcttctttacggcgaagttggtgataccctcctcatcatcttcaagaatcaagcttctcgcccctataacatttacccacacgggatcactgacgttaggcctttgtatagcagaagacttcccaaaggcgtgaagcatctcaaagacttccccattttgccaggcgagatctttaagtacaaatggaccgtcacagtggaagatggaccgactaaatcagaccctcgatgccttacgcggtactattcctccttcgtgaatatggagagagatttggcaagcggactcataggaccactcctcatctgttacaaggaatctgtagaccagaggggtaaccagattatgagtgataaacgcaatgtgatcctttttagcgtcttcgacgagaaccggtcctggtacttgaccgagaatatacaaaggttccttcccaaccccgcaggcgttcagttggaagaccctgagtttcaggccagcaatattatgcactcaatcaacggctatgtgtttgatagtctccagctttctgtttgcctccatgaagtagcctattggtacatcttgtcaattggtgctcaaacagacttcctctccgtcttcttctccggctacacctttaagcacaagatggtgtatgaggacactctcacactctttccattttctggagaaaccgtgttcatgagcatggagaatccaggcctttggatcttgggttgccacaacagtgattttcgcaatcggggaatgactgctctcctcaaagtcagcagctgtgataagaacacaggcgactattacgaagattcttacgaggacataagtgcctacttgttgtccaagaataacgccattgagcccagatcattctcccagaatcctcccgtgcttaaaaggcatcagcgcgaaatcaccagaactactcttcagtctgatcaagaggagattgactatgacgacaccataagcgtggaaatgaagaaggaggatttcgatatctatgacgaagatgagaaccagtctccgcggagctttcagaagaagacgcgacactacttcattgcagcagtcgaaaggctttgggactacggtatgtcatcatcccctcatgtgttgcgcaatagagctcagagtggaagtgttccacagttcaagaaagtcgtctttcaagagtttacagatggcagcttcacacagcctctctatcggggcgagcttaacgaacatttgggactccttggtccctatatccgagccgaagtggaggacaacattatggttacctttaggaatcaagcctctcgcccctacagcttctactcctccctcatcagttatgaggaggatcagagacaaggcgctgaaccacggaagaactttgtgaaaccgaatgagacgaagacctacttctggaaagtacagcaccacatggcccccacaaaagacgaattcgattgcaaagcatgggcgtatttttcagacgttgacttggagaaagatgtacattcaggacttattggtcctttgttggtgtgtcacactaacactctcaatccagcccatggcaggcaggtgacagtccaggaattcgctcttttctttaccatctttgatgagaccaagtcctggtacttcacggaaaacatggagcgcaattgcagagccccctgtaacatacagatggaggaccctacctttaaggaaaattatcggttccacgcaatcaacggatacattatggatacactccctggccttgtgatggctcaggaccaacgaatcaggtggtacctcctcagcatgggttctaatgagaacatacactccattcacttttcaggacatgtgttcactgtccggaagatggaagagtataagatggccctctacaatttgtatccaggcgtgtttgagaccgttgaaatgcttccctctaaagctggcatctggagagtagagtgcttgatcggagaacatcttcacgcaggtatgagcaccttgttcctcgtgtacagcaacaaatgtcagaccccacttggcatggccagtggacacattcgcgactttcagatcacagcatctggccagtatggacaatgggccccaaagttggctcgcctccattactccggtagcataaatgcgtggtccactaaagaacctttcagctggattaaggtcgatcttcttgcccccatgatcatccacggcattaagacacagggagcgaggcagaaattctcctccctctacatctcacagttcattattatgtatagtttggacggcaagaagtggcaaacttatagaggtaacagtactggaacactcatggtgttcttcggcaacgttgatagctctggcatcaaacacaacatctttaatcctcccataatagctcggtacatcagattgcatccgacccactacagcattaggagtacactccgaatggagcttatgggttgcgacttgaattcctgttcaatgccactcggaatggagtctaaagccatctctgatgcacagataaccgccagtagctactttacgaacatgtttgctacgtggtcaccctctaaggcaaggcttcatttgcaaggccggtctaatgcctggagacctcaggtgaacaacccgaaagaatggctccaggtggactttcagaagaccatgaaagtaacaggtgtcactactcagggagttaagtccttgctcaccagcatgtatgtgaaggagttccttatttcctcatcacaagatggccaccagtggaccctcttctttcagaatggtaaggtcaaagtgtttcagggcaatcaagacagcttcacacccgtggtgaacagtcttgatcctccactcttgacacgataccttcgaatccatccacagtcttgggttcaccagattgcattgcgcatggaagtacttggatgcgaggctcaggacctctac

SEQ ID NO: 2388 - protein, 1457 aa, synthetic construct
  REGION 1..1457: note = Variant of human B-domain deleted Factor VIII
MQIELSTCFFLCLLRFCFSATRRYYLGAVELSWDYMQSDLGELPVDARFPPRVPKSFPFNTSVVYKKTLFVEFTDHLFNIAKPRPPWMGLLGPTIQAEVYDTVVITLKNMASHPVSLHAVGVSYWKASEGAEYDDQTSQREKEDDKVFPGGSHTYVWQVLKENGPMASDPLCLTYSYLSHVDLVKDLNSGLIGALLVCREGSLAKEKTQTLHKFILLFAVFDEGKSWHSETKNSLMQDRDAASARAWPKMHTVNGYVNRSLPGLIGCHRKSVYWHVIGMGTTPEVHSIFLEGHTFLVRNHRQASLEISPITFLTAQTLLMDLGQFLLFCHISSHQHDGMEAYVKVDSCPEEPQLRMKNNEEAEDYDDDLTDSEMDVVRFDDDNSPSFIQIRSVAKKHPKTWVHYIAAEEEDWDYAPLVLAPDDRSYKSQYLNNGPQRIGRKYKKVRFMAYTDETFKTREAIQHESGILGPLLYGEVGDTLLIIFKNQASRPYNIYPHGITDVRPLYSRRLPKGVKHLKDFPILPGEIFKYKWTVTVEDGPTKSDPRCLTRYYSSFVNMERDLASGLIGPLLICYKESVDQRGNQIMSDKRNVILFSVFDENRSWYLTENIQRFLPNPAGVQLEDPEFQASNIMHSINGYVFDSLQLSVCLHEVAYWYILSIGAQTDFLSVFFSGYTFKHKMVYEDTLTLFPFSGETVFMSMENPGLWILGCHNSDFRNRGMTALLKVSSCDKNTGDYYEDSYEDISAYLLSKNNAIEPRSFSQNPPVLKRHQREITRTTLQSDQEEIDYDDTISVEMKKEDFDIYDEDENQSPRSFQKKTRHYFIAAVERLWDYGMSSSPHVLRNRAQSGSVPQFKKVVFQEFTDGSFTQPLYRGELNEHLGLLGPYIRAEVEDNIMVTFRNQASRPYSFYSSLISYEEDQRQGAEPRKNFVKPNETKTYFWKVQHHMAPTKDEFDCKAWAYFSDVDLEKDVHSGLIGPLLVCHTNTLNPAHGRQVTVQEFALFFTIFDETKSWYFTENMERNCRAPCNIQMEDPTFKENYRFHAINGYIMDTLPGLVMAQDQRIRWYLLSMGSNENIHSIHFSGHVFTVRKMEEYKMALYNLYPGVFETVEMLPSKAGIWRVECLIGEHLHAGMSTLFLVYSNKCQTPLGMASGHIRDFQITASGQYGQWAPKLARLHYSGSINAWSTKEPFSWIKVDLLAPMIIHGIKTQGARQKFSSLYISQFIIMYSLDGKKWQTYRGNSTGTLMVFFGNVDSSGIKHNIFNPPIIARYIRLHPTHYSIRSTLRMELMGCDLNSCSMPLGMESKAISDAQITASSYFTNMFATWSPSKARLHLQGRSNAWRPQVNNPKEWLQVDFQKTMKVTGVTTQGVKSLLTSMYVKEFLISSSQDGHQWTLFFQNGKVKVFQGNQDSFTPVVNSLDPPLLTRYLRIHPQSWVHQIALRMEVLGCEAQDLY

SEQ ID NO: 2389 - DNA, 4371 bp, synthetic construct
  misc_feature 1..4371: note = Variant of human B-domain deleted Factor VIII
  source 1..4371: mol_type = other DNA
atgcagattgaactgtctacctgcttcttcctctgtttgctgaggttctgctttagcgccactagacggtactaccttggcgctgtggagctgtcctgggactatatgcagagtgatttgggagagcttcccgtcgacgcacgatttcctcctcgcgttccaaagtcatttcccttcaacacaagcgtggtgtacaagaagacgctcttcgtcgaattcaccgatcacctgttcaatatcgccaaacccagaccaccatggatgggtcttttggggcctaccatacaagcggaggtgtatgacacagttgttatcactctcaagaacatggcttctcatccggtaagtcttcacgcagtgggcgtgtcctactggaaagcttcagaaggagccgagtatgatgatcagacatcccagagggagaaagaagacgacaaggtatttccaggtgggtctcatacctatgtgtggcaagtgctcaaagagaatggccctatggcaagcgatccgctctgtttgacttacagctacctttcacacgttgacctcgtcaaggacctcaactccgggttgattggagccttgttggtatgcagggaaggatctcttgccaaagagaagacacagaccctccacaagtttatccttctctttgctgtgttcgatgagggcaaaagttggcatagcgaaacgaagaattccctcatgcaggatcgcgacgcagccagcgccagagcttggcccaagatgcacactgtgaacggatatgtcaataggtcacttcctggcttgattgggtgtcatcggaaaagtgtctactggcacgtgatcggaatggggacaacaccagaggtccactccatatttctcgaaggccataccttccttgttcgaaaccacagacaggcatccttggagatctctcccattacctttctcactgcccaaacgctccttatggacttgggtcagttccttctcttctgccatatcagctcacaccagcatgatggtatggaagcttatgtgaaagtcgacagttgtcctgaggagccacagttgcgcatgaagaataatgaagaagccgaggattacgacgacgatctcaccgattctgagatggacgtggtgaggtttgatgacgacaactctccctccttcattcaaatccggagcgtggcgaagaaacaccccaagacttgggtccactatatagcggcggaagaggaggattgggattacgctcctcttgtattggcaccagatgaccgctcatacaaaagccagtacctcaacaacggaccgcagagaattggccggaagtataagaaagtgcgatttatggcctatacagacgaaacctttaagacaagggaggccatccagcatgagagtgggattttgggacctcttctttacggcgaagttggtgataccctcctcatcatcttcaagaatcaagcttctcgcccctataacatttacccacacgggatcactgacgttaggcctttgtatagcagaagacttcccaaaggcgtgaagcatctcaaagacttccccattttgccaggcgagatctttaagtacaaatggaccgtcacagtggaagatggaccgactaaatcagaccctcgatgccttacgcggtactattcctccttcgtgaatatggagagagatttggcaagcggactcataggaccactcctcatctgttacaaggaatctgtagaccagaggggtaaccagattatgagtgataaacgcaatgtgatcctttttagcgtcttcgacgagaaccggtcctggtacttgaccgagaatatacaaaggttccttcccaaccccgcaggcgttcagttggaagaccctgagtttcaggccagcaatattatgcactcaatcaacggctatgtgtttgatagtctccagctttctgtttgcctccatgaagtagcctattggtacatcttgtcaattggtgctcaaacagacttcctctccgtcttcttctccggctacacctttaagcacaagatggtgtatgaggacactctcacactctttccattttctggagaaaccgtgttcatgagcatggagaatccaggcctttggatcttgggttgccacaacagtgattttcgcaatcggggaatgactgctctcctcaaagtcagcagctgtgataagaacacaggcgactattacgaagattcttacgaggacataagtgcctacttgttgtccaagaataacgccattgagcccagatcattctcccagaatcctcccgtgcttaaaaggcatcagcgcgaaatcaccagaactactcttcagtctgatcaagaggagattgactatgacgacaccataagcgtggaaatgaagaaggaggatttcgatatctatgacgaagatgagaaccagtctccgcggagctttcagaagaagacgcgacactacttcattgcagcagtcgaaaggctttgggactacggtatgtcatcatcccctcatgtgttgcgcaatagagctcagagtggaagtgttccacagttcaagaaagtcgtctttcaagagtttacagatggcagcttcacacagcctctctatcggggcgagcttaacgaacatttgggactccttggtccctatatccgagccgaagtggaggacaacattatggttacctttaggaatcaagcctctcgcccctacagcttctactcctccctcatcagttatgaggaggatcagagacaaggcgctgaaccacggaagaactttgtgaaaccgaatgagacgaagacctacttctggaaagtacagcaccacatggcccccacaaaagacgaattcgattgcaaagcatgggcgtatttttcagacgttgacttggagaaagatgtacattcaggacttattggtcctttgttggtgtgtcacactaacactctcaatccagcccatggcaggcaggtgacagtccaggaattcgctcttttctttaccatctttgatgagaccaagtcctggtacttcacggaaaacatggagcgcaattgcagagccccctgtaacatacagatggaggaccctacctttaaggaaaattatcggttccacgcaatcaacggatacattatggatacactccctggccttgtgatggctcaggaccaacgaatcaggtggtacctcctcagcatgggttctaatgagaacatacactccattcacttttcaggacatgtgttcactgtccggaagaaagaagagtataagatggccctctacaatttgtatccaggcgtgtttgagaccgttgaaatgcttccctctaaagctggcatctggagagtagagtgcttgatcggagaacatcttcacgcaggtatgagcaccttgttcctcgtgtacagcaacaaatgtcagaccccacttggcatggccagtggacacattcgcgactttcagatcacagcatctggccagtatggacaatgggccccaaagttggctcgcctccattactccggtagcataaatgcgtggtccactaaagaacctttcagctggattaaggtcgatcttcttgcccccatgatcatccacggcattaagacacagggagcgaggcagaaattctcctccctctacatctcacagttcattattatgtatagtttggacggcaagaagtggcaaacttatagaggtaacagtactggaacactcatggtgttcttcggcaacgttgatagctctggcatcaaacacaacatctttaatcctcccataatagctcggtacatcagattgcatccgacccactacagcattaggagtacactccgaatggagcttatgggttgcgacttgaattcctgttcaatgccactcggaatggagtctaaagccatctctgatgcacagataaccgccagtagctactttacgaacatgtttgctacgtggtcaccctctaaggcaaggcttcatttgcaaggccggtctaatgcctggagacctcaggtgaacaacccgaaagaatggctccaggtggactttcagaagaccatgaaagtaacaggtgtcactactcagggagttaagtccttgctcaccagcatgtatgtgaaggagttccttatttcctcatcacaagatggccaccagtggaccctcttctttcagaatggtaaggtcaaagtgtttcagggcaatcaagacagcttcacacccgtggtgaacagtcttgatcctccactcttgacacgataccttcgaatccatccacagtcttggtcgcaccagattgcattgcgcatggaagtacttggatgcgaggctcaggacctctac

SEQ ID NO: 2390 - protein, 1457 aa, synthetic construct
  REGION 1..1457: note = Variant of human B-domain deleted Factor VIII
MQIELSTCFFLCLLRFCFSATRRYYLGAVELSWDYMQSDLGELPVDARFPPRVPKSFPFNTSVVYKKTLFVEFTDHLFNIAKPRPPWMGLLGPTIQAEVYDTVVITLKNMASHPVSLHAVGVSYWKASEGAEYDDQTSQREKEDDKVFPGGSHTYVWQVLKENGPMASDPLCLTYSYLSHVDLVKDLNSGLIGALLVCREGSLAKEKTQTLHKFILLFAVFDEGKSWHSETKNSLMQDRDAASARAWPKMHTVNGYVNRSLPGLIGCHRKSVYWHVIGMGTTPEVHSIFLEGHTFLVRNHRQASLEISPITFLTAQTLLMDLGQFLLFCHISSHQHDGMEAYVKVDSCPEEPQLRMKNNEEAEDYDDDLTDSEMDVVRFDDDNSPSFIQIRSVAKKHPKTWVHYIAAEEEDWDYAPLVLAPDDRSYKSQYLNNGPQRIGRKYKKVRFMAYTDETFKTREAIQHESGILGPLLYGEVGDTLLIIFKNQASRPYNIYPHGITDVRPLYSRRLPKGVKHLKDFPILPGEIFKYKWTVTVEDGPTKSDPRCLTRYYSSFVNMERDLASGLIGPLLICYKESVDQRGNQIMSDKRNVILFSVFDENRSWYLTENIQRFLPNPAGVQLEDPEFQASNIMHSINGYVFDSLQLSVCLHEVAYWYILSIGAQTDFLSVFFSGYTFKHKMVYEDTLTLFPFSGETVFMSMENPGLWILGCHNSDFRNRGMTALLKVSSCDKNTGDYYEDSYEDISAYLLSKNNAIEPRSFSQNPPVLKRHQREITRTTLQSDQEEIDYDDTISVEMKKEDFDIYDEDENQSPRSFQKKTRHYFIAAVERLWDYGMSSSPHVLRNRAQSGSVPQFKKVVFQEFTDGSFTQPLYRGELNEHLGLLGPYIRAEVEDNIMVTFRNQASRPYSFYSSLISYEEDQRQGAEPRKNFVKPNETKTYFWKVQHHMAPTKDEFDCKAWAYFSDVDLEKDVHSGLIGPLLVCHTNTLNPAHGRQVTVQEFALFFTIFDETKSWYFTENMERNCRAPCNIQMEDPTFKENYRFHAINGYIMDTLPGLVMAQDQRIRWYLLSMGSNENIHSIHFSGHVFTVRKKEEYKMALYNLYPGVFETVEMLPSKAGIWRVECLIGEHLHAGMSTLFLVYSNKCQTPLGMASGHIRDFQITASGQYGQWAPKLARLHYSGSINAWSTKEPFSWIKVDLLAPMIIHGIKTQGARQKFSSLYISQFIIMYSLDGKKWQTYRGNSTGTLMVFFGNVDSSGIKHNIFNPPIIARYIRLHPTHYSIRSTLRMELMGCDLNSCSMPLGMESKAISDAQITASSYFTNMFATWSPSKARLHLQGRSNAWRPQVNNPKEWLQVDFQKTMKVTGVTTQGVKSLLTSMYVKEFLISSSQDGHQWTLFFQNGKVKVFQGNQDSFTPVVNSLDPPLLTRYLRIHPQSWSHQIALRMEVLGCEAQDLY

SEQ ID NO: 2391 - DNA, 4371 bp, synthetic construct
  misc_feature 1..4371: note = Variant of human B-domain deleted Factor VIII
  source 1..4371: mol_type = other DNA
atgcagattgaactgtctacctgcttcttcctctgtttgctgaggttctgctttagcgccactagacggtactaccttggcgctgtggagctgtcctgggactatatgcagagtgatttgggagagcttcccgtcgacgcacgatttcctcctcgcgttccaaagtcatttcccttcaacacaagcgtggtgtacaagaagacgctcttcgtcgaattcaccgatcacctgttcaatatcgccaaacccagaccaccatggatgggtcttttggggcctaccatacaagcggaggtgtatgacacagttgttatcactctcaagaacatggcttctcatccggtaagtcttcacgcagtgggcgtgtcctactggaaagcttcagaaggagccgagtatgatgatcagacatcccagagggagaaagaagacgacaaggtatttccaggtgggtctcatacctatgtgtggcaagtgctcaaagagaatggccctatggcaagcgatccgctctgtttgacttacagctacctttcacacgttgacctcgtcaaggacctcaactccgggttgattggagccttgttggtatgcagggaaggatctcttgccaaagagaagacacagaccctccacaagtttatccttctctttgctgtgttcgatgagggcaaaagttggcatagcgaaacgaagaattccctcatgcaggatcgcgacgcagccagcgccagagcttggcccaagatgcacactgtgaacggatatgtcaataggaagcttcctggcttgattgggtgtcatcggaaaagtgtctactggcacgtgatcggaatggggacaacaccagaggtccactccatatttctcgaaggccataccttccttgttcgaaaccacagacaggcatccttggagatctctcccattacctttctcactgcccaaacgctccttatggacttgggtcagttccttctcttctgccatatcagctcacaccagcatgatggtatggaagcttatgtgaaagtcgacagttgtcctgaggagccacagttgcgcatgaagaataatgaagaagccgaggattacgacgacgatctcaccgattctgagatggacgtggtgaggtttgatgacgacaactctccctccttcattcaaatccggagcgtggcgaagaaacaccccaagacttgggtccactatatagcggcggaagaggaggattgggattacgctcctcttgtattggcaccagatgaccgctcatacaaaagccagtacctcaacaacggaccgcagagaattggccggaagtataagaaagtgcgatttatggcctatacagacgaaacctttaagacaagggaggccatccagcatgagagtgggattttgggacctcttctttacggcgaagttggtgataccctcctcatcatcttcaagaatcaagcttctcgcccctataacatttacccacacgggatcactgacgttaggcctttgtatagcagaagacttcccaaaggcgtgaagcatctcaaagacttccccattttgccaggcgagatctttaagtacaaatggaccgtcacagtggaagatggaccgactaaatcagaccctcgatgccttacgcggtactattcctccttcgtgaatatggagagagatttggcaagcggactcataggaccactcctcatctgttacaaggaatctgtagaccagaggggtaaccagattatgagtgataaacgcaatgtgatcctttttagcgtcttcgacgagaaccggtcctggtacttgaccgagaatatacaaaggttccttcccaaccccgcaggcgttcagttggaagaccctgagtttcaggccagcaatattatgcactcaatcaacggctatgtgtttgatagtctccagctttctgtttgcctccatgaagtagcctattggtacatcttgtcaattggtgctcaaacagacttcctctccgtcttcttctccggctacacctttaagcacaagatggtgtatgaggacactctcacactctttccattttctggagaaaccgtgttcatgagcatggagaatccaggcctttggatcttgggttgccacaacagtgattttcgcaatcggggaatgactgctctcctcaaagtcagcagctgtgataagaacacaggcgactattacgaagattcttacgaggacataagtgcctacttgttgtccaagaataacgccattgagcccagatcattctcccagaatcctcccgtgcttaaaaggcatcagcgcgaaatcaccagaactactcttcagtctgatcaagaggagattgactatgacgacaccataagcgtggaaatgaagaaggaggatttcgatatctatgacgaagatgagaaccagtctccgcggagctttcagaagaagacgcgacactacttcattgcagcagtcgaaaggctttgggactacggtatgtcatcatcccctcatgtgttgcgcaatagagctcagagtggaagtgttccacagttcaagaaagtcgtctttcaagagtttacagatggcagcttcacacagcctctctatcggggcgagcttaacgaacatttgggactccttggtccctatatccgagccgaagtggaggacaacattatggttacctttaggaatcaagcctctcgcccctacagcttctactcctccctcatcagttatgaggaggatcagagacaaggcgctgaaccacggaagaactttgtgaaaccgaatgagacgaagacctacttctggaaagtacagcaccacatggcccccacaaaagacgaattcgattgcaaagcatgggcgtatttttcagacgttgacttggagaaagatgtacattcaggacttattggtcctttgttggtgtgtcacactaacactctcaatccagcccatggcaggcaggtgacagtccaggaattcgctcttttctttaccatctttgatgagaccaagtcctggtacttcacggaaaacatggagcgcaattgcagagccccctgtaacatacagatggaggaccctacctttaaggaaaattatcggttccacgcaatcaacggatacattatggatacactccctggccttgtgatggctcaggaccaacgaatcaggtggtacctcctcagcatgggttctaatgagaacatacactccattcacttttcaggacatgtgttcactgtccggaagaaagaagagtataagatggccctctacaatttgtatccaggcgtgtttgagaccgttgaaatgcttccctctaaagctggcatctggagagtagagtgcttgatcggagaacatcttcacgcaggtatgagcaccttgttcctcgtgtacagcaacaaatgtcagaccccacttggcatggccagtggacacattcgcgactttcagatcacagcatctggccagtatggacaatgggccccaaagttggctcgcctccattactccggtagcataaatgcgtggtccactaaagaacctttcagctggattaaggtcgatcttcttgcccccatgatcatccacggcattaagacacagggagcgaggcagaaattctcctccctctacatctcacagttcattattatgtatagtttggacggcaagaagtggcaaacttatagaggtaacagtactggaacactcatggtgttcttcggcaacgttgatagctctggcatcaaacacaacatctttaatcctcccataatagctcggtacatcagattgcatccgacccactacagcattaggagtacactccgaatggagcttatgggttgcgacttgaattcctgttcaatgccactcggaatggagtctaaagccatctctgatgcacagataaccgccagtagctactttacgaacatgtttgctacgtggtcaccctctaaggcaaggcttcatttgcaaggccggtctaatgcctggagacctcaggtgaacaacccgaaagaatggctccaggtggactttcagaagaccatgaaagtaacaggtgtcactactcagggagttaagtccttgctcaccagcatgtatgtgaaggagttccttatttcctcatcacaagatggccaccagtggaccctcttctttcagaatggtaaggtcaaagtgtttcagggcaatcaagacagcttcacacccgtggtgaacagtcttgatcctccactcttgacacgataccttcgaatccatccacagtcttgggttcaccagattgcattgcgcatggaagtacttggatgcgaggctcaggacctctac

SEQ ID NO: 2392 - protein, 1457 aa, synthetic construct
  REGION 1..1457: note = Variant of human B-domain deleted Factor VIII
MQIELSTCFFLCLLRFCFSATRRYYLGAVELSWDYMQSDLGELPVDARFPPRVPKSFPFNTSVVYKKTLFVEFTDHLFNIAKPRPPWMGLLGPTIQAEVYDTVVITLKNMASHPVSLHAVGVSYWKASEGAEYDDQTSQREKEDDKVFPGGSHTYVWQVLKENGPMASDPLCLTYSYLSHVDLVKDLNSGLIGALLVCREGSLAKEKTQTLHKFILLFAVFDEGKSWHSETKNSLMQDRDAASARAWPKMHTVNGYVNRKLPGLIGCHRKSVYWHVIGMGTTPEVHSIFLEGHTFLVRNHRQASLEISPITFLTAQTLLMDLGQFLLFCHISSHQHDGMEAYVKVDSCPEEPQLRMKNNEEAEDYDDDLTDSEMDVVRFDDDNSPSFIQIRSVAKKHPKTWVHYIAAEEEDWDYAPLVLAPDDRSYKSQYLNNGPQRIGRKYKKVRFMAYTDETFKTREAIQHESGILGPLLYGEVGDTLLIIFKNQASRPYNIYPHGITDVRPLYSRRLPKGVKHLKDFPILPGEIFKYKWTVTVEDGPTKSDPRCLTRYYSSFVNMERDLASGLIGPLLICYKESVDQRGNQIMSDKRNVILFSVFDENRSWYLTENIQRFLPNPAGVQLEDPEFQASNIMHSINGYVFDSLQLSVCLHEVAYWYILSIGAQTDFLSVFFSGYTFKHKMVYEDTLTLFPFSGETVFMSMENPGLWILGCHNSDFRNRGMTALLKVSSCDKNTGDYYEDSYEDISAYLLSKNNAIEPRSFSQNPPVLKRHQREITRTTLQSDQEEIDYDDTISVEMKKEDFDIYDEDENQSPRSFQKKTRHYFIAAVERLWDYGMSSSPHVLRNRAQSGSVPQFKKVVFQEFTDGSFTQPLYRGELNEHLGLLGPYIRAEVEDNIMVTFRNQASRPYSFYSSLISYEEDQRQGAEPRKNFVKPNETKTYFWKVQHHMAPTKDEFDCKAWAYFSDVDLEKDVHSGLIGPLLVCHTNTLNPAHGRQVTVQEFALFFTIFDETKSWYFTENMERNCRAPCNIQMEDPTFKENYRFHAINGYIMDTLPGLVMAQDQRIRWYLLSMGSNENIHSIHFSGHVFTVRKKEEYKMALYNLYPGVFETVEMLPSKAGIWRVECLIGEHLHAGMSTLFLVYSNKCQTPLGMASGHIRDFQITASGQYGQWAPKLARLHYSGSINAWSTKEPFSWIKVDLLAPMIIHGIKTQGARQKFSSLYISQFIIMYSLDGKKWQTYRGNSTGTLMVFFGNVDSSGIKHNIFNPPIIARYIRLHPTHYSIRSTLRMELMGCDLNSCSMPLGMESKAISDAQITASSYFTNMFATWSPSKARLHLQGRSNAWRPQVNNPKEWLQVDFQKTMKVTGVTTQGVKSLLTSMYVKEFLISSSQDGHQWTLFFQNGKVKVFQGNQDSFTPVVNSLDPPLLTRYLRIHPQSWVHQIALRMEVLGCEAQDLY

SEQ ID NO: 2393 - DNA, 4371 bp, synthetic construct
  misc_feature 1..4371: note = Variant of human B-domain deleted Factor VIII
  source 1..4371: mol_type = other DNA
atgcagattgaactgtctacctgcttcttcctctgtttgctgaggttctgctttagcgccactagacggtactaccttggcgctgtggagctgtcctgggactatatgcagagtgatttgggagagcttcccgtcgacgcacgatttcctcctcgcgttccaaagtcatttcccttcaacacaagcgtggtgtacaagaagacgctcttcgtcgaattcaccgatcacctgttcaatatcgccaaacccagaccaccatggatgggtcttttggggcctaccatacaagcggaggtgtatgacacagttgttatcactctcaagaacatggcttctcatccggtaagtcttcacgcagtgggcgtgtcctactggaaagcttcagaaggagccgagtatgatgatcagacatcccagagggagaaagaagacgacaaggtatttccaggtgggtctcatacctatgtgtggcaagtgctcaaagagaatggccctatggcaagcgatccgctctgtttgacttacagctacctttcacacgttgacctcgtcaaggacctcaactccgggttgattggagccttgttggtatgcagggaaggatctcttgccaaagagaagacacagaccctccacaagtttatccttctctttgctgtgttcgatgagggcaaaagttggcatagcgaaacgaagaattccctcatgcaggatcgcgacgcagccagcgccagagcttggcccaagatgcacactgtgaacggatatgtcaataggtcacttcctggcttgattgggtgtcatcggaaaagtgtctactggcacgtgatcggaatggggacaacaccagaggtccactccatatttctcgaaggccataccttccttgttcgaaaccacagacaggcatccttggagatctctcccattacctttctcactgcccaaacgctccttatggacttgggtcagttccttctcttctgccatatcagctcacaccagcatgatggtatggaagcttatgtgaaagtcgacagttgtcctgaggagccacagttgcgcatgaagaataatgaagaagccgaggattacgacgacgatctcaccgattctgagatggacgtggtgaggtttgatgacgacaactctccctccttcattcaaatccggagcgtggcgaagaaacaccccaagacttgggtccactatatagcggcggaagaggaggattgggattacgctcctcttgtattggcaccagatgaccgctcatacaaaagccagtacctcaacaacggaccgcagagaattggccggaagtataagaaagtgcgatttatggcctatacagacgaaacctttaagacaagggaggccatccagcatgagagtgggattttgggacctcttctttacggcgaagttggtgataccctcctcatcatcttcaagaatcaagcttctcgcccctataacatttacccacacgggatcactgacgttaggcctttgtatagcagaagacttcccaaaggcgtgaagcatctcaaagacttccccattttgccaggcgagatctttaagtacaaatggaccgtcacagtggaagatggaccgactaaatcagaccctcgatgccttacgcggtactattcctccttcgtgaatgttgagagagatttggcaagcggactcataggaccactcctcatctgttacaaggaatctgtagaccagaggggtaaccagattatgagtgataaacgcaatgtgatcctttttagcgtcttcgacgagaaccggtcctggtacttgaccgagaatatacaaaggttccttcccaaccccgcaggcgttcagttggaagaccctgagtttcaggccagcaatattatgcactcaatcaacggctatgtgtttgatagtctccagctttctgtttgcctccatgaagtagcctattggtacatcttgtcaattggtgctcaaacagacttcctctccgtcttcttctccggctacacctttaagcacaagatggtgtatgaggacactctcacactctttccattttctggagaaaccgtgttcatgagcatggagaatccaggcctttggatcttgggttgccacaacagtgattttcgcaatcggggaatgactgctctcctcaaagtcagcagctgtgataagaacacaggcgactattacgaagattcttacgaggacataagtgcctacttgttgtccaagaataacgccattgagcccagatcattctcccagaatcctcccgtgcttaaaaggcatcagcgcgaaatcaccagaactactcttcagtctgatcaagaggagattgactatgacgacaccataagcgtggaaatgaagaaggaggatttcgatatctatgacgaagatgagaaccagtctccgcggagctttcagaagaagacgcgacactacttcattgcagcagtcgaaaggctttgggactacggtatgtcatcatcccctcatgtgttgcgcaatagagctcagagtggaagtgttccacagttcaagaaagtcgtctttcaagagtttacagatggcagcttcacacagcctctctatcggggcgagcttaacgaacatttgggactccttggtccctatatccgagccgaagtggaggacaacattatggttacctttaggaatcaagcctctcgcccctacagcttctactcctccctcatcagttatgaggaggatcagagacaaggcgctgaaccacggaagaactttgtgaaaccgaatgagacgaagacctacttctggaaagtacagcaccacatggcccccacaaaagacgaattcgattgcaaagcatgggcgtatttttcagacgttgacttggagaaagatgtacattcaggacttattggtcctttgttggtgtgtcacactaacactctcaatccagcccatggcaggcaggtgacagtccaggaattcgctcttttctttaccatctttgatgagaccaagtcctggtacttcacggaaaacatggagcgcaattgcagagccccctgtaacatacagatggaggaccctacctttaaggaaaattatcggttccacgcaatcaacggatacattatggatacactccctggccttgtgatggctcaggaccaacgaatcaggtggtacctcctcagcatgggttctaatgagaacatacactccattcacttttcaggacatgtgttcactgtccggaagaaagaagagtataagatggccctctacaatttgtatccaggcgtgtttgagaccgttgaaatgcttccctctaaagctggcatctggagagtagagtgcttgatcggagaacatcttcacgcaggtatgagcaccttgttcctcgtgtacagcaacaaatgtcagaccccacttggcatggccagtggacacattcgcgactttcagatcacagcatctggccagtatggacaatgggccccaaagttggctcgcctccattactccggtagcataaatgcgtggtccactaaagaacctttcagctggattaaggtcgatcttcttgcccccatgatcatccacggcattaagacacagggagcgaggcagaaattctcctccctctacatctcacagttcattattatgtatagtttggacggcaagaagtggcaaacttatagaggtaacagtactggaacactcatggtgttcttcggcaacgttgatagctctggcatcaaacacaacatctttaatcctcccataatagctcggtacatcagattgcatccgacccactacagcattaggagtacactccgaatggagcttatgggttgcgacttgaattcctgttcaatgccactcggaatggagtctaaagccatctctgatgcacagataaccgccagtagctactttacgaacatgtttgctacgtggtcaccctctaaggcaaggcttcatttgcaaggccggtctaatgcctggagacctcaggtgaacaacccgaaagaatggctccaggtggactttcagaagaccatgaaagtaacaggtgtcactactcagggagttaagtccttgctcaccagcatgtatgtgaaggagttccttatttcctcatcacaagatggccaccagtggaccctcttctttcagaatggtaaggtcaaagtgtttcagggcaatcaagacagcttcacacccgtggtgaacagtcttgatcctccactcttgacacgataccttcgaatccatccacagtcttgggttcaccagattgcattgcgcatggaagtacttggatgcgaggctcaggacctctac

SEQ ID NO: 2394 - protein, 1457 aa, synthetic construct
  REGION 1..1457: note = Variant of human B-domain deleted Factor VIII
MQIELSTCFFLCLLRFCFSATRRYYLGAVELSWDYMQSDLGELPVDARFPPRVPKSFPFNTSVVYKKTLFVEFTDHLFNIAKPRPPWMGLLGPTIQAEVYDTVVITLKNMASHPVSLHAVGVSYWKASEGAEYDDQTSQREKEDDKVFPGGSHTYVWQVLKENGPMASDPLCLTYSYLSHVDLVKDLNSGLIGALLVCREGSLAKEKTQTLHKFILLFAVFDEGKSWHSETKNSLMQDRDAASARAWPKMHTVNGYVNRSLPGLIGCHRKSVYWHVIGMGTTPEVHSIFLEGHTFLVRNHRQASLEISPITFLTAQTLLMDLGQFLLFCHISSHQHDGMEAYVKVDSCPEEPQLRMKNNEEAEDYDDDLTDSEMDVVRFDDDNSPSFIQIRSVAKKHPKTWVHYIAAEEEDWDYAPLVLAPDDRSYKSQYLNNGPQRIGRKYKKVRFMAYTDETFKTREAIQHESGILGPLLYGEVGDTLLIIFKNQASRPYNIYPHGITDVRPLYSRRLPKGVKHLKDFPILPGEIFKYKWTVTVEDGPTKSDPRCLTRYYSSFVNVERDLASGLIGPLLICYKESVDQRGNQIMSDKRNVILFSVFDENRSWYLTENIQRFLPNPAGVQLEDPEFQASNIMHSINGYVFDSLQLSVCLHEVAYWYILSIGAQTDFLSVFFSGYTFKHKMVYEDTLTLFPFSGETVFMSMENPGLWILGCHNSDFRNRGMTALLKVSSCDKNTGDYYEDSYEDISAYLLSKNNAIEPRSFSQNPPVLKRHQREITRTTLQSDQEEIDYDDTISVEMKKEDFDIYDEDENQSPRSFQKKTRHYFIAAVERLWDYGMSSSPHVLRNRAQSGSVPQFKKVVFQEFTDGSFTQPLYRGELNEHLGLLGPYIRAEVEDNIMVTFRNQASRPYSFYSSLISYEEDQRQGAEPRKNFVKPNETKTYFWKVQHHMAPTKDEFDCKAWAYFSDVDLEKDVHSGLIGPLLVCHTNTLNPAHGRQVTVQEFALFFTIFDETKSWYFTENMERNCRAPCNIQMEDPTFKENYRFHAINGYIMDTLPGLVMAQDQRIRWYLLSMGSNENIHSIHFSGHVFTVRKKEEYKMALYNLYPGVFETVEMLPSKAGIWRVECLIGEHLHAGMSTLFLVYSNKCQTPLGMASGHIRDFQITASGQYGQWAPKLARLHYSGSINAWSTKEPFSWIKVDLLAPMIIHGIKTQGARQKFSSLYISQFIIMYSLDGKKWQTYRGNSTGTLMVFFGNVDSSGIKHNIFNPPIIARYIRLHPTHYSIRSTLRMELMGCDLNSCSMPLGMESKAISDAQITASSYFTNMFATWSPSKARLHLQGRSNAWRPQVNNPKEWLQVDFQKTMKVTGVTTQGVKSLLTSMYVKEFLISSSQDGHQWTLFFQNGKVKVFQGNQDSFTPVVNSLDPPLLTRYLRIHPQSWVHQIALRMEVLGCEAQDLY

SEQ ID NO: 2395 - DNA, 4371 bp, synthetic construct
  misc_feature 1..4371: note = Variant of human B-domain deleted Factor VIII
  source 1..4371: mol_type = other DNA
atgcagattgaactgtctacctgcttcttcctctgtttgctgaggttctgctttagcgccactagacggtactaccttggcgctgtggagctgtcctgggactatatgcagagtgatttgggagagcttcccgtcgacgcacgatttcctcctcgcgttccaaagtcatttcccttcaacacaagcgtggtgtacaagaagacgctcttcgtcgaattcaccgatcacctgttcaatatcgccaaacccagaccaccatggatgggtcttttggggcctaccatacaagcggaggtgtatgacacagttgttatcactctcaagaacatggcttctcatccggtaagtcttcacgcagtgggcgtgtcctactggaaagcttcagaaggagccgagtatgatgatcagacatcccagagggagaaagaagacgacaaggtatttccaggtgggtctcatacctatgtgtggcaagtgctcaaagagaatggccctatggcaagcgatccgctctgtttgacttacagctacctttcacacgttgacctcgtcaaggacctcaactccgggttgattggagccttgttggtatgcagggaaggatctcttgccaaagagaagacacagaccctccacaagtttatccttctctttgctgtgttcgatgagggcaaaagttggcatagcgaaacgaagaattccctcatgcaggatcgcgacgcagccagcgccagagcttggcccaagatgcacactgtgaacggatatgtcaataggtcacttcctggcttgattgggtgtcatcggaaaagtgtctactggcacgtgatcggaatggggacaacaccagaggtccactccatatttctcgaaggccataccttccttgttcgaaaccacagacaggcatccttggagatctctcccattacctttctcactgcccaaacgctccttatggacttgggtcagttccttctcttctgccatatcaattcacaccagcatgatggtatggaagcttatgtgaaagtcgacagttgtcctgaggagccacagttgcgcatgaagaataatgaagaagccgaggattacgacgacgatctcaccgattctgagatggacgtggtgaggtttgatgacgacaactctccctccttcattcaaatccggagcgtggcgaagaaacaccccaagacttgggtccactatatagcggcggaagaggaggattgggattacgctcctcttgtattggcaccagatgaccgctcatacaaaagccagtacctcaacaacggaccgcagagaattggccggaagtataagaaagtgcgatttatggcctatacagacgaaacctttaagacaagggaggccatccagcatgagagtgggattttgggacctcttctttacggcgaagttggtgataccctcctcatcatcttcaagaatcaagcttctcgcccctataacatttacccacacgggatcactgacgttaggcctttgtatagcagaagacttcccaaaggcgtgaagcatctcaaagacttccccattttgccaggcgagatctttaagtacaaatggaccgtcacagtggaagatggaccgactaaatcagaccctcgatgccttacgcggtactattcctccttcgtgaatatggagagagatttggcaagcggactcataggaccactcctcatctgttacaaggaatctgtagaccagaggggtaaccagattatgagtgataaacgcaatgtgatcctttttagcgtcttcgacgagaaccggtcctggtacttgaccgagaatatacaaaggttccttcccaaccccgcaggcgttcagttggaagaccctgagtttcaggccagcaatattatgcactcaatcaacggctatgtgtttgatagtctccagctttctgtttgcctccatgaagtagcctattggtacatcttgtcaattggtgctcaaacagacttcctctccgtcttcttctccggctacacctttaagcacaagatggtgtatgaggacactctcacactctttccattttctggagaaaccgtgttcatgagcatggagaatccaggcctttggatcttgggttgccacaacagtgattttcgcaatcggggaatgactgctctcctcaaagtcagcagctgtgataagaacacaggcgactattacgaagattcttacgaggacataagtgcctacttgttgtccaagaataacgccattgagcccagatcattctcccagaatcctcccgtgcttaaaaggcatcagcgcgaaatcaccagaactactcttcagtctgatcaagaggagattgactatgacgacaccataagcgtggaaatgaagaaggaggatttcgatatctatgacgaagatgagaaccagtctccgcggagctttcagaagaagacgcgacactacttcattgcagcagtcgaaaggctttgggactacggtatgtcatcatcccctcatgtgttgcgcaatagagctcagagtggaagtgttccacagttcaagaaagtcgtctttcaagagtttacagatggcagcttcacacagcctctctatcggggcgagcttaacgaacatttgggactccttggtccctatatccgagccgaagtggaggacaacattatggttacctttaggaatcaagcctctcgcccctacagcttctactcctccctcatcagttatgaggaggatcagagacaaggcgctgaaccacggaagaactttgtgaaaccgaatgagacgaagacctacttctggaaagtacagcaccacatggcccccacaaaagacgaattcgattgcaaagcatgggcgtatttttcagacgttgacttggagaaagatgtacattcaggacttattggtcctttgttggtgtgtcacactaacactctcaatccagcccatggcaggcaggtgacagtccaggaattcgctcttttctttaccatctttgatgagaccaagtcctggtacttcacggaaaacatggagcgcaattgcagagccccctgtaacatacagatggaggaccctacctttaaggaaaattatcggttccacgcaatcaacggatacattatggatacactccctggccttgtgatggctcaggaccaacgaatcaggtggtacctcctcagcatgggttctaatgagaacatacactccattcacttttcaggacatgtgttcactgtccggaagaaagaagagtataagatggccctctacaatttgtatccaggcgtgtttgagaccgttgaaatgcttccctctaaagctggcatctggagagtagagtgcttgatcggagaacatcttcacgcaggtatgagcaccttgttcctcgtgtacagcaacaaatgtcagaccccacttggcatggccagtggacacattcgcgactttcagatcacagcatctggccagtatggacaatgggccccaaagttggctcgcctccattactccggtagcataaatgcgtggtccactaaagaacctttcagctggattaaggtcgatcttcttgcccccatgatcatccacggcattaagacacagggagcgaggcagaaattctcctccctctacatctcacagttcattattatgtatagtttggacggcaagaagtggcaaacttatagaggtaacagtactggaacactcatggtgttcttcggcaacgttgatagctctggcatcaaacacaacatctttaatcctcccataatagctcggtacatcagattgcatccgacccactacagcattaggagtacactccgaatggagcttatgggttgcgacttgaattcctgttcaatgccactcggaatggagtctaaagccatctctgatgcacagataaccgccagtagctactttacgaacatgtttgctacgtggtcaccctctaaggcaaggcttcatttgcaaggccggtctaatgcctggagacctcaggtgaacaacccgaaagaatggctccaggtggactttcagaagaccatgaaagtaacaggtgtcactactcagggagttaagtccttgctcaccagcatgtatgtgaaggagttccttatttcctcatcacaagatggccaccagtggaccctcttctttcagaatggtaaggtcaaagtgtttcagggcaatcaagacagcttcacacccgtggtgaacagtcttgatcctccactcttgacacgataccttcgaatccatccacagtcttgggttcaccagattgcattgcgcatggaagtacttggatgcgaggctcaggacctctac

SEQ ID NO: 2396 - protein, 1457 aa, synthetic construct
  REGION 1..1457: note = Variant of human B-domain deleted Factor VIII
MQIELSTCFFLCLLRFCFSATRRYYLGAVELSWDYMQSDLGELPVDARFPPRVPKSFPFNTSVVYKKTLFVEFTDHLFNIAKPRPPWMGLLGPTIQAEVYDTVVITLKNMASHPVSLHAVGVSYWKASEGAEYDDQTSQREKEDDKVFPGGSHTYVWQVLKENGPMASDPLCLTYSYLSHVDLVKDLNSGLIGALLVCREGSLAKEKTQTLHKFILLFAVFDEGKSWHSETKNSLMQDRDAASARAWPKMHTVNGYVNRSLPGLIGCHRKSVYWHVIGMGTTPEVHSIFLEGHTFLVRNHRQASLEISPITFLTAQTLLMDLGQFLLFCHINSHQHDGMEAYVKVDSCPEEPQLRMKNNEEAEDYDDDLTDSEMDVVRFDDDNSPSFIQIRSVAKKHPKTWVHYIAAEEEDWDYAPLVLAPDDRSYKSQYLNNGPQRIGRKYKKVRFMAYTDETFKTREAIQHESGILGPLLYGEVGDTLLIIFKNQASRPYNIYPHGITDVRPLYSRRLPKGVKHLKDFPILPGEIFKYKWTVTVEDGPTKSDPRCLTRYYSSFVNMERDLASGLIGPLLICYKESVDQRGNQIMSDKRNVILFSVFDENRSWYLTENIQRFLPNPAGVQLEDPEFQASNIMHSINGYVFDSLQLSVCLHEVAYWYILSIGAQTDFLSVFFSGYTFKHKMVYEDTLTLFPFSGETVFMSMENPGLWILGCHNSDFRNRGMTALLKVSSCDKNTGDYYEDSYEDISAYLLSKNNAIEPRSFSQNPPVLKRHQREITRTTLQSDQEEIDYDDTISVEMKKEDFDIYDEDENQSPRSFQKKTRHYFIAAVERLWDYGMSSSPHVLRNRAQSGSVPQFKKVVFQEFTDGSFTQPLYRGELNEHLGLLGPYIRAEVEDNIMVTFRNQASRPYSFYSSLISYEEDQRQGAEPRKNFVKPNETKTYFWKVQHHMAPTKDEFDCKAWAYFSDVDLEKDVHSGLIGPLLVCHTNTLNPAHGRQVTVQEFALFFTIFDETKSWYFTENMERNCRAPCNIQMEDPTFKENYRFHAINGYIMDTLPGLVMAQDQRIRWYLLSMGSNENIHSIHFSGHVFTVRKKEEYKMALYNLYPGVFETVEMLPSKAGIWRVECLIGEHLHAGMSTLFLVYSNKCQTPLGMASGHIRDFQITASGQYGQWAPKLARLHYSGSINAWSTKEPFSWIKVDLLAPMIIHGIKTQGARQKFSSLYISQFIIMYSLDGKKWQTYRGNSTGTLMVFFGNVDSSGIKHNIFNPPIIARYIRLHPTHYSIRSTLRMELMGCDLNSCSMPLGMESKAISDAQITASSYFTNMFATWSPSKARLHLQGRSNAWRPQVNNPKEWLQVDFQKTMKVTGVTTQGVKSLLTSMYVKEFLISSSQDGHQWTLFFQNGKVKVFQGNQDSFTPVVNSLDPPLLTRYLRIHPQSWVHQIALRMEVLGCEAQDLY

SEQ ID NO: 2397 - DNA, 4371 bp, synthetic construct
  misc_feature 1..4371: note = Variant of human B-domain deleted Factor VIII
  source 1..4371: mol_type = other DNA
atgcagattgaactgtctacctgcttcttcctctgtttgctgaggttctgctttagcgccactagacggtactaccttggcgctgtggagctgtcctgggactatatgcagagtgatttgggagagcttcccgtcgacgcacgatttcctcctcgcgttccaaagtcatttcccttcaacacaagcgtggtgtacaagaagacgctcttcgtcgaattcaccgatcacctgttcaatatcgccaaacccagaccaccatggatgggtcttttggggcctaccatacaagcggaggtgtatgacacagttgttatcactctcaagaacatggcttctcatccggtaagtcttcacgcagtgggcgtgtcctactggaaagcttcagaaggagccgagtatgatgatcagacatcccagagggagaaagaagacgacaaggtatttccaggtgggtctcatacctatgtgtggcaagtgctcaaagagaatggccctatggcaagcgatccgctctgtttgacttacagctacctttcacacgttgacctcgtcaaggacctcaactccgggttgattggagccttgttggtatgcagggaaggatctcttgccaaagagaagacacagaccctccacaagtttatccttctctttgctgtgttcgatgagggcaaaagttggcatagcgaaacgaagaattccctcatgcaggatcgcgacgcagccagcgccagagcttggcccaagatgcacactgtgaacggatatgtcaataggtcacttcctggcttgattgggtgtcatcggaaaagtgtctactggcacgtgatcggaatggggacaacaccagaggtccactccatatttctcgaaggccataccttccttgttcgaaaccacagacaggcatccttggagatctctcccattacctttctcactgcccaaacgctccttatggacttgggtcagttccttctcttctgccatatcagctcacaccagcatgatggtatggaagcttatgtgaaagtcgacagttgtcctgaggagccacagttgcgcatgaagaataatgaagaagccgaggattacgacgacgatctcaccgattctgagatggacgtggtgaggtttgatgacgacaactctccctccttcattcaaactcggagcgtggcgaagaaacaccccaagacttgggtccactatatagcggcggaagaggaggattgggattacgctcctcttgtattggcaccagatgaccgctcatacaaaagccagtacctcaacaacggaccgcagagaattggccggaagtataagaaagtgcgatttatggcctatacagacgaaacctttaagacaagggaggccatccagcatgagagtgggattttgggacctcttctttacggcgaagttggtgataccctcctcatcatcttcaagaatcaagcttctcgcccctataacatttacccacacgggatcactgacgttaggcctttgtatagcagaagacttcccaaaggcgtgaagcatctcaaagacttccccattttgccaggcgagatctttaagtacaaatggaccgtcacagtggaagatggaccgactaaatcagaccctcgatgccttacgcggtactattcctccttcgtgaatatggagagagatttggcaagcggactcataggaccactcctcatctgttacaaggaatctgtagaccagaggggtaaccagattatgagtgataaacgcaatgtgatcctttttagcgtcttcgacgagaaccggtcctggtacttgaccgagaatatacaaaggttccttcccaaccccgcaggcgttcagttggaagaccctgagtttcaggccagcaatattatgcactcaatcaacggctatgtgtttgatagtctccagctttctgtttgcctccatgaagtagcctattggtacatcttgtcaattggtgctcaaacagacttcctctccgtcttcttctccggctacacctttaagcacaagatggtgtatgaggacactctcacactctttccattttctggagaaaccgtgttcatgagcatggagaatccaggcctttggatcttgggttgccacaacagtgattttcgcaatcggggaatgactgctctcctcaaagtcagcagctgtgataagaacacaggcgactattacgaagattcttacgaggacataagtgcctacttgttgtccaagaataacgccattgagcccagatcattctcccagaatcctcccgtgcttaaaaggcatcagcgcgaaatcaccagaactactcttcagtctgatcaagaggagattgactatgacgacaccataagcgtggaaatgaagaaggaggatttcgatatctatgacgaagatgagaaccagtctccgcggagctttcagaagaagacgcgacactacttcattgcagcagtcgaaaggctttgggactacggtatgtcatcatcccctcatgtgttgcgcaatagagctcagagtggaagtgttccacagttcaagaaagtcgtctttcaagagtttacagatggcagcttcacacagcctctctatcggggcgagcttaacgaacatttgggactccttggtccctatatccgagccgaagtggaggacaacattatggttacctttaggaatcaagcctctcgcccctacagcttctactcctccctcatcagttatgaggaggatcagagacaaggcgctgaaccacggaagaactttgtgaaaccgaatgagacgaagacctacttctggaaagtacagcaccacatggcccccacaaaagacgaattcgattgcaaagcatgggcgtatttttcagacgttgacttggagaaagatgtacattcaggacttattggtcctttgttggtgtgtcacactaacactctcaatccagcccatggcaggcaggtgacagtccaggaattcgctcttttctttaccatctttgatgagaccaagtcctggtacttcacggaaaacatggagcgcaattgcagagccccctgtaacatacagatggaggaccctacctttaaggaaaattatcggttccacgcaatcaacggatacattatggatacactccctggccttgtgatggctcaggaccaacgaatcaggtggtacctcctcagcatgggttctaatgagaacatacactccattcacttttcaggacatgtgttcactgtccggaagaaagaagagtataagatggccctctacaatttgtatccaggcgtgtttgagaccgttgaaatgcttccctctaaagctggcatctggagagtagagtgcttgatcggagaacatcttcacgcaggtatgagcaccttgttcctcgtgtacagcaacaaatgtcagaccccacttggcatggccagtggacacattcgcgactttcagatcacagcatctggccagtatggacaatgggccccaaagttggctcgcctccattactccggtagcataaatgcgtggtccactaaagaacctttcagctggattaaggtcgatcttcttgcccccatgatcatccacggcattaagacacagggagcgaggcagaaattctcctccctctacatctcacagttcattattatgtatagtttggacggcaagaagtggcaaacttatagaggtaacagtactggaacactcatggtgttcttcggcaacgttgatagctctggcatcaaacacaacatctttaatcctcccataatagctcggtacatcagattgcatccgacccactacagcattaggagtacactccgaatggagcttatgggttgcgacttgaattcctgttcaatgccactcggaatggagtctaaagccatctctgatgcacagataaccgccagtagctactttacgaacatgtttgctacgtggtcaccctctaaggcaaggcttcatttgcaaggccggtctaatgcctggagacctcaggtgaacaacccgaaagaatggctccaggtggactttcagaagaccatgaaagtaacaggtgtcactactcagggagttaagtccttgctcaccagcatgtatgtgaaggagttccttatttcctcatcacaagatggccaccagtggaccctcttctttcagaatggtaaggtcaaagtgtttcagggcaatcaagacagcttcacacccgtggtgaacagtcttgatcctccactcttgacacgataccttcgaatccatccacagtcttgggttcaccagattgcattgcgcatggaagtacttggatgcgaggctcaggacctctac

SEQ ID NO: 2398 - protein, 1457 aa, synthetic construct
  REGION 1..1457: note = Variant of human B-domain deleted Factor VIII
MQIELSTCFFLCLLRFCFSATRRYYLGAVELSWDYMQSDLGELPVDARFPPRVPKSFPFNTSVVYKKTLFVEFTDHLFNIAKPRPPWMGLLGPTIQAEVYDTVVITLKNMASHPVSLHAVGVSYWKASEGAEYDDQTSQREKEDDKVFPGGSHTYVWQVLKENGPMASDPLCLTYSYLSHVDLVKDLNSGLIGALLVCREGSLAKEKTQTLHKFILLFAVFDEGKSWHSETKNSLMQDRDAASARAWPKMHTVNGYVNRSLPGLIGCHRKSVYWHVIGMGTTPEVHSIFLEGHTFLVRNHRQASLEISPITFLTAQTLLMDLGQFLLFCHISSHQHDGMEAYVKVDSCPEEPQLRMKNNEEAEDYDDDLTDSEMDVVRFDDDNSPSFIQTRSVAKKHPKTWVHYIAAEEEDWDYAPLVLAPDDRSYKSQYLNNGPQRIGRKYKKVRFMAYTDETFKTREAIQHESGILGPLLYGEVGDTLLIIFKNQASRPYNIYPHGITDVRPLYSRRLPKGVKHLKDFPILPGEIFKYKWTVTVEDGPTKSDPRCLTRYYSSFVNMERDLASGLIGPLLICYKESVDQRGNQIMSDKRNVILFSVFDENRSWYLTENIQRFLPNPAGVQLEDPEFQASNIMHSINGYVFDSLQLSVCLHEVAYWYILSIGAQTDFLSVFFSGYTFKHKMVYEDTLTLFPFSGETVFMSMENPGLWILGCHNSDFRNRGMTALLKVSSCDKNTGDYYEDSYEDISAYLLSKNNAIEPRSFSQNPPVLKRHQREITRTTLQSDQEEIDYDDTISVEMKKEDFDIYDEDENQSPRSFQKKTRHYFIAAVERLWDYGMSSSPHVLRNRAQSGSVPQFKKVVFQEFTDGSFTQPLYRGELNEHLGLLGPYIRAEVEDNIMVTFRNQASRPYSFYSSLISYEEDQRQGAEPRKNFVKPNETKTYFWKVQHHMAPTKDEFDCKAWAYFSDVDLEKDVHSGLIGPLLVCHTNTLNPAHGRQVTVQEFALFFTIFDETKSWYFTENMERNCRAPCNIQMEDPTFKENYRFHAINGYIMDTLPGLVMAQDQRIRWYLLSMGSNENIHSIHFSGHVFTVRKKEEYKMALYNLYPGVFETVEMLPSKAGIWRVECLIGEHLHAGMSTLFLVYSNKCQTPLGMASGHIRDFQITASGQYGQWAPKLARLHYSGSINAWSTKEPFSWIKVDLLAPMIIHGIKTQGARQKFSSLYISQFIIMYSLDGKKWQTYRGNSTGTLMVFFGNVDSSGIKHNIFNPPIIARYIRLHPTHYSIRSTLRMELMGCDLNSCSMPLGMESKAISDAQITASSYFTNMFATWSPSKARLHLQGRSNAWRPQVNNPKEWLQVDFQKTMKVTGVTTQGVKSLLTSMYVKEFLISSSQDGHQWTLFFQNGKVKVFQGNQDSFTPVVNSLDPPLLTRYLRIHPQSWVHQIALRMEVLGCEAQDLY

SEQ ID NO: 2399 - DNA, 4371 bp, synthetic construct
  misc_feature 1..4371: note = Variant of human B-domain deleted Factor VIII
  source 1..4371: mol_type = other DNA
atgcagattgaactgtctacctgcttcttcctctgtttgctgaggttctgctttagcgccactagacggtactaccttggcgctgtggagctgtcctgggactatatgcagagtgatttgggagagcttcccgtcgacgcacgatttcctcctcgcgttccaaagtcatttcccttcaacacaagcgtggtgtacaagaagacgctcttcgtcgaattcaccgatcacctgttcaatatcgccaaacccagaccaccatggatgggtcttttggggcctaccatacaagcggaggtgtatgacacagttgttatcactctcaagaacatggcttctcatccggtaagtcttcacgcagtgggcgtgtcctactggaaagcttcagaaggagccgagtatgatgatcagacatcccagagggagaaagaagacgacaaggtatttccaggtgggtctcatacctatgtgtggcaagtgctcaaagagaatggccctatggcaagcgatccgctctgtttgacttacagctacctttcacacgttgacctcgtcaaggacctcaactccgggttgattggagccttgttggtatgcagggaaggatctcttgccaaagagaagacacagaccctccacaagtttatccttctctttgctgtgttcgatgagggcaaaagttggcatagcgaaacgaagaattccctcatgcaggatcgcgacgcagccagcgccagagcttggcccaagatgcacactgtgaacggatatgtcaataggtcacttcctggcttgattgggtgtcatcggaaaagtgtctactggcacgtgatcggaatggggacaacaccagaggtccactccatatttctcgaaggccataccttccttgttcgaaaccacagacaggcatccttggagatctctcccattacctttctcactgcccaaacgctccttatggacttgggtcagttccttctcttctgccatatcagctcacaccagcatgatggtatggaagcttatgtgaaagtcgacagttgtcctgaggagccacagttgcgcatgaagaataatgaagaagccgaggattacgacgacgatctcaccgattctgagatggacgtggtgaggtttgatgacgacaactctccctccttcattcaaatccggagcgtggcgaagaaacaccccaagacttgggtccactatatagcggcggaagaggaggattgggattacgctcctcttgtattggcaccagatgaccgctcatacaaaagccagtacctcaacaacggaccgcagagaattggccggaagtataagaaagtgcgatttatggcctatacagacgaaacctttaagacaagggaggccatccagcatgagagtgggattttgggacctcttctttacggcgaagttggtgataccctcctcatcatcttcaagaatcaagcttctcgcccctataacatttacccacacgggatcactgacgttaggcctttgtatagcagaagacttcccaaaggcgtgaagcatctcaaagacttccccattttgccaggcgagatctttaagtacaaatggaccgtcacagtggaagatggaccgactaaatcagaccctcgatgccttacgcggtactattcctccttcgtgaatatggagagagatttggcaagcggactcataggaccactcctcatctgttacaaggaatctgtagaccagaggggtaaccagattatgagtgataaacgcaatgtgatcctttttagcgtcttcgacgagaaccggtcctggtacttgaccgagaatatacaaaggttccttcccaaccccgcaggcgttcagttggaagaccctgagtttcaggccagcaatattatgcactcaatcaacggctatgtgtttgatagtctccagctttctgtttgcctccatgaagtagcctattggtacatcttgtcaattggtgctcaaacagacttcctctccgtcttcttctccggctacacctttaagcacaagatggtgtatgaggacactctcacactctttccattttctggagaaaccgtgttcatgagcatggagaatccaggcctttggatcttgggttgccacaacagtgattttcgcaatcggggaatgactgctctcctcaaagtcagcagctgtgataagaacacaggcgactatgatgaagattcttacgaggacataagtgcctacttgttgtccaagaataacgccattgagcccagatcattctcccagaatcctcccgtgcttaaaaggcatcagcgcgaaatcaccagaactactcttcagtctgatcaagaggagattgactatgacgacaccataagcgtggaaatgaagaaggaggatttcgatatctatgacgaagatgagaaccagtctccgcggagctttcagaagaagacgcgacactacttcattgcagcagtcgaaaggctttgggactacggtatgtcatcatcccctcatgtgttgcgcaatagagctcagagtggaagtgttccacagttcaagaaagtcgtctttcaagagtttacagatggcagcttcacacagcctctctatcggggcgagcttaacgaacatttgggactccttggtccctatatccgagccgaagtggaggacaacattatggttacctttaggaatcaagcctctcgcccctacagcttctactcctccctcatcagttatgaggaggatcagagacaaggcgctgaaccacggaagaactttgtgaaaccgaatgagacgaagacctacttctggaaagtacagcaccacatggcccccacaaaagacgaattcgattgcaaagcatgggcgtatttttcagacgttgacttggagaaagatgtacattcaggacttattggtcctttgttggtgtgtcacactaacactctcaatccagcccatggcaggcaggtgacagtccaggaattcgctcttttctttaccatctttgatgagaccaagtcctggtacttcacggaaaacatggagcgcaattgcagagccccctgtaacatacagatggaggaccctacctttaaggaaaattatcggttccacgcaatcaacggatacattatggatacactccctggccttgtgatggctcaggaccaacgaatcaggtggtacctcctcagcatgggttctaatgagaacatacactccattcacttttcaggacatgtgttcactgtccggaagaaagaagagtataagatggccctctacaatttgtatccaggcgtgtttgagaccgttgaaatgcttccctctaaagctggcatctggagagtagagtgcttgatcggagaacatcttcacgcaggtatgagcaccttgttcctcgtgtacagcaacaaatgtcagaccccacttggcatggccagtggacacattcgcgactttcagatcacagcatctggccagtatggacaatgggccccaaagttggctcgcctccattactccggtagcataaatgcgtggtccactaaagaacctttcagctggattaaggtcgatcttcttgcccccatgatcatccacggcattaagacacagggagcgaggcagaaattctcctccctctacatctcacagttcattattatgtatagtttggacggcaagaagtggcaaacttatagaggtaacagtactggaacactcatggtgttcttcggcaacgttgatagctctggcatcaaacacaacatctttaatcctcccataatagctcggtacatcagattgcatccgacccactacagcattaggagtacactccgaatggagcttatgggttgcgacttgaattcctgttcaatgccactcggaatggagtctaaagccatctctgatgcacagataaccgccagtagctactttacgaacatgtttgctacgtggtcaccctctaaggcaaggcttcatttgcaaggccggtctaatgcctggagacctcaggtgaacaacccgaaagaatggctccaggtggactttcagaagaccatgaaagtaacaggtgtcactactcagggagttaagtccttgctcaccagcatgtatgtgaaggagttccttatttcctcatcacaagatggccaccagtggaccctcttctttcagaatggtaaggtcaaagtgtttcagggcaatcaagacagcttcacacccgtggtgaacagtcttgatcctccactcttgacacgataccttcgaatccatccacagtcttgggttcaccagattgcattgcgcatggaagtacttggatgcgaggctcaggacctctac

SEQ ID NO: 2400 - protein, 1457 aa, synthetic construct
  REGION 1..1457: note = Variant of human B-domain deleted Factor VIII
MQIELSTCFFLCLLRFCFSATRRYYLGAVELSWDYMQSDLGELPVDARFPPRVPKSFPFNTSVVYKKTLFVEFTDHLFNIAKPRPPWMGLLGPTIQAEVYDTVVITLKNMASHPVSLHAVGVSYWKASEGAEYDDQTSQREKEDDKVFPGGSHTYVWQVLKENGPMASDPLCLTYSYLSHVDLVKDLNSGLIGALLVCREGSLAKEKTQTLHKFILLFAVFDEGKSWHSETKNSLMQDRDAASARAWPKMHTVNGYVNRSLPGLIGCHRKSVYWHVIGMGTTPEVHSIFLEGHTFLVRNHRQASLEISPITFLTAQTLLMDLGQFLLFCHISSHQHDGMEAYVKVDSCPEEPQLRMKNNEEAEDYDDDLTDSEMDVVRFDDDNSPSFIQIRSVAKKHPKTWVHYIAAEEEDWDYAPLVLAPDDRSYKSQYLNNGPQRIGRKYKKVRFMAYTDETFKTREAIQHESGILGPLLYGEVGDTLLIIFKNQASRPYNIYPHGITDVRPLYSRRLPKGVKHLKDFPILPGEIFKYKWTVTVEDGPTKSDPRCLTRYYSSFVNMERDLASGLIGPLLICYKESVDQRGNQIMSDKRNVILFSVFDENRSWYLTENIQRFLPNPAGVQLEDPEFQASNIMHSINGYVFDSLQLSVCLHEVAYWYILSIGAQTDFLSVFFSGYTFKHKMVYEDTLTLFPFSGETVFMSMENPGLWILGCHNSDFRNRGMTALLKVSSCDKNTGDYDEDSYEDISAYLLSKNNAIEPRSFSQNPPVLKRHQREITRTTLQSDQEEIDYDDTISVEMKKEDFDIYDEDENQSPRSFQKKTRHYFIAAVERLWDYGMSSSPHVLRNRAQSGSVPQFKKVVFQEFTDGSFTQPLYRGELNEHLGLLGPYIRAEVEDNIMVTFRNQASRPYSFYSSLISYEEDQRQGAEPRKNFVKPNETKTYFWKVQHHMAPTKDEFDCKAWAYFSDVDLEKDVHSGLIGPLLVCHTNTLNPAHGRQVTVQEFALFFTIFDETKSWYFTENMERNCRAPCNIQMEDPTFKENYRFHAINGYIMDTLPGLVMAQDQRIRWYLLSMGSNENIHSIHFSGHVFTVRKKEEYKMALYNLYPGVFETVEMLPSKAGIWRVECLIGEHLHAGMSTLFLVYSNKCQTPLGMASGHIRDFQITASGQYGQWAPKLARLHYSGSINAWSTKEPFSWIKVDLLAPMIIHGIKTQGARQKFSSLYISQFIIMYSLDGKKWQTYRGNSTGTLMVFFGNVDSSGIKHNIFNPPIIARYIRLHPTHYSIRSTLRMELMGCDLNSCSMPLGMESKAISDAQITASSYFTNMFATWSPSKARLHLQGRSNAWRPQVNNPKEWLQVDFQKTMKVTGVTTQGVKSLLTSMYVKEFLISSSQDGHQWTLFFQNGKVKVFQGNQDSFTPVVNSLDPPLLTRYLRIHPQSWVHQIALRMEVLGCEAQDLY

SEQ ID NO: 2401 - DNA, 4371 bp, synthetic construct
  misc_feature 1..4371: note = Variant of human B-domain deleted Factor VIII
  source 1..4371: mol_type = other DNA
atgcagattgaactgtctacctgcttcttcctctgtttgctgaggttctgctttagcgccactagacggtactaccttggcgctgtggagctgtcctgggactatatgcagagtgatttgggagagcttcccgtcgacgcacgatttcctcctcgcgttccaaagtcatttcccttcaacacaagcgtggtgtacaagaagacgctcttcgtcgaattcaccgatcacctgttcaatatcgccaaacccagaccaccatggatgggtcttttggggcctaccatacaagcggaggtgtatgacacagttgttatcactctcaagaacatggcttctcatccggtaagtcttcacgcagtgggcgtgtcctactggaaagcttcagaaggagccgagtatgatgatcagacatcccagagggagaaagaagacgacaaggtatttccaggtgggtctcatacctatgtgtggcaagtgctcaaagagaatggccctatggcaagcgatccgctctgtttgacttacagctacctttcacacgttgacctcgtcaaggacctcaactccgggttgattggagccttgttggtatgcagggaaggatctcttgccaaagagaagacacagaccctccacaagtttatccttctctttgctgtgttcgatgagggcaaaagttggcatagcgaaacgaagaattccctcatgcaggatcgcgacgcagccagcgccagagcttggcccaagatgcacactgtgaacggatatgtcaataggtcacttcctggcttgattgggtgtcatcggaaaagtgtctactggcacgtgatcggaatggggacaacaccagaggtccactccatatttctcgaaggccataccttccttgttcgaaaccacagacaggcatccttggagatctctcccattacctttctcactgcccaaacgctccttatggacttgggtcagttccttctcttctgccatatcagctcacaccagcatgatggtatggaagcttatgtgaaagtcgacagttgtcctgaggagccacagttgcgcatgaagaataatgaagaagccgaggattacgacgacgatctcaccgattctgagatggacgtggtgaggtttgatgacgacaactctccctccttcattcaaatccggagcgtggcgaagaaacaccccaagacttgggtccactatatagcggcggaagaggaggattgggattacgctcctcttgtattggcaccagatgaccgctcatacaaaagccagtacctcaacaacggaccgcagagaattggccggaagtataagaaagtgcgatttatggcctatacagacgaaacctttaagacaagggaggccatccagcatgagagtgggattttgggacctcttctttacggcgaagttggtgataccctcctcatcatcttcaagaatcaagcttctcgcccctataacatttacccacacgggatcactgacgttaggcctttgtatagcagaagacttcccaaaggcgtgaagcatctcaaagacttccccattttgccaggcgagatctttaagtacaaatggaccgtcacagtggaagatggaccgactaaatcagaccctcgatgccttacgcggtactattcctccttcgtgaatatggagagagatttggcaagcggactcataggaccactcctcatctgttacaaggaatctgtagaccagaggggtaaccagattatgagtgataaacgcaatgtgatcctttttagcgtcttcgacgagaaccggtcctggtacttgaccgagaatatacaaaggttccttcccaaccccgcaggcgttcagttggaagaccctgagtttcaggccagcaatattatgcactcaatcaacggctatgtgtttgatagtctccagctttctgtttgcctccatgaagtagcctattggtacatcttgtcaattggtgctcaaacagacttcctctccgtcttcttctccggctacacctttaagcacaagatggtgtatgaggacactctcacactctttccattttctggagaaaccgtgttcatggtgatggagaatccaggcctttggatcttgggttgccacaacagtgattttcgcaatcggggaatgactgctctcctcaaagtcagcagctgtgataagaacacaggcgactattacgaagattcttacgaggacataagtgcctacttgttgtccaagaataacgccattgagcccagatcattctcccagaatcctccagtgcttaaaaggcatcagcgcgaaatcaccagaactactcttcagtctgatcaagaggagattgactatgacgacaccataagcgtggaaatgaagaaggaggatttcgatatctatgacgaagatgagaaccagtctccgcggagctttcagaagaagacgcgacactacttcattgcagcagtcgaaaggctttgggactacggtatgtcatcatcccctcatgtgttgcgcaatagagctcagagtggaagtgttccacagttcaagaaagtcgtctttcaagagtttacagatggcagcttcacacagcctctctatcggggcgagcttaacgaacatttgggactccttggtccctatatccgagccgaagtggaggacaacattatggttacctttaggaatcaagcctctcgcccctacagcttctactcctccctcatcagttatgaggaggatcagagacaaggcgctgaaccacggaagaactttgtgaaaccgaatgagacgaagacctacttctggaaagtacagcaccacatggcccccacaaaagacgaattcgattgcaaagcatgggcgtatttttcagacgttgacttggagaaagatgtacattcaggacttattggtcctttgttggtgtgtcacactaacactctcaatccagcccatggcaggcaggtgacagtccaggaattcgctcttttctttaccatctttgatgagaccaagtcctggtacttcacggaaaacatggagcgcaattgcagagccccctgtaacatacagatggaggaccctacctttaaggaaaattatcggttccacgcaatcaacggatacattatggatacactccctggccttgtgatggctcaggaccaacgaatcaggtggtacctcctcagcatgggttctaatgagaacatacactccattcacttttcaggacatgtgttcactgtccggaagaaagaagagtataagatggccctctacaatttgtatccaggcgtgtttgagaccgttgaaatgcttccctctaaagctggcatctggagagtagagtgcttgatcggagaacatcttcacgcaggtatgagcaccttgttcctcgtgtacagcaacaaatgtcagaccccacttggcatggccagtggacacattcgcgactttcagatcacagcatctggccagtatggacaatgggccccaaagttggctcgcctccattactccggtagcataaatgcgtggtccactaaagaacctttcagctggattaaggtcgatcttcttgcccccatgatcatccacggcattaagacacagggagcgaggcagaaattctcctccctctacatctcacagttcattattatgtatagtttggacggcaagaagtggcaaacttatagaggtaacagtactggaacactcatggtgttcttcggcaacgttgatagctctggcatcaaacacaacatctttaatcctcccataatagctcggtacatcagattgcatccgacccactacagcattaggagtacactccgaatggagcttatgggttgcgacttgaattcctgttcaatgccactcggaatggagtctaaagccatctctgatgcacagataaccgccagtagctactttacgaacatgtttgctacgtggtcaccctctaaggcaaggcttcatttgcaaggccggtctaatgcctggagacctcaggtgaacaacccgaaagaatggctccaggtggactttcagaagaccatgaaagtaacaggtgtcactactcagggagttaagtccttgctcaccagcatgtatgtgaaggagttccttatttcctcatcacaagatggccaccagtggaccctcttctttcagaatggtaaggtcaaagtgtttcagggcaatcaagacagcttcacacccgtggtgaacagtcttgatcctccactcttgacacgataccttcgaatccatccacagtcttgggttcaccagattgcattgcgcatggaagtacttggatgcgaggctcaggacctctac

SEQ ID NO: 2402 - protein, 1457 aa, synthetic construct
  REGION 1..1457: note = Variant of human B-domain deleted Factor VIII
MQIELSTCFFLCLLRFCFSATRRYYLGAVELSWDYMQSDLGELPVDARFPPRVPKSFPFNTSVVYKKTLFVEFTDHLFNIAKPRPPWMGLLGPTIQAEVYDTVVITLKNMASHPVSLHAVGVSYWKASEGAEYDDQTSQREKEDDKVFPGGSHTYVWQVLKENGPMASDPLCLTYSYLSHVDLVKDLNSGLIGALLVCREGSLAKEKTQTLHKFILLFAVFDEGKSWHSETKNSLMQDRDAASARAWPKMHTVNGYVNRSLPGLIGCHRKSVYWHVIGMGTTPEVHSIFLEGHTFLVRNHRQASLEISPITFLTAQTLLMDLGQFLLFCHISSHQHDGMEAYVKVDSCPEEPQLRMKNNEEAEDYDDDLTDSEMDVVRFDDDNSPSFIQIRSVAKKHPKTWVHYIAAEEEDWDYAPLVLAPDDRSYKSQYLNNGPQRIGRKYKKVRFMAYTDETFKTREAIQHESGILGPLLYGEVGDTLLIIFKNQASRPYNIYPHGITDVRPLYSRRLPKGVKHLKDFPILPGEIFKYKWTVTVEDGPTKSDPRCLTRYYSSFVNMERDLASGLIGPLLICYKESVDQRGNQIMSDKRNVILFSVFDENRSWYLTENIQRFLPNPAGVQLEDPEFQASNIMHSINGYVFDSLQLSVCLHEVAYWYILSIGAQTDFLSVFFSGYTFKHKMVYEDTLTLFPFSGETVFMVMENPGLWILGCHNSDFRNRGMTALLKVSSCDKNTGDYYEDSYEDISAYLLSKNNAIEPRSFSQNPPVLKRHQREITRTTLQSDQEEIDYDDTISVEMKKEDFDIYDEDENQSPRSFQKKTRHYFIAAVERLWDYGMSSSPHVLRNRAQSGSVPQFKKVVFQEFTDGSFTQPLYRGELNEHLGLLGPYIRAEVEDNIMVTFRNQASRPYSFYSSLISYEEDQRQGAEPRKNFVKPNETKTYFWKVQHHMAPTKDEFDCKAWAYFSDVDLEKDVHSGLIGPLLVCHTNTLNPAHGRQVTVQEFALFFTIFDETKSWYFTENMERNCRAPCNIQMEDPTFKENYRFHAINGYIMDTLPGLVMAQDQRIRWYLLSMGSNENIHSIHFSGHVFTVRKKEEYKMALYNLYPGVFETVEMLPSKAGIWRVECLIGEHLHAGMSTLFLVYSNKCQTPLGMASGHIRDFQITASGQYGQWAPKLARLHYSGSINAWSTKEPFSWIKVDLLAPMIIHGIKTQGARQKFSSLYISQFIIMYSLDGKKWQTYRGNSTGTLMVFFGNVDSSGIKHNIFNPPIIARYIRLHPTHYSIRSTLRMELMGCDLNSCSMPLGMESKAISDAQITASSYFTNMFATWSPSKARLHLQGRSNAWRPQVNNPKEWLQVDFQKTMKVTGVTTQGVKSLLTSMYVKEFLISSSQDGHQWTLFFQNGKVKVFQGNQDSFTPVVNSLDPPLLTRYLRIHPQSWVHQIALRMEVLGCEAQDLY

SEQ ID NO: 2403 - DNA, 4371 bp, synthetic construct
  misc_feature 1..4371: note = Variant of human B-domain deleted Factor VIII
  source 1..4371: mol_type = other DNA
atgcagattgaactgtctacctgcttcttcctctgtttgctgaggttctgctttagcgccactagacggtactaccttggcgctgtggagctgtcctgggactatatgcagagtgatttgggagagcttcccgtcgacgcacgatttcctcctcgcgttccaaagtcatttcccttcaacacaagcgtggtgtacaagaagacgctcttcgtcgaattcaccgatcacctgttcaatatcgccaaacccagaccaccatggatgggtcttttggggcctaccatacaagcggaggtgtatgacacagttgttatcactctcaagaacatggcttctcatccggtaagtcttcacgcagtgggcgtgtcctactggaaagcttcagaaggagccgagtatgatgatcagacatcccagagggagaaagaagacgacaaggtatttccaggtgggtctcatacctatgtgtggcaagtgctcaaagagaatggccctatggcaagcgatccgctctgtttgacttacagctacctttcacacgttgacctcgtcaaggacctcaactccgggttgattggagccttgttggtatgcagggaaggatctcttgccaaagagaagacacagaccctccacaagtttatccttctctttgctgtgttcgatgagggcaaaagttggcatagcgaaacgaagaattccctcatgcaggatcgcgacgcagccagcgccagagcttggcccaagatgcacactgtgaacggatatgtcaataggtcacttcctggcttgattgggtgtcatcggaaaagtgtctactggcacgtgatcggaatggggacaacaccagaggtccactccatatttctcgaaggccataccttccttgttcgaaaccacagacaggcatccttggagatctctcccattacctttctcactgcccaaacgctccttatggacttgggtcagttccttctcttctgccatatcagctcacaccagcatgatggtatggaagcttatgtgaaagtcgacagttgtcctgaggagccacagttgcgcatgaagaataatgaagaagccgaggattacgacgacgatctcaccgattctgagatggacgtggtgaggtttgatgacgacaactctccctccttcattcaaatccggagcgtggcgaagaaacaccccaagacttgggtccactatatagcggcggaagaggaggattgggattacgctcctcttgtattggcaccagatgaccgctcatacaaaagccagtacctcaacaacggaccgcagagaattggccggaagtataagaaagtgcgatttatggcctatacagacgaaacctttaagacaagggaggccatccagcatgagagtgggattttgggacctcttctttacggcgaagttggtgataccctcctcatcatcttcaagaatcaagcttctcgcccctataacatttacccacacgggatcactgacgttaggcctttgtatagcagaagacttcccaaaggcgtgaagcatctcaaagacttccccattttgccaggcgagatctttaagtacaaatggaccgtcacagtggaagatggaccgactaaatcagaccctcgatgccttacgcggtactattcctccttcgtgaatatggagagagatttggcaagcggactcataggaccactcctcatctgttacaaggaatctgtagaccagaggggtaaccagattatgagtgataaacgcaatgtgatcctttttagcgtcttcgacgagaaccggtcctggtacttgaccgagaatatacaaaggttccttcccaaccccgcaggcgttcagttggaagaccctgagtttcaggccagcaatattatgcactcaatcaacggctatgtgtttgatagtctccagctttctgtttgcctccatgaagtagcctattggtacatcttgtcaattggtgctcaaacagacttcctctccgtcttcttctccggctacacctttaagcacaagatggtgtatgaggacactctcacactctttccattttctggagaaaccgtgttcatgagcatggagaatccaggcctttggatcttgggttgccacaacagtgattttcgcaatcggggaatgactgctctcctcaaagtcagcagctgtgataagaacacaggcgactattacgaagattcttacgaggacataagtgcctacttgttgtccaagaataacgccattgagcccagatcattctcccagaatcctcccgtgcttaaaaggcatcagcgcgaaatcaccagaactactcttcagtctgatcaagaggagattgactatgacgacaccataagcgtggaaatgaagaaggaggatttcgatatctatgacgaagatgagaaccagtctccgcggagctttcagaagaagacgcgacactacttcattgcagcagtcgaaaggctttgggactacggtatgtcatcatcccctcatgtgttgcgcaatagagctcagagtggaagtgttccacagttcaagaaagtcgtctttcaagagtttacagatggcagcttcacacagcctctctatcggggcgagcttaacgaacatttgggactccttggtccctatatccgagccgaagtggaggacaacattatggttacctttaggaatcaagcctctcgcccctacagcttctactcctccctcatcagttatgaggaggatcagagacaaggcgctgaaccacggaagaactttgtgaaaccgaatgagacgaagacctacttctggaaagtacagcaccacatggcccccacaaaagacgaattcgattgcaaagcatgggcgtatttttcagacgttgacttggagaaagatgtacattcaggacttattggtcctttgttggtgtgtcacactaacactctcaatccagcccatggcaggcaggtgacagtccaggaattcgctcttttctttaccatctttgatgagaccaagtcctggtacttcacggaaaacatggagcgcaattgcagagccccctgtaacatacagatggaggaccctacctttaaggaaaattatcggttccacgcaatcaacggatacattatggatacactccctggccttgtgatggctcaggaccaacgaatcaggtggtacctcctcagcatgggttctaatgagaacatacactccattcacttttcaggacatgtgttcactgtccggaagaaagaagagtataagatggccctctacaatttgtatccaggcgtgtttgagaccgttgaaatgcttccctctaaagctggcatctggagagtagagtgcttgatcggagaacatcttcacgcaggtatgagcaccttgttcctcgtgtacagcaacaaatgtcagaccccacttggcatggccagtggacacattcgcgactttcagatcacagcatctggccagtatggacaatgggccccaaagttggctcgcctccattactccggtagcataaatgcgtggtccactaaagaacctttcagctggattaaggtcgatcttcttgcccccatgatcatccacggcattaagacacagggagcgaggcagaaattctcctccctctacatctcacagttcattattatgtatagtttggacggcaagaagtggcaaacttatagaggtaacagtactggaacactcatggtgttcttcggcaacgttgatagctctggcatcaaacacaacatctttaatcctcccataatagctcggtacatcagattgcatccgacccactacagcattaggagtacactccgaatggagcttatgggttgcgacttgaattcctgttcaatgccactcggaatggagtctaaagccatctctgatgcacagataaccgccagtagctactttacgaacatgtttgctacgtggtcaccctctaaggcaaggcttcatttgcaaggccggtctaatgcctggagacctcaggtgaacaacccgaaagaatggctccaggtggactttcagaagaccatgaaagtaacaggtgtcactactcagggagttaagtccttgctcaccagcatgtatgtgaaggagttccttatttcctcatcacaagatggccaccagtggaccctcttctttcagaatggtaaggtcaaagtgtttcagggcaatcaagacccgttcacacccgtggtgaacagtcttgatcctccactcttgacacgataccttcgaatccatccacagtcttgggttcaccagattgcattgcgcatggaagtacttggatgcgaggctcaggacctctac

SEQ ID NO: 2404 - protein, 1457 aa, synthetic construct
  REGION 1..1457: note = Variant of human B-domain deleted Factor VIII
MQIELSTCFFLCLLRFCFSATRRYYLGAVELSWDYMQSDLGELPVDARFPPRVPKSFPFNTSVVYKKTLFVEFTDHLFNIAKPRPPWMGLLGPTIQAEVYDTVVITLKNMASHPVSLHAVGVSYWKASEGAEYDDQTSQREKEDDKVFPGGSHTYVWQVLKENGPMASDPLCLTYSYLSHVDLVKDLNSGLIGALLVCREGSLAKEKTQTLHKFILLFAVFDEGKSWHSETKNSLMQDRDAASARAWPKMHTVNGYVNRSLPGLIGCHRKSVYWHVIGMGTTPEVHSIFLEGHTFLVRNHRQASLEISPITFLTAQTLLMDLGQFLLFCHISSHQHDGMEAYVKVDSCPEEPQLRMKNNEEAEDYDDDLTDSEMDVVRFDDDNSPSFIQIRSVAKKHPKTWVHYIAAEEEDWDYAPLVLAPDDRSYKSQYLNNGPQRIGRKYKKVRFMAYTDETFKTREAIQHESGILGPLLYGEVGDTLLIIFKNQASRPYNIYPHGITDVRPLYSRRLPKGVKHLKDFPILPGEIFKYKWTVTVEDGPTKSDPRCLTRYYSSFVNMERDLASGLIGPLLICYKESVDQRGNQIMSDKRNVILFSVFDENRSWYLTENIQRFLPNPAGVQLEDPEFQASNIMHSINGYVFDSLQLSVCLHEVAYWYILSIGAQTDFLSVFFSGYTFKHKMVYEDTLTLFPFSGETVFMSMENPGLWILGCHNSDFRNRGMTALLKVSSCDKNTGDYYEDSYEDISAYLLSKNNAIEPRSFSQNPPVLKRHQREITRTTLQSDQEEIDYDDTISVEMKKEDFDIYDEDENQSPRSFQKKTRHYFIAAVERLWDYGMSSSPHVLRNRAQSGSVPQFKKVVFQEFTDGSFTQPLYRGELNEHLGLLGPYIRAEVEDNIMVTFRNQASRPYSFYSSLISYEEDQRQGAEPRKNFVKPNETKTYFWKVQHHMAPTKDEFDCKAWAYFSDVDLEKDVHSGLIGPLLVCHTNTLNPAHGRQVTVQEFALFFTIFDETKSWYFTENMERNCRAPCNIQMEDPTFKENYRFHAINGYIMDTLPGLVMAQDQRIRWYLLSMGSNENIHSIHFSGHVFTVRKKEEYKMALYNLYPGVFETVEMLPSKAGIWRVECLIGEHLHAGMSTLFLVYSNKCQTPLGMASGHIRDFQITASGQYGQWAPKLARLHYSGSINAWSTKEPFSWIKVDLLAPMIIHGIKTQGARQKFSSLYISQFIIMYSLDGKKWQTYRGNSTGTLMVFFGNVDSSGIKHNIFNPPIIARYIRLHPTHYSIRSTLRMELMGCDLNSCSMPLGMESKAISDAQITASSYFTNMFATWSPSKARLHLQGRSNAWRPQVNNPKEWLQVDFQKTMKVTGVTTQGVKSLLTSMYVKEFLISSSQDGHQWTLFFQNGKVKVFQGNQDPFTPVVNSLDPPLLTRYLRIHPQSWVHQIALRMEVLGCEAQDLY

SEQ ID NO: 2405 - DNA, 4371 bp, synthetic construct
  misc_feature 1..4371: note = Variant of human B-domain deleted Factor VIII
  source 1..4371: mol_type = other DNA
atgcagattgaactgtctacctgcttcttcctctgtttgctgaggttctgctttagcgccactagacggtactaccttggcgctgtggagctgtcctgggactatatgcagagtgatttgggagagcttcccgtcgacgcacgatttcctcctcgcgttccaaagtcatttcccttcaacacaagcgtggtgtacaagaagacgctcttcgtcgaattcaccgatcacctgttcaatatcgccaaacccagaccaccatggatgggtcttttggggcctaccatacaagcggaggtgtatgacacagttgttatcactctcaagaacatggcttctcatccggtaagtcttcacgcagtgggcgtgtcctactggaaagcttcagaaggagccgagtatgatgatcagacatcccagagggagaaagaagacgacaaggtatttccaggtgggtctcatacctatgtgtggcaagtgctcaaagagaatggccctatggcaagcgatccgctctgtttgacttacagctacctttcacacgttgacctcgtcaaggacctcaactccgggttgattggagccttgttggtatgcagggaaggatctcttgccaaagagaagacacagaccctccacaagtttatccttctctttgctgtgttcgatgagggcaaaagttggcatagcgaaacgaagaattccctcatgcaggatcgcgacgcagccagcgccagagcttggcccaagatgcacactgtgaacggatatgtcaataggtcacttcctggcttgattgggtgtcatcggaaaagtgtctactggcacgtgatcggaatggggacaacaccagaggtccactccatatttctcgaaggccataccttccttgttcgaaaccacagacaggcatccttggagatctctcccattacctttctcactgcccaaacgctccttatggacttgggtcagttccttctcttctgccatatcagctcacaccagcatgatggtatggaagcttatgtgaaagtcgacagttgtcctgaggagccacagttgcgcatgaagaataatgaagaagccgaggattacgacgacgatctcaccgattctgagatggacgtggtgaggtttgatgacgacaactctccctccttcattcaaatccggagcgtggcgaagaaacaccccaagacttgggtccactatatagcggcggaagaggaggattgggattacgctcctcttgtattggcaccagatgaccgctcatacaaaagccagtacctcaacaacggaccgcagagaattggccggaagtataagaaagtgcgatttatggcctatacagacgaaacctttaagacaagggaggccatccagcatgagagtgggattttgggacctcttctttacggcgaagttggtgataccctcctcatcatcttcaagaatcaagcttctcgcccctataacatttacccacacgggatcactgacgttaggcctttgtatagcagaagacttcccaaaggcgtgaagcatctcaaagacttccccattttgccaggcgagatctttaagtacaaatggaccgtcacagtggaagatggaccgactaaatcagaccctcgatgccttacgcggtactattcctccttcgtgaatatggagagagatttggcaagcggactcataggaccactcctcatctgttacaaggaatctgtagaccagaggggtaaccagattatgagtgataaacgcaatgtgatcctttttagcgtcttcgacgagaaccggtcctggtacttgaccgagaatatacaaaggttccttcccaaccccgcaggcgttcagttggaagaccctgagtttcaggccagcaatattatgcactcaatcaacggctatgtgtttgatagtctccagctttctgtttgcctccatgaagtagcctattggtacatcttgtcaattggtgctcaaacagacttcctctccgtcttcttctccggctacacctttaagcacaagatggtgtatgaggacactctcacactctttccattttctggagaaaccgtgttcatgagcatggagaatccaggcctttggatcttgggttgccacaacagtgattttcgcaatcggggaatgactgctctcctcaaagtcagcagctgtgataagaacacaggcgactattacgaagattcttacgaggacataagtgcctacttgttgtccaagaataacgccattgagcccagatcattctcccagaatcctcccgtgcttaaaaggcatcagcgcgaaatcaccagaactactcttcagtctgatcaagaggagattgactatgacgacaccataagcgtggaaatgaagaaggaggatttcgatatctatgacgaagatgagaaccagtctccgcggagctttcagaagaagacgcgacactacttcattgcagcagtcgaaaggctttgggactacggtatgtcatcatcccctcatgtgttgcgcaatagagctcagagtggaagtgttccacagttcaagaaagtcgtctttcaagagtttacagatggcagcttcacacagcctctctatcggggcgagcttaacgaacatttgggactccttggtccctatatccgagccgaagtggaggacaacattatggttacctttaggaatcaagcctctcgcccctacagcttctactcctccctcatcagttatgaggaggatcagagacaaggcgctgaaccacggaagaactttgtgaaaccgaatgagacgaagacctacttctggaaagtacagcaccacatggcccccacaaaagacgaattcgattgcaaagcatgggcgtatttttcagacgttgacttggagaaagatgtacattcaggacttattggtcctttgttggtgtgtcacactaacactctcaatccagcccatggcaggcaggtgacagtccaggaattcgctcttttctttaccatctttgatgagaccaagtcctggtacttcacggaaaacatggagcgcaattgcagagccccctgtaacatacagatggaggaccctacctttaaggaaaattatcggttccacgcaatcaacggatacattatggatacactccctggccttgtgatggctcaggaccaacgaatcaggtggtacctcctcagcatgggttctaatgagaacatacactccattcacttttcaggacatgtgttcactgtccggaagccggaagagtataagatggccctctacaatttgtatccaggcgtgtttgagaccgttgaaatgcttccctctaaagctggcatctggagagtagagtgcttgatcggagaacatcttcacgcaggtatgagcaccttgttcctcgtgtacagcaacaaatgtcagaccccacttggcatggccagtggacacattcgcgactttcagatcacagcatctggccagtatggacaatgggccccaaagttggctcgcctccattactccggtagcataaatgcgtggtccactaaagaacctttcagctggattaaggtcgatcttcttgcccccatgatcatccacggcattaagacacagggagcgaggcagaaattctcctccctctacatctcacagttcattattatgtatagtttggacggcaagaagtggcaaacttatagaggtaacagtactggaacactcatggtgttcttcggcaacgttgatagctctggcatcaaacacaacatctttaatcctcccataatagctcggtacatcagattgcatccgacccactacagcattaggagtacactccgaatggagcttatgggttgcgacttgaattcctgttcaatgccactcggaatggagtctaaagccatctctgatgcacagataaccgccagtagctactttacgaacatgtttgctacgtggtcaccctctaaggcaaggcttcatttgcaaggccggtctaatgcctggagacctcaggtgaacaacccgaaagaatggctccaggtggactttcagaagaccatgaaagtaacaggtgtcactactcagggagttaagtccttgctcaccagcatgtatgtgaaggagttccttatttcctcatcacaagatggccaccagtggaccctcttctttcagaatggtaaggtcaaagtgtttcagggcaatcaagacagcttcacacccgtggtgaacagtcttgatcctccactcttgacacgataccttcgaatccatccacagtcttgggttcaccagattgcattgcgcatggaagtacttggatgcgaggctcaggacctctac

SEQ ID NO: 2406 - protein, 1457 aa, synthetic construct
  REGION 1..1457: note = Variant of human B-domain deleted Factor VIII
MQIELSTCFFLCLLRFCFSATRRYYLGAVELSWDYMQSDLGELPVDARFPPRVPKSFPFNTSVVYKKTLFVEFTDHLFNIAKPRPPWMGLLGPTIQAEVYDTVVITLKNMASHPVSLHAVGVSYWKASEGAEYDDQTSQREKEDDKVFPGGSHTYVWQVLKENGPMASDPLCLTYSYLSHVDLVKDLNSGLIGALLVCREGSLAKEKTQTLHKFILLFAVFDEGKSWHSETKNSLMQDRDAASARAWPKMHTVNGYVNRSLPGLIGCHRKSVYWHVIGMGTTPEVHSIFLEGHTFLVRNHRQASLEISPITFLTAQTLLMDLGQFLLFCHISSHQHDGMEAYVKVDSCPEEPQLRMKNNEEAEDYDDDLTDSEMDVVRFDDDNSPSFIQIRSVAKKHPKTWVHYIAAEEEDWDYAPLVLAPDDRSYKSQYLNNGPQRIGRKYKKVRFMAYTDETFKTREAIQHESGILGPLLYGEVGDTLLIIFKNQASRPYNIYPHGITDVRPLYSRRLPKGVKHLKDFPILPGEIFKYKWTVTVEDGPTKSDPRCLTRYYSSFVNMERDLASGLIGPLLICYKESVDQRGNQIMSDKRNVILFSVFDENRSWYLTENIQRFLPNPAGVQLEDPEFQASNIMHSINGYVFDSLQLSVCLHEVAYWYILSIGAQTDFLSVFFSGYTFKHKMVYEDTLTLFPFSGETVFMSMENPGLWILGCHNSDFRNRGMTALLKVSSCDKNTGDYYEDSYEDISAYLLSKNNAIEPRSFSQNPPVLKRHQREITRTTLQSDQEEIDYDDTISVEMKKEDFDIYDEDENQSPRSFQKKTRHYFIAAVERLWDYGMSSSPHVLRNRAQSGSVPQFKKVVFQEFTDGSFTQPLYRGELNEHLGLLGPYIRAEVEDNIMVTFRNQASRPYSFYSSLISYEEDQRQGAEPRKNFVKPNETKTYFWKVQHHMAPTKDEFDCKAWAYFSDVDLEKDVHSGLIGPLLVCHTNTLNPAHGRQVTVQEFALFFTIFDETKSWYFTENMERNCRAPCNIQMEDPTFKENYRFHAINGYIMDTLPGLVMAQDQRIRWYLLSMGSNENIHSIHFSGHVFTVRKPEEYKMALYNLYPGVFETVEMLPSKAGIWRVECLIGEHLHAGMSTLFLVYSNKCQTPLGMASGHIRDFQITASGQYGQWAPKLARLHYSGSINAWSTKEPFSWIKVDLLAPMIIHGIKTQGARQKFSSLYISQFIIMYSLDGKKWQTYRGNSTGTLMVFFGNVDSSGIKHNIFNPPIIARYIRLHPTHYSIRSTLRMELMGCDLNSCSMPLGMESKAISDAQITASSYFTNMFATWSPSKARLHLQGRSNAWRPQVNNPKEWLQVDFQKTMKVTGVTTQGVKSLLTSMYVKEFLISSSQDGHQWTLFFQNGKVKVFQGNQDSFTPVVNSLDPPLLTRYLRIHPQSWVHQIALRMEVLGCEAQDLY

SEQ ID NO: 2407 - DNA, 4371 bp, synthetic construct
  misc_feature 1..4371: note = Variant of human B-domain deleted Factor VIII
  source 1..4371: mol_type = other DNA
atgcagattgaactgtctacctgcttcttcctctgtttgctgaggttctgctttagcgccactagacggtactaccttggcgctgtggagctgtcctgggactatatgcagagtgatttgggagagcttcccgtcgacgcacgatttcctcctcgcgttccaaagtcatttcccttcaacacaagcgtggtgtacaagaagacgctcttcgtcgaattcaccgatcacctgttcaatatcgccaaacccagaccaccatggatgggtcttttggggcctaccatacaagcggaggtgtatgacacagttgttatcactctcaagaacatggcttctcatccggtaagtcttcacgcagtgggcgtgtcctactggaaagcttcagaaggagccgagtatgatgatcagacatcccagagggagaaagaagacgacaaggtatttccaggtgggtctcatacctatgtgtggcaagtgctcaaagagaatggccctatggcaagcgatccgctctgtttgacttacagctacctttcacacgttgacctcgtcaaggacctcaactccgggttgattggagccttgttggtatgcagggaaggatctcttgccaaagagaagacacagaccctccacaagtttatccttctctttgctgtgttcgatgagggcaaaagttggcatagcgaaacgaagaattccctcatgcaggatcgcgacgcagccagcgccagagcttggcccaagatgcacactgtgaacggatatgtcaataggtcacttcctggcttgattgggtgtcatcggaaaagtgtctactggcacgtgatcggaatggggacaacaccagaggtccactccatatttctcgaaggccataccttccttgttcgaaaccacagacaggcatccttggagatctctcccattacctttctcactgcccaaacgctccttatggacttgggtcagttccttctcttctgccatatcagctcacaccagcatgatggtatggaagcttatgtgaaagtcgacagttgtcctgaggagccacagttgcgcatgaagaataatgaagaagccgaggattacgacgacgatctcaccgattctgagatggacgtggtgaggtttgatgacgacaactctccctccttcattcaaatccggagcgtggcgaagaaacaccccaagacttgggtccactatatagcggcggaagaggaggattgggattacgctcctcttgtattggcaccagatgaccgctcatacaaaagccagtacctcaacaacggaccgcagagaattggccggaagtataagaaagtgcgatttatggcctatacagacgaaacctttaagacaagggaggccatccagcatgagagtgggattttgggacctcttctttacggcgaagttggtgataccctcctcatcatcttcaagaatcaagcttctcgcccctataacatttacccacacgggatcactgacgttaggcctttgtatagcagaagacttcccaaaggcgtgaagcatctcaaagacttccccattttgccaggcgagatctttaagtacaaatggaccgtcacagtggaagatggaccgactaaatcagaccctcgatgccttacgcggtactattcctccttcgtgaatatggagagagatttggcaagcggactcataggaccactcctcatctgttacaaggaatctgtagaccagaggggtaaccagattatgagtgataaacgcaatgtgatcctttttagcgtcttcgacgagaaccggtcctggtacttgaccgagaatatacaaaggttccttcccaaccccgcaggcgttcagttggaagaccctgagtttcaggccagcaatattatgcactcaatcaacggctatgtgtttgatagtctccagctttctgtttgcctccatgaagtagcctattggtacatcttgtcaattggtgctcaaacagacttcctctccgtcttcttctccggctacacctttaagcacaagatggtgtatgaggacactctcacactctttccattttctggagaaaccgtgttcatgagcatggagaatccaggcctttggatcttgggttgccacaacagtgattttcgcaatcggggaatgactgctctcctcaaagtcagcagctgtgataagaacacaggcgactattacgaagattcttacgaggacataagtgcctacgatttgtccaagaataacgccattgagcccagatcattctcccagaatcctcccgtgcttaaaaggcatcagcgcgaaatcaccagaactactcttcagtctgatcaagaggagattgactatgacgacaccataagcgtggaaatgaagaaggaggatttcgatatctatgacgaagatgagaaccagtctccgcggagctttcagaagaagacgcgacactacttcattgcagcagtcgaaaggctttgggactacggtatgtcatcatcccctcatgtgttgcgcaatagagctcagagtggaagtgttccacagttcaagaaagtcgtctttcaagagtttacagatggcagcttcacacagcctctctatcggggcgagcttaacgaacatttgggactccttggtccctatatccgagccgaagtggaggacaacattatggttacctttaggaatcaagcctctcgcccctacagcttctactcctccctcatcagttatgaggaggatcagagacaaggcgctgaaccacggaagaactttgtgaaaccgaatgagacgaagacctacttctggaaagtacagcaccacatggcccccacaaaagacgaattcgattgcaaagcatgggcgtatttttcagacgttgacttggagaaagatgtacattcaggacttattggtcctttgttggtgtgtcacactaacactctcaatccagcccatggcaggcaggtgacagtccaggaattcgctcttttctttaccatctttgatgagaccaagtcctggtacttcacggaaaacatggagcgcaattgcagagccccctgtaacatacagatggaggaccctacctttaaggaaaattatcggttccacgcaatcaacggatacattatggatacactccctggccttgtgatggctcaggaccaacgaatcaggtggtacctcctcagcatgggttctaatgagaacatacactccattcacttttcaggacatgtgttcactgtccggaagaaagaagagtataagatggccctctacaatttgtatccaggcgtgtttgagaccgttgaaatgcttccctctaaagctggcatctggagagtagagtgcttgatcggagaacatcttcacgcaggtatgagcaccttgttcctcgtgtacagcaacaaatgtcagaccccacttggcatggccagtggacacattcgcgactttcagatcacagcatctggccagtatggacaatgggccccaaagttggctcgcctccattactccggtagcataaatgcgtggtccactaaagaacctttcagctggattaaggtcgatcttcttgcccccatgatcatccacggcattaagacacagggagcgaggcagaaattctcctccctctacatctcacagttcattattatgtatagtttggacggcaagaagtggcaaacttatagaggtaacagtactggaacactcatggtgttcttcggcaacgttgatagctctggcatcaaacacaacatctttaatcctcccataatagctcggtacatcagattgcatccgacccactacagcattaggagtacactccgaatggagcttatgggttgcgacttgaattcctgttcaatgccactcggaatggagtctaaagccatctctgatgcacagataaccgccagtagctactttacgaacatgtttgctacgtggtcaccctctaaggcaaggcttcatttgcaaggccggtctaatgcctggagacctcaggtgaacaacccgaaagaatggctccaggtggactttcagaagaccatgaaagtaacaggtgtcactactcagggagttaagtccttgctcaccagcatgtatgtgaaggagttccttatttcctcatcacaagatggccaccagtggaccctcttctttcagaatggtaaggtcaaagtgtttcagggcaatcaagacagcttcacacccgtggtgaacagtcttgatcctccactcttgacacgataccttcgaatccatccacagtcttgggttcaccagattgcattgcgcatggaagtacttggatgcgaggctcaggacctctac

SEQ ID NO: 2408 - protein, 1457 aa, synthetic construct
  REGION 1..1457: note = Variant of human B-domain deleted Factor VIII
MQIELSTCFFLCLLRFCFSATRRYYLGAVELSWDYMQSDLGELPVDARFPPRVPKSFPFNTSVVYKKTLFVEFTDHLFNIAKPRPPWMGLLGPTIQAEVYDTVVITLKNMASHPVSLHAVGVSYWKASEGAEYDDQTSQREKEDDKVFPGGSHTYVWQVLKENGPMASDPLCLTYSYLSHVDLVKDLNSGLIGALLVCREGSLAKEKTQTLHKFILLFAVFDEGKSWHSETKNSLMQDRDAASARAWPKMHTVNGYVNRSLPGLIGCHRKSVYWHVIGMGTTPEVHSIFLEGHTFLVRNHRQASLEISPITFLTAQTLLMDLGQFLLFCHISSHQHDGMEAYVKVDSCPEEPQLRMKNNEEAEDYDDDLTDSEMDVVRFDDDNSPSFIQIRSVAKKHPKTWVHYIAAEEEDWDYAPLVLAPDDRSYKSQYLNNGPQRIGRKYKKVRFMAYTDETFKTREAIQHESGILGPLLYGEVGDTLLIIFKNQASRPYNIYPHGITDVRPLYSRRLPKGVKHLKDFPILPGEIFKYKWTVTVEDGPTKSDPRCLTRYYSSFVNMERDLASGLIGPLLICYKESVDQRGNQIMSDKRNVILFSVFDENRSWYLTENIQRFLPNPAGVQLEDPEFQASNIMHSINGYVFDSLQLSVCLHEVAYWYILSIGAQTDFLSVFFSGYTFKHKMVYEDTLTLFPFSGETVFMSMENPGLWILGCHNSDFRNRGMTALLKVSSCDKNTGDYYEDSYEDISAYDLSKNNAIEPRSFSQNPPVLKRHQREITRTTLQSDQEEIDYDDTISVEMKKEDFDIYDEDENQSPRSFQKKTRHYFIAAVERLWDYGMSSSPHVLRNRAQSGSVPQFKKVVFQEFTDGSFTQPLYRGELNEHLGLLGPYIRAEVEDNIMVTFRNQASRPYSFYSSLISYEEDQRQGAEPRKNFVKPNETKTYFWKVQHHMAPTKDEFDCKAWAYFSDVDLEKDVHSGLIGPLLVCHTNTLNPAHGRQVTVQEFALFFTIFDETKSWYFTENMERNCRAPCNIQMEDPTFKENYRFHAINGYIMDTLPGLVMAQDQRIRWYLLSMGSNENIHSIHFSGHVFTVRKKEEYKMALYNLYPGVFETVEMLPSKAGIWRVECLIGEHLHAGMSTLFLVYSNKCQTPLGMASGHIRDFQITASGQYGQWAPKLARLHYSGSINAWSTKEPFSWIKVDLLAPMIIHGIKTQGARQKFSSLYISQFIIMYSLDGKKWQTYRGNSTGTLMVFFGNVDSSGIKHNIFNPPIIARYIRLHPTHYSIRSTLRMELMGCDLNSCSMPLGMESKAISDAQITASSYFTNMFATWSPSKARLHLQGRSNAWRPQVNNPKEWLQVDFQKTMKVTGVTTQGVKSLLTSMYVKEFLISSSQDGHQWTLFFQNGKVKVFQGNQDSFTPVVNSLDPPLLTRYLRIHPQSWVHQIALRMEVLGCEAQDLY

SEQ ID NO: 2409 - DNA, 4371 bp, synthetic construct
  misc_feature 1..4371: note = Variant of human B-domain deleted Factor VIII
  source 1..4371: mol_type = other DNA
atgcagattgaactgtctacctgcttcttcctctgtttgctgaggttctgctttagcgccactagacggtactaccttggcgctgtggagctgtcctgggactatatgcagagtgatttgggagagcttcccgtcgacgcacgatttcctcctcgcgttccaaagtcatttcccttcaacacaagcgtggtgtacaagaagacgctcttcgtcgaattcaccgatcacctgttcaatatcgccaaacccagaccaccatggatgggtcttttggggcctaccatacaagcggaggtgtatgacacagttgttatcactctcaagaacatggcttctcatccggtaagtcttcacgcagtgggcgtgtcctactggaaagcttcagaaggagccgagtatgatgatcagacatcccagagggagaaagaagacgacaaggtatttccaggtgggtctcatacctatgtgtggcaagtgctcaaagagaatggccctatggcaagcgatccgctctgtttgacttacagctacctttcacacgttgacctcgtcaaggacctcaactccgggttgattggagccttgttggtatgcagggaaggatctcttgccaaagagaagacacagaccctctataagtttatccttctctttgctgtgttcgatgagggcaaaagttggcatagcgaaacgaagaattccctcatgcaggatcgcgacgcagccagcgccagagcttggcccaagatgcacactgtgaacggatatgtcaataggtcacttcctggcttgattgggtgtcatcggaaaagtgtctactggcacgtgatcggaatggggacaacaccagaggtccactccatatttctcgaaggccataccttccttgttcgaaaccacagacaggcatccttggagatctctcccattacctttctcactgcccaaacgctccttatggacttgggtcagttccttctcttctgccatatcagctcacaccagcatgatggtatggaagcttatgtgaaagtcgacagttgtcctgaggagccacagttgcgcatgaagaataatgaagaagccgaggattacgacgacgatctcaccgattctgagatggacgtggtgaggtttgatgacgacaactctccctccttcattcaaatccggagcgtggcgaagaaacaccccaagacttgggtccactatatagcggcggaagaggaggattgggattacgctcctcttgtattggcaccagatgaccgctcatacaaaagccagtacctcaacaacggaccgcagagaattggccggaagtataagaaagtgcgatttatggcctatacagacgaaacctttaagacaagggaggccatccagcatgagagtgggattttgggacctcttctttacggcgaagttggtgataccctcctcatcatcttcaagaatcaagcttctcgcccctataacatttacccacacgggatcactgacgttaggcctttgtatagcagaagacttcccaaaggcgtgaagcatctcaaagacttccccattttgccaggcgagatctttaagtacaaatggaccgtcacagtggaagatggaccgactaaatcagaccctcgatgccttacgcggtactattcctccttcgtgaatatggagagagatttggcaagcggactcataggaccactcctcatctgttacaaggaatctgtagaccagaggggtaaccagattatgagtgataaacgcaatgtgatcctttttagcgtcttcgacgagaaccggtcctggtacttgaccgagaatatacaaaggttccttcccaaccccgcaggcgttcagttggaagaccctgagtttcaggccagcaatattatgcactcaatcaacggctatgtgtttgatagtctccagctttctgtttgcctccatgaagtagcctattggtacatcttgtcaattggtgctcaaacagacttcctctccgtcttcttctccggctacacctttaagcacaagatggtgtatgaggacactctcacactctttccattttctggagaaaccgtgttcatgagcatggagaatccaggcctttggatcttgggttgccacaacagtgattttcgcaatcggggaatgactgctctcctcaaagtcagcagctgtgataagaacacaggcgactattacgaagattcttacgaggacataagtgcctacttgttgtccaagaataacgccattgagcccagatcattctcccagaatcctcccgtgcttaaaaggcatcagcgcgaaatcaccagaactactcttcagtctgatcaagaggagattgactatgacgacaccataagcgtggaaatgaagaaggaggatttcgatatctatgacgaagatgagaaccagtctccgcggagctttcagaagaagacgcgacactacttcattgcagcagtcgaaaggctttgggactacggtatgtcatcatcccctcatgtgttgcgcaatagagctcagagtggaagtgttccacagttcaagaaagtcgtctttcaagagtttacagatggcagcttcacacagcctctctatcggggcgagcttaacgaacatttgggactccttggtccctatatccgagccgaagtggaggacaacattatggttacctttaggaatcaagcctctcgcccctacagcttctactcctccctcatcagttatgaggaggatcagagacaaggcgctgaaccacggaagaactttgtgaaaccgaatgagacgaagacctacttctggaaagtacagcaccacatggcccccacaaaagacgaattcgattgcaaagcatgggcgtatttttcagacgttgacttggagaaagatgtacattcaggacttattggtcctttgttggtgtgtcacactaacactctcaatccagcccatggcaggcaggtgacagtccaggaattcgctcttttctttaccatctttgatgagaccaagtcctggtacttcacggaaaacatggagcgcaattgcagagccccctgtaacatacagatggaggaccctacctttaaggaaaattatcggttccacgcaatcaacggatacattatggatacactccctggccttgtgatggctcaggaccaacgaatcaggtggtacctcctcagcatgggttctaatgagaacatacactccattcacttttcaggacatgtgttcactgtccggaagaaagaagagtataagatggccctctacaatttgtatccaggcgtgtttgagaccgttgaaatgcttccctctaaagctggcatctggagagtagagtgcttgatcggagaacatcttcacgcaggtatgagcaccttgttcctcgtgtacagcaacaaatgtcagaccccacttggcatggccagtggacacattcgcgactttcagatcacagcatctggccagtatggacaatgggccccaaagttggctcgcctccattactccggtagcataaatgcgtggtccactaaagaacctttcagctggattaaggtcgatcttcttgcccccatgatcatccacggcattaagacacagggagcgaggcagaaattctcctccctctacatctcacagttcattattatgtatagtttggacggcaagaagtggcaaacttatagaggtaacagtactggaacactcatggtgttcttcggcaacgttgatagctctggcatcaaacacaacatctttaatcctcccataatagctcggtacatcagattgcatccgacccactacagcattaggagtacactccgaatggagcttatgggttgcgacttgaattcctgttcaatgccactcggaatggagtctaaagccatctctgatgcacagataaccgccagtagctactttacgaacatgtttgctacgtggtcaccctctaaggcaaggcttcatttgcaaggccggtctaatgcctggagacctcaggtgaacaacccgaaagaatggctccaggtggactttcagaagaccatgaaagtaacaggtgtcactactcagggagttaagtccttgctcaccagcatgtatgtgaaggagttccttatttcctcatcacaagatggccaccagtggaccctcttctttcagaatggtaaggtcaaagtgtttcagggcaatcaagacagcttcacacccgtggtgaacagtcttgatcctccactcttgacacgataccttcgaatccatccacagtcttgggttcaccagattgcattgcgcatggaagtacttggatgcgaggctcaggacctctac

SEQ ID NO: 2410 - protein, 1457 aa, synthetic construct
  REGION 1..1457: note = Variant of human B-domain deleted Factor VIII
MQIELSTCFFLCLLRFCFSATRRYYLGAVELSWDYMQSDLGELPVDARFPPRVPKSFPFNTSVVYKKTLFVEFTDHLFNIAKPRPPWMGLLGPTIQAEVYDTVVITLKNMASHPVSLHAVGVSYWKASEGAEYDDQTSQREKEDDKVFPGGSHTYVWQVLKENGPMASDPLCLTYSYLSHVDLVKDLNSGLIGALLVCREGSLAKEKTQTLYKFILLFAVFDEGKSWHSETKNSLMQDRDAASARAWPKMHTVNGYVNRSLPGLIGCHRKSVYWHVIGMGTTPEVHSIFLEGHTFLVRNHRQASLEISPITFLTAQTLLMDLGQFLLFCHISSHQHDGMEAYVKVDSCPEEPQLRMKNNEEAEDYDDDLTDSEMDVVRFDDDNSPSFIQIRSVAKKHPKTWVHYIAAEEEDWDYAPLVLAPDDRSYKSQYLNNGPQRIGRKYKKVRFMAYTDETFKTREAIQHESGILGPLLYGEVGDTLLIIFKNQASRPYNIYPHGITDVRPLYSRRLPKGVKHLKDFPILPGEIFKYKWTVTVEDGPTKSDPRCLTRYYSSFVNMERDLASGLIGPLLICYKESVDQRGNQIMSDKRNVILFSVFDENRSWYLTENIQRFLPNPAGVQLEDPEFQASNIMHSINGYVFDSLQLSVCLHEVAYWYILSIGAQTDFLSVFFSGYTFKHKMVYEDTLTLFPFSGETVFMSMENPGLWILGCHNSDFRNRGMTALLKVSSCDKNTGDYYEDSYEDISAYLLSKNNAIEPRSFSQNPPVLKRHQREITRTTLQSDQEEIDYDDTISVEMKKEDFDIYDEDENQSPRSFQKKTRHYFIAAVERLWDYGMSSSPHVLRNRAQSGSVPQFKKVVFQEFTDGSFTQPLYRGELNEHLGLLGPYIRAEVEDNIMVTFRNQASRPYSFYSSLISYEEDQRQGAEPRKNFVKPNETKTYFWKVQHHMAPTKDEFDCKAWAYFSDVDLEKDVHSGLIGPLLVCHTNTLNPAHGRQVTVQEFALFFTIFDETKSWYFTENMERNCRAPCNIQMEDPTFKENYRFHAINGYIMDTLPGLVMAQDQRIRWYLLSMGSNENIHSIHFSGHVFTVRKKEEYKMALYNLYPGVFETVEMLPSKAGIWRVECLIGEHLHAGMSTLFLVYSNKCQTPLGMASGHIRDFQITASGQYGQWAPKLARLHYSGSINAWSTKEPFSWIKVDLLAPMIIHGIKTQGARQKFSSLYISQFIIMYSLDGKKWQTYRGNSTGTLMVFFGNVDSSGIKHNIFNPPIIARYIRLHPTHYSIRSTLRMELMGCDLNSCSMPLGMESKAISDAQITASSYFTNMFATWSPSKARLHLQGRSNAWRPQVNNPKEWLQVDFQKTMKVTGVTTQGVKSLLTSMYVKEFLISSSQDGHQWTLFFQNGKVKVFQGNQDSFTPVVNSLDPPLLTRYLRIHPQSWVHQIALRMEVLGCEAQDLY

SEQ ID NO: 2411 - DNA, 4371 bp, synthetic construct
  misc_feature 1..4371: note = Variant of human B-domain deleted Factor VIII
  source 1..4371: mol_type = other DNA
atgcagattgaactgtctacctgcttcttcctctgtttgctgaggttctgctttagcgccactagacggtactaccttggcgctgtggagctgtcctgggactatatgcagagtgatttgggagagcttcccgtcgacgcacgatttcctcctcgcgttccaaagtcatttcccttcaacacaagcgtggtgtacaagaagacgctcttcgtcgaattcaccgatcacctgttcaatatcgccaaacccagaccaccatggatgggtcttttggggcctaccatacaagcggaggtgtatgacacagttgttatcactctcaagaacatggcttctcatccggtaagtcttcacgcagtgggcgtgtcctactggaaagcttcagaaggagccgagtatgatgatcagacatcccagagggagaaagaagacgacaaggtatttccaggtgggtctcatacctatgtgtggcaagtgctcaaagagaatggccctatggcaagcgatccgctctgtttgacttacagctacctttcacacgttgacctcgtcaaggacctcaactccgggttgattggagccttgttggtatgcagggaaggatctcttgccaaagagaagacacagaccctccacaagtttatccttctctttgctgtgttcgatgagggcaaaagttggcatagcgaaacgaagaattccctcatgcaggatcgcgacgcagccagcgccagagcttggcccaagatgcacactgtgaacggatatgtcaataggtcacttcctggcttgattgggtgtcatcggaaaagtgtctactggcacgtgatcggaatggggacaacaccagaggtccactccatatttctcgaaggccataccttccttgttcgaaaccacagacaggcatccttggagatctctcccattacctttctcactgcccaaacgctccttatggacttgggtcagttccttctcttctgccatatcagctcacaccagcatgatggtatggaagcttatgtgaaagtcgacagttgtcctgaggagccacagttgcgcatgaagaataatgaagaagccgaggattacgacgacgatctcaccgattctgagatggacgtggtgaggtttgatgacgacaactctccctccttcattcaaatccggagcgtggcgaagaaacaccccaagacttgggtccactatatagcggcggaagaggaggattgggattacgctcctcttgtattggcaccagatgaccgctcatacaaaagccagtacctcaacaacggaccgcagagaattggccggaagtataagaaagtgcgatttatggcctatacagacgaaacctttaagacaagggaggccatccagcatgagagtgggattttgggacctcttctttacggcgaagttggtgataccctcctcatcatcttcaagaatcaagcttctcgcccctataacatttacccacacgggatcactgacgttaggcctttgtatagcagaagacttcccaaaggcgtgaagcatctcaaagacttccccattttgccaggcgagatctttaagtacaaatggaccgtcacagtggaagatggaccgactaaatcagaccctcgatgccttacgcggtactattcctccttcgtgaatatggagagagatttggcaagcggactcataggaccactcctcatctgttacaaggaatctgtagaccagaggggtaaccagattatgagtgataaacgcaatgtgatcctttttagcgtcttcgacgagaaccggtcctggtacttgaccgagaatatacaaaggttccttcccaaccccgcaggcgttcagttggaagaccctgagtttcaggccagcaatattatgcactcaatcaacggctatgtgtttgatagtctccagctttctgtttgcctccatgaagtagcctattggtacatcttgtcaattggtgctcaaacagacttcctctccgtcttcttctccggctacacctttaagcacaagtgtgtgtatgaggacactctcacactctttccattttctggagaaaccgtgttcatgagcatggagaatccaggcctttggatcttgggttgccacaacagtgattttcgcaatcggggaatgactgctctcctcaaagtcagcagctgtgataagaacacaggcgactattacgaagattcttacgaggacataagtgcctacttgttgtccaagaataacgccattgagcccagatcattctcccagaatcctcccgtgcttaaaaggcatcagcgcgaaatcaccagaactactcttcagtctgatcaagaggagattgactatgacgacaccataagcgtggaaatgaagaaggaggatttcgatatctatgacgaagatgagaaccagtctccgcggagctttcagaagaagacgcgacactacttcattgcagcagtcgaaaggctttgggactacggtatgtcatcatcccctcatgtgttgcgcaatagagctcagagtggaagtgttccacagttcaagaaagtcgtctttcaagagtttacagatggcagcttcacacagcctctctatcggggcgagcttaacgaacatttgggactccttggtccctatatccgagccgaagtggaggacaacattatggttacctttaggaatcaagcctctcgcccctacagcttctactcctccctcatcagttatgaggaggatcagagacaaggcgctgaaccacggaagaactttgtgaaaccgaatgagacgaagacctacttctggaaagtacagcaccacatggcccccacaaaagacgaattcgattgcaaagcatgggcgtatttttcagacgttgacttggagaaagatgtacattcaggacttattggtcctttgttggtgtgtcacactaacactctcaatccagcccatggcaggcaggtgacagtccaggaattcgctcttttctttaccatctttgatgagaccaagtcctggtacttcacggaaaacatggagcgcaattgcagagccccctgtaacatacagatggaggaccctacctttaaggaaaattatcggttccacgcaatcaacggatacattatggatacactccctggccttgtgatggctcaggaccaacgaatcaggtggtacctcctcagcatgggttctaatgagaacatacactccattcacttttcaggacatgtgttcactgtccggaagaaagaagagtataagatggccctctacaatttgtatccaggcgtgtttgagaccgttgaaatgcttccctctaaagctggcatctggagagtagagtgcttgatcggagaacatcttcacgcaggtatgagcaccttgttcctcgtgtacagcaacaaatgtcagaccccacttggcatggccagtggacacattcgcgactttcagatcacagcatctggccagtatggacaatgggccccaaagttggctcgcctccattactccggtagcataaatgcgtggtccactaaagaacctttcagctggattaaggtcgatcttcttgcccccatgatcatccacggcattaagacacagggagcgaggcagaaattctcctccctctacatctcacagttcattattatgtatagtttggacggcaagaagtggcaaacttatagaggtaacagtactggaacactcatggtgttcttcggcaacgttgatagctctggcatcaaacacaacatctttaatcctcccataatagctcggtacatcagattgcatccgacccactacagcattaggagtacactccgaatggagcttatgggttgcgacttgaattcctgttcaatgccactcggaatggagtctaaagccatctctgatgcacagataaccgccagtagctactttacgaacatgtttgctacgtggtcaccctctaaggcaaggcttcatttgcaaggccggtctaatgcctggagacctcaggtgaacaacccgaaagaatggctccaggtggactttcagaagaccatgaaagtaacaggtgtcactactcagggagttaagtccttgctcaccagcatgtatgtgaaggagttccttatttcctcatcacaagatggccaccagtggaccctcttctttcagaatggtaaggtcaaagtgtttcagggcaatcaagacagcttcacacccgtggtgaacagtcttgatcctccactcttgacacgataccttcgaatccatccacagtcttgggttcaccagattgcattgcgcatggaagtacttggatgcgaggctcaggacctctac

SEQ ID NO: 2412 - protein, 1457 aa, synthetic construct
  REGION 1..1457: note = Variant of human B-domain deleted Factor VIII
MQIELSTCFFLCLLRFCFSATRRYYLGAVELSWDYMQSDLGELPVDARFPPRVPKSFPFNTSVVYKKTLFVEFTDHLFNIAKPRPPWMGLLGPTIQAEVYDTVVITLKNMASHPVSLHAVGVSYWKASEGAEYDDQTSQREKEDDKVFPGGSHTYVWQVLKENGPMASDPLCLTYSYLSHVDLVKDLNSGLIGALLVCREGSLAKEKTQTLHKFILLFAVFDEGKSWHSETKNSLMQDRDAASARAWPKMHTVNGYVNRSLPGLIGCHRKSVYWHVIGMGTTPEVHSIFLEGHTFLVRNHRQASLEISPITFLTAQTLLMDLGQFLLFCHISSHQHDGMEAYVKVDSCPEEPQLRMKNNEEAEDYDDDLTDSEMDVVRFDDDNSPSFIQIRSVAKKHPKTWVHYIAAEEEDWDYAPLVLAPDDRSYKSQYLNNGPQRIGRKYKKVRFMAYTDETFKTREAIQHESGILGPLLYGEVGDTLLIIFKNQASRPYNIYPHGITDVRPLYSRRLPKGVKHLKDFPILPGEIFKYKWTVTVEDGPTKSDPRCLTRYYSSFVNMERDLASGLIGPLLICYKESVDQRGNQIMSDKRNVILFSVFDENRSWYLTENIQRFLPNPAGVQLEDPEFQASNIMHSINGYVFDSLQLSVCLHEVAYWYILSIGAQTDFLSVFFSGYTFKHKCVYEDTLTLFPFSGETVFMSMENPGLWILGCHNSDFRNRGMTALLKVSSCDKNTGDYYEDSYEDISAYLLSKNNAIEPRSFSQNPPVLKRHQREITRTTLQSDQEEIDYDDTISVEMKKEDFDIYDEDENQSPRSFQKKTRHYFIAAVERLWDYGMSSSPHVLRNRAQSGSVPQFKKVVFQEFTDGSFTQPLYRGELNEHLGLLGPYIRAEVEDNIMVTFRNQASRPYSFYSSLISYEEDQRQGAEPRKNFVKPNETKTYFWKVQHHMAPTKDEFDCKAWAYFSDVDLEKDVHSGLIGPLLVCHTNTLNPAHGRQVTVQEFALFFTIFDETKSWYFTENMERNCRAPCNIQMEDPTFKENYRFHAINGYIMDTLPGLVMAQDQRIRWYLLSMGSNENIHSIHFSGHVFTVRKKEEYKMALYNLYPGVFETVEMLPSKAGIWRVECLIGEHLHAGMSTLFLVYSNKCQTPLGMASGHIRDFQITASGQYGQWAPKLARLHYSGSINAWSTKEPFSWIKVDLLAPMIIHGIKTQGARQKFSSLYISQFIIMYSLDGKKWQTYRGNSTGTLMVFFGNVDSSGIKHNIFNPPIIARYIRLHPTHYSIRSTLRMELMGCDLNSCSMPLGMESKAISDAQITASSYFTNMFATWSPSKARLHLQGRSNAWRPQVNNPKEWLQVDFQKTMKVTGVTTQGVKSLLTSMYVKEFLISSSQDGHQWTLFFQNGKVKVFQGNQDSFTPVVNSLDPPLLTRYLRIHPQSWVHQIALRMEVLGCEAQDLY

SEQ ID NO: 2413 - DNA, 4371 bp, synthetic construct
  misc_feature 1..4371: note = Variant of human B-domain deleted Factor VIII
  source 1..4371: mol_type = other DNA
atgcagattgaactgtctacctgcttcttcctctgtttgctgaggttctgctttagcgccactagacggtactaccttggcgctgtggagctgtcctgggactatatgcagagtgatttgggagagcttcccgtcgacgcacgatttcctcctcgcgttccaaagtcatttcccttcaacacaagcgtggtgtacaagaagacgctcttcgtcgaattcaccgatcacctgttcaatatcgccaaacccagaccaccatggatgggtcttttggggcctaccatacaagcggaggtgtatgacacagttgttatcactctcaagaacatggcttctcatccggtaagtcttcacgcagtgggcgtgtcctactggaaagcttcagaaggagccgagtatgatgatcagacatcccagagggagaaagaagacgacaaggtatttccaggtgggtctcatacctatgtgtggcaagtgctcaaagagaatggccctatggcaagcgatccgctctgtttgacttacagctacctttcacacgttgacctcgtcaaggacctcaactccgggttgattggagccttgttggtatgcagggaaggatctcttgccaaagagaagacacagaccctccacaagtttatccttctctttgctgtgttcgatgagggcaaaagttggcatagcgaaacgaagaattccctcatgcaggatcgcgacgcagccagcgccagagcttggcccaagatgcacactgtgaacggatatgtcaataggtcacttcctggcttgattgggtgtcatcggaaaagtgtctactggcacgtgatcggaatggggacaacaccagaggtccactccatatttctcgaaggccataccttccttgttcgaaaccacagacaggcatccttggagatctctcccattacctttctcactgcccaaacgctccttatggacttgggtcagttccttctcttctgccatatcagctcacaccagcatgatggtatggaagcttatgtgaaagtcgacagttgtcctgaggagccacagttgcgcatgaagaataatgaagaagccgaggattacgacgacgatctcaccgattctgagatggacgtggtgaggtttgatgacgacaactctccctccttcattcaaatccggagcgtggcgaagaaacaccccaagacttgggtccactatatagcggcggaagaggaggattgggattacgctcctcttgtattggcaccagatgaccgctcatacaaaagccagtacctcaacaacggaccgcagagaattggccggaagtataagaaagtgcgatttatggcctatacagacgaaacctttaagacaagggaggccatccagcatgagagtgggattttgggacctcttctttacggcgaagttggtgataccctcctcatcatcttcaagaatcaagcttctcgcccctataacatttacccacacgggatcactgacgttaggcctttgtatagcagaagacttcccaaaggcgtgaagcatctcaaagacttccccattttgccaggcgagatctttaagtacaaatggaccgtcacagtggaagatggaccgactaaatcagaccctcgatgccttacgcggtactattcctccttcgtgaatatggagagagatttggcaagcggactcataggaccactcctcatctgttacaaggaatctgtagaccagaggggtaaccagattatgagtgataaacgcaatgtgatcctttttagcgtcttcgacgagaaccggtcctggtacttgaccgagaatatacaaaggttccttcccaaccccgcaggcgttcagttggaagaccctgagtttcaggccagcaatattatgcactcaatcaacggctatgtgtttgatagtctccagctttctgtttgcctccatgaagtagcctattggtacatcttgtcaattggtgctcaaacagacttcctctccgtcttcttctccggctacacctttaagcacaagatggtgtatgaggacactctcacactctttccattttctggagaaaccgtgttcatgagcatggagaatccaggcctttggatcttgggttgccacaacagtgattttcgcaatcggggaatgactgctctcctcaaagtcagcagctgtgataagaacacaggcgactattacgaagattcttacgaggacataagtgcctacttgttgtccaagaataacgccattgagcccagatcattctcccagaatcctcccgtgcttaaaaggcatcagcgcgaaatcaccagaactactcttcagtctgatcaagaggagattgactatgacgacaccataagcgtggaaatgaagaaggaggatttcgatatccgggacgaagatgagaaccagtctccgcggagctttcagaagaagacgcgacactacttcattgcagcagtcgaaaggctttgggactacggtatgtcatcatcccctcatgtgttgcgcaatagagctcagagtggaagtgttccacagttcaagaaagtcgtctttcaagagtttacagatggcagcttcacacagcctctctatcggggcgagcttaacgaacatttgggactccttggtccctatatccgagccgaagtggaggacaacattatggttacctttaggaatcaagcctctcgcccctacagcttctactcctccctcatcagttatgaggaggatcagagacaaggcgctgaaccacggaagaactttgtgaaaccgaatgagacgaagacctacttctggaaagtacagcaccacatggcccccacaaaagacgaattcgattgcaaagcatgggcgtatttttcagacgttgacttggagaaagatgtacattcaggacttattggtcctttgttggtgtgtcacactaacactctcaatccagcccatggcaggcaggtgacagtccaggaattcgctcttttctttaccatctttgatgagaccaagtcctggtacttcacggaaaacatggagcgcaattgcagagccccctgtaacatacagatggaggaccctacctttaaggaaaattatcggttccacgcaatcaacggatacattatggatacactccctggccttgtgatggctcaggaccaacgaatcaggtggtacctcctcagcatgggttctaatgagaacatacactccattcacttttcaggacatgtgttcactgtccggaagaaagaagagtataagatggccctctacaatttgtatccaggcgtgtttgagaccgttgaaatgcttccctctaaagctggcatctggagagtagagtgcttgatcggagaacatcttcacgcaggtatgagcaccttgttcctcgtgtacagcaacaaatgtcagaccccacttggcatggccagtggacacattcgcgactttcagatcacagcatctggccagtatggacaatgggccccaaagttggctcgcctccattactccggtagcataaatgcgtggtccactaaagaacctttcagctggattaaggtcgatcttcttgcccccatgatcatccacggcattaagacacagggagcgaggcagaaattctcctccctctacatctcacagttcattattatgtatagtttggacggcaagaagtggcaaacttatagaggtaacagtactggaacactcatggtgttcttcggcaacgttgatagctctggcatcaaacacaacatctttaatcctcccataatagctcggtacatcagattgcatccgacccactacagcattaggagtacactccgaatggagcttatgggttgcgacttgaattcctgttcaatgccactcggaatggagtctaaagccatctctgatgcacagataaccgccagtagctactttacgaacatgtttgctacgtggtcaccctctaaggcaaggcttcatttgcaaggccggtctaatgcctggagacctcaggtgaacaacccgaaagaatggctccaggtggactttcagaagaccatgaaagtaacaggtgtcactactcagggagttaagtccttgctcaccagcatgtatgtgaaggagttccttatttcctcatcacaagatggccaccagtggaccctcttctttcagaatggtaaggtcaaagtgtttcagggcaatcaagacagcttcacacccgtggtgaacagtcttgatcctccactcttgacacgataccttcgaatccatccacagtcttgggttcaccagattgcattgcgcatggaagtacttggatgcgaggctcaggacctctac

SEQ ID NO: 2414 - protein, 1457 aa, synthetic construct
  REGION 1..1457: note = Variant of human B-domain deleted Factor VIII
MQIELSTCFFLCLLRFCFSATRRYYLGAVELSWDYMQSDLGELPVDARFPPRVPKSFPFNTSVVYKKTLFVEFTDHLFNIAKPRPPWMGLLGPTIQAEVYDTVVITLKNMASHPVSLHAVGVSYWKASEGAEYDDQTSQREKEDDKVFPGGSHTYVWQVLKENGPMASDPLCLTYSYLSHVDLVKDLNSGLIGALLVCREGSLAKEKTQTLHKFILLFAVFDEGKSWHSETKNSLMQDRDAASARAWPKMHTVNGYVNRSLPGLIGCHRKSVYWHVIGMGTTPEVHSIFLEGHTFLVRNHRQASLEISPITFLTAQTLLMDLGQFLLFCHISSHQHDGMEAYVKVDSCPEEPQLRMKNNEEAEDYDDDLTDSEMDVVRFDDDNSPSFIQIRSVAKKHPKTWVHYIAAEEEDWDYAPLVLAPDDRSYKSQYLNNGPQRIGRKYKKVRFMAYTDETFKTREAIQHESGILGPLLYGEVGDTLLIIFKNQASRPYNIYPHGITDVRPLYSRRLPKGVKHLKDFPILPGEIFKYKWTVTVEDGPTKSDPRCLTRYYSSFVNMERDLASGLIGPLLICYKESVDQRGNQIMSDKRNVILFSVFDENRSWYLTENIQRFLPNPAGVQLEDPEFQASNIMHSINGYVFDSLQLSVCLHEVAYWYILSIGAQTDFLSVFFSGYTFKHKMVYEDTLTLFPFSGETVFMSMENPGLWILGCHNSDFRNRGMTALLKVSSCDKNTGDYYEDSYEDISAYLLSKNNAIEPRSFSQNPPVLKRHQREITRTTLQSDQEEIDYDDTISVEMKKEDFDIRDEDENQSPRSFQKKTRHYFIAAVERLWDYGMSSSPHVLRNRAQSGSVPQFKKVVFQEFTDGSFTQPLYRGELNEHLGLLGPYIRAEVEDNIMVTFRNQASRPYSFYSSLISYEEDQRQGAEPRKNFVKPNETKTYFWKVQHHMAPTKDEFDCKAWAYFSDVDLEKDVHSGLIGPLLVCHTNTLNPAHGRQVTVQEFALFFTIFDETKSWYFTENMERNCRAPCNIQMEDPTFKENYRFHAINGYIMDTLPGLVMAQDQRIRWYLLSMGSNENIHSIHFSGHVFTVRKKEEYKMALYNLYPGVFETVEMLPSKAGIWRVECLIGEHLHAGMSTLFLVYSNKCQTPLGMASGHIRDFQITASGQYGQWAPKLARLHYSGSINAWSTKEPFSWIKVDLLAPMIIHGIKTQGARQKFSSLYISQFIIMYSLDGKKWQTYRGNSTGTLMVFFGNVDSSGIKHNIFNPPIIARYIRLHPTHYSIRSTLRMELMGCDLNSCSMPLGMESKAISDAQITASSYFTNMFATWSPSKARLHLQGRSNAWRPQVNNPKEWLQVDFQKTMKVTGVTTQGVKSLLTSMYVKEFLISSSQDGHQWTLFFQNGKVKVFQGNQDSFTPVVNSLDPPLLTRYLRIHPQSWVHQIALRMEVLGCEAQDLY

SEQ ID NO: 2415 - DNA, 4371 bp, synthetic construct
  misc_feature 1..4371: note = Variant of human B-domain deleted Factor VIII
  source 1..4371: mol_type = other DNA
atgcagattgaactgtctacctgcttcttcctctgtttgctgaggttctgctttagcgccactagacggtactaccttggcgctgtggagctgtcctgggactatatgcagagtgatttgggagagcttcccgtcgacgcacgatttcctcctcgcgttccaaagtcatttcccttcaacacaagcgtggtgtacaagaagacgctcttcgtcgaattcaccgatcacctgttcaatatcgccaaacccagaccaccatggatgggtcttttggggcctaccatacaagcggaggtgtatgacacagttgttatcactctcaagaacatggcttctcatccggtaagtcttcacgcagtgggcgtgtcctactggaaagcttcagaaggagccgagtatgatgatcagacatcccagagggagaaagaagacgacaaggtatttccaggtgggtctcatacctatgtgtggcaagtgctcaaagagaatggccctatggcaagcgatccgctctgtttgacttacagctacctttcacacgttgacctcgtcaaggacctcaactccgggttgattggagccttgttggtatgcagggaaggatctcttgccaaagagaagacacagaccctccacaagtttatccttctctttgctgtgttcgatgagggcaaaagttggcatagcgaaacgaagaattccctcatgcaggatcgcgacgcagccagcgccagagcttggcccaagatgcacactgtgaacggatatgtcaataggtcacttcctggcttgattgggtgtcatcggaaaagtgtctactggcacgtgatcggaatggggacaacaccagaggtccactccatatttctcgaaggccataccttccttgttcgaaaccacagacaggcatccttggagatctctcccattacctttctcactgcccaaacgctccttatggacttgggtcagttccttctcttctgccatatcagctcacaccagcatgatggtatggaagcttatgtgaaagtcgacagttgtcctgaggagccacagttgcgcatgaagaataatgaagaagccgaggattacgacgacgatctcaccgattctgagatggacgtggtgaggtttgatgacgacaactctccctccttcattcaaatccggagcgtggcgaagaaacaccccaagacttgggtccactatatagcggcggaagaggaggattgggattacgctcctcttgtattggcaccagatgaccgctcatacaaaagccagtacctcaacaacggaccgcagagaattggccggaagtataagaaagtgcgatttatggcctatacagacgaaacctttaagacaagggaggccatccagcatgagagtgggattttgggacctcttctttacggcgaagttggtgataccctcctcatcatcttcaagaatcaagcttctcgcccctataacatttacccacacgggatcactgacgttaggcctttgtatagcagaagacttcccaaaggcgtgaagcatctcaaagacttccccattttgccaggcgagatctttaagtacaaatggaccgtcacagtggaagatggaccgactaaatcagaccctcgatgccttacgcggtactattcctccttcgtgaatatggagagagatttggcaagcggactcataggaccactcctcatctgttacaaggaatctgtagaccagaggggtaaccagattatgagtgataaacgcaatgtgatcctttttagcgtcttcgacgagaaccggtcctggtacttgaccgagaatatacaaaggttccttcccaaccccgcaggcgttcagttggaagaccctgagtttcaggccagcaatattatgcactcaatcaacggctatgtgtttgatagtctccagctttctgtttgcctccatgaagtagcctattggtacatcttgtcaattggtgctcaaacagacttcctctccgtcttcttctccggctacacctttaagcacaagatggtgtatgaggacactctcacactctttccattttctggagaaaccgtgttcatgagcatggagaatccaggcctttggatcttgggttgccacaacagtgattttcgcaatcggggaatgactgctctcctcaaagtcagcagctgtgataagaacacaggcgactattacgaagattcttacgaggacataagtgcctacttgttgtccaagaataacgccattgagcccagatcattctcccagaatcctcccgtgcttaaaaggcatcagcgcgaaatcaccagaactactcttcagtctgatcaagaggagattgactatgacgacaccataagcgtggaaatgaagaaggaggatttcgatatctatgacgaagatgagaaccagtctccgcggagctttcagaagaagacgcgacactacttcattgcagcagtcgaaaggctttgggactacggtatgtcatcatcccctcatgtgttgcgcaatagagctcagagtggaagtgttccacagttcaagaaagtcgtctttcaagagtttacagatggcagcttcacacagcctctctatcggggcgagcttaacgaacatttgggactccttggtccctatatccgagccgaagtggaggacaacattatggttacctttaggaatcaagcctctcgcccctacagcttctactcctccctcatcagttatgaggaggatcagagacaaggcgctgaaccacggaagaactttgtgaaaccgaatgagacgaagacctacttctggaaagtacagcaccacatggcccccacaaaagacgaattcgattgcaaagcatgggcgtatttttcagacgttgacttggagaaagatgtacattcaggacttattggtcctttgttggtgtgtcacactaacactctcaatccagcccatggcaggcaggtgacagtccaggaattcgctcttttctttaccatctttgatgagaccaagtcctggtacttcacggaaaacatggagcgcaattgcagagccccctgtaacatacagatggaggaccctacctttaaggaaaattatcggttccacgcaatcaacggatacattatggatacactccctggccttgtgatggctcaggaccaacgaatcaggtggtacctcctcagcatgggttctaatgagaacatacactccattcacttttcaggacatgtgttcactgtccggaagaaagaagagtataagatggccctctacaatttgtatccaggcgtgtttgagaccgttgaaatgcttccctctaaagctggcatctggagagtagagtgcttgatcggagaacatcttcacgcaggtatgagcaccttgttcctcgtgtacagcaacaaatgtcagagtccacttggcatggccagtggacacattcgcgactttcagatcacagcatctggccagtatggacaatgggccccaaagttggctcgcctccattactccggtagcataaatgcgtggtccactaaagaacctttcagctggattaaggtcgatcttcttgcccccatgatcatccacggcattaagacacagggagcgaggcagaaattctcctccctctacatctcacagttcattattatgtatagtttggacggcaagaagtggcaaacttatagaggtaacagtactggaacactcatggtgttcttcggcaacgttgatagctctggcatcaaacacaacatctttaatcctcccataatagctcggtacatcagattgcatccgacccactacagcattaggagtacactccgaatggagcttatgggttgcgacttgaattcctgttcaatgccactcggaatggagtctaaagccatctctgatgcacagataaccgccagtagctactttacgaacatgtttgctacgtggtcaccctctaaggcaaggcttcatttgcaaggccggtctaatgcctggagacctcaggtgaacaacccgaaagaatggctccaggtggactttcagaagaccatgaaagtaacaggtgtcactactcagggagttaagtccttgctcaccagcatgtatgtgaaggagttccttatttcctcatcacaagatggccaccagtggaccctcttctttcagaatggtaaggtcaaagtgtttcagggcaatcaagacagcttcacacccgtggtgaacagtcttgatcctccactcttgacacgataccttcgaatccatccacagtcttgggttcaccagattgcattgcgcatggaagtacttggatgcgaggctcaggacctctac

SEQ ID NO: 2416 - protein, 1457 aa, synthetic construct
  REGION 1..1457: note = Variant of human B-domain deleted Factor VIII
MQIELSTCFFLCLLRFCFSATRRYYLGAVELSWDYMQSDLGELPVDARFPPRVPKSFPFNTSVVYKKTLFVEFTDHLFNIAKPRPPWMGLLGPTIQAEVYDTVVITLKNMASHPVSLHAVGVSYWKASEGAEYDDQTSQREKEDDKVFPGGSHTYVWQVLKENGPMASDPLCLTYSYLSHVDLVKDLNSGLIGALLVCREGSLAKEKTQTLHKFILLFAVFDEGKSWHSETKNSLMQDRDAASARAWPKMHTVNGYVNRSLPGLIGCHRKSVYWHVIGMGTTPEVHSIFLEGHTFLVRNHRQASLEISPITFLTAQTLLMDLGQFLLFCHISSHQHDGMEAYVKVDSCPEEPQLRMKNNEEAEDYDDDLTDSEMDVVRFDDDNSPSFIQIRSVAKKHPKTWVHYIAAEEEDWDYAPLVLAPDDRSYKSQYLNNGPQRIGRKYKKVRFMAYTDETFKTREAIQHESGILGPLLYGEVGDTLLIIFKNQASRPYNIYPHGITDVRPLYSRRLPKGVKHLKDFPILPGEIFKYKWTVTVEDGPTKSDPRCLTRYYSSFVNMERDLASGLIGPLLICYKESVDQRGNQIMSDKRNVILFSVFDENRSWYLTENIQRFLPNPAGVQLEDPEFQASNIMHSINGYVFDSLQLSVCLHEVAYWYILSIGAQTDFLSVFFSGYTFKHKMVYEDTLTLFPFSGETVFMSMENPGLWILGCHNSDFRNRGMTALLKVSSCDKNTGDYYEDSYEDISAYLLSKNNAIEPRSFSQNPPVLKRHQREITRTTLQSDQEEIDYDDTISVEMKKEDFDIYDEDENQSPRSFQKKTRHYFIAAVERLWDYGMSSSPHVLRNRAQSGSVPQFKKVVFQEFTDGSFTQPLYRGELNEHLGLLGPYIRAEVEDNIMVTFRNQASRPYSFYSSLISYEEDQRQGAEPRKNFVKPNETKTYFWKVQHHMAPTKDEFDCKAWAYFSDVDLEKDVHSGLIGPLLVCHTNTLNPAHGRQVTVQEFALFFTIFDETKSWYFTENMERNCRAPCNIQMEDPTFKENYRFHAINGYIMDTLPGLVMAQDQRIRWYLLSMGSNENIHSIHFSGHVFTVRKKEEYKMALYNLYPGVFETVEMLPSKAGIWRVECLIGEHLHAGMSTLFLVYSNKCQSPLGMASGHIRDFQITASGQYGQWAPKLARLHYSGSINAWSTKEPFSWIKVDLLAPMIIHGIKTQGARQKFSSLYISQFIIMYSLDGKKWQTYRGNSTGTLMVFFGNVDSSGIKHNIFNPPIIARYIRLHPTHYSIRSTLRMELMGCDLNSCSMPLGMESKAISDAQITASSYFTNMFATWSPSKARLHLQGRSNAWRPQVNNPKEWLQVDFQKTMKVTGVTTQGVKSLLTSMYVKEFLISSSQDGHQWTLFFQNGKVKVFQGNQDSFTPVVNSLDPPLLTRYLRIHPQSWVHQIALRMEVLGCEAQDLY

SEQ ID NO: 2417 - DNA, 4371 bp, synthetic construct
  misc_feature 1..4371: note = Variant of human B-domain deleted Factor VIII
  source 1..4371: mol_type = other DNA
atgcagattgaactgtctacctgcttcttcctctgtttgctgaggttctgctttagcgccactagacggtactaccttggcgctgtggagctgtcctgggactatatgcagagtgatttgggagagcttcccgtcgacgcacgatttcctcctcgcgttccaaagtcatttcccttcaacacaagcgtggtgtacaagaagacgctcttcgtcgaattcaccgatcacctgttcaatatcgccaaacccagaccaccatggatgggtcttttggggcctaccatacaagcggaggtgtatgacacagttgttatcactctcaagaacatggcttctcatccggtaagtcttcacgcagtgggcgtgtcctactggaaagcttcagaaggagccgagtatgatgatcagacatcccagagggagaaagaagacgacaaggtatttccaggtgggtctcatacctatgtgtggcaagtgctcaaagagaatggccctatggcaagcgatccgctctgtttgacttacagctacctttcacacgttgacctcgtcaaggacctcaactccgggttgattggagccttgttggtatgcagggaaggatctcttgccaaagagaagacacagaccctccacaagtttatccttctctttgctgtgttcgatgagggcaaaagttggcatagcgaaacgaagaattccctcatgcaggatcgcgacgcagccagcgccagagcttggcccaagatgcacactgtgaacggatatgtcaataggtcacttcctggcttgattgggtgtcatcggaaaagtgtctactggcacgtgatcggaatggggacaacaccagaggtccactccatatttctcgaaggccataccttccttgttcgaaaccacagacaggcatccttggagatctctcccattacctttctcactgcccaaacgctccttatggacttgggtcagttccttctcttctgccatatcagctcacaccagcatgatggtatggaagcttatgtgaaagtcgacagttgtcctgaggagccacagttgcgcatgaagaataatgaagaagccgaggattacgacgacgatctcaccgattctgagatggacgtggtgaggtttgatgacgacaactctccctccttcattcaaatccggagcgtggcgaagaaacaccccaagacttgggtccactatatagcggcggaagaggaggattgggattacgctcctcttgtattggcaccagatgaccgctcatacaaaagccagtacctcaacaacggaccgcagagaattggccggaagtataagaaagtgcgatttatggcctatacagacgaaacctttaagacaagggaggccatccagcatgagagtgggattttgggacctcttctttacggcgaagttggtgataccctcctcatcatcttcaagaatcaagcttctcgcccctataacatttacccacacgggatcactgacgttaggcctttgtatagcagaagacttcccaaaggcgtgaagcatctcaaagacttccccattttgccaggcgagatctttaagtacaaatggaccgtcacagtggaagatggaccgactaaatcagaccctcgatgccttacgcggtactattcctccttcgtgaatatggagagagatttggcaagcggactcataggaccactcctcatctgttacaaggaatctgtagaccagaggggtaaccagattatgagtgataaacgcaatgtgatcctttttagcgtcttcgacgagaaccggtcctggtacttgaccgagaatatacaaaggttccttcccaaccccgcaggcgttcagttggaagaccctgagtttcaggccagcaatattatgcactcaatcaacggctatgtgtttgatagtctccagctttctgtttgcctccatgaagtagcctattggtacatcttgtcaattggtgctcaaacagacttcctctccgtcttcttctccggctacacctttaagcacaagatggtgtatgaggacactctcacactctttccattttctggagaaaccgtgttcatgagcatggagaatccaggcctttggatcttgggttgccacaacagtgattttcgcaatcggggaatgactgctctcctcaaagtcagcagctgtgataagaacacaggcgactattacgaagattcttacgaggacataagtgcctacttgttgtccaagaataacgccattgagcccagatcattctcccagaatcctcccgtgcttaaaaggcatcagcgcgaaatcaccagaactactcttcagtctgatcaagaggagattgactatgacgacaccataagcgtggaaatgaagaagcgggatttcgatatctatgacgaagatgagaaccagtctccgcggagctttcagaagaagacgcgacactacttcattgcagcagtcgaaaggctttgggactacggtatgtcatcatcccctcatgtgttgcgcaatagagctcagagtggaagtgttccacagttcaagaaagtcgtctttcaagagtttacagatggcagcttcacacagcctctctatcggggcgagcttaacgaacatttgggactccttggtccctatatccgagccgaagtggaggacaacattatggttacctttaggaatcaagcctctcgcccctacagcttctactcctccctcatcagttatgaggaggatcagagacaaggcgctgaaccacggaagaactttgtgaaaccgaatgagacgaagacctacttctggaaagtacagcaccacatggcccccacaaaagacgaattcgattgcaaagcatgggcgtatttttcagacgttgacttggagaaagatgtacattcaggacttattggtcctttgttggtgtgtcacactaacactctcaatccagcccatggcaggcaggtgacagtccaggaattcgctcttttctttaccatctttgatgagaccaagtcctggtacttcacggaaaacatggagcgcaattgcagagccccctgtaacatacagatggaggaccctacctttaaggaaaattatcggttccacgcaatcaacggatacattatggatacactccctggccttgtgatggctcaggaccaacgaatcaggtggtacctcctcagcatgggttctaatgagaacatacactccattcacttttcaggacatgtgttcactgtccggaagaaagaagagtataagatggccctctacaatttgtatccaggcgtgtttgagaccgttgaaatgcttccctctaaagctggcatctggagagtagagtgcttgatcggagaacatcttcacgcaggtatgagcaccttgttcctcgtgtacagcaacaaatgtcagaccccacttggcatggccagtggacacattcgcgactttcagatcacagcatctggccagtatggacaatgggccccaaagttggctcgcctccattactccggtagcataaatgcgtggtccactaaagaacctttcagctggattaaggtcgatcttcttgcccccatgatcatccacggcattaagacacagggagcgaggcagaaattctcctccctctacatctcacagttcattattatgtatagtttggacggcaagaagtggcaaacttatagaggtaacagtactggaacactcatggtgttcttcggcaacgttgatagctctggcatcaaacacaacatctttaatcctcccataatagctcggtacatcagattgcatccgacccactacagcattaggagtacactccgaatggagcttatgggttgcgacttgaattcctgttcaatgccactcggaatggagtctaaagccatctctgatgcacagataaccgccagtagctactttacgaacatgtttgctacgtggtcaccctctaaggcaaggcttcatttgcaaggccggtctaatgcctggagacctcaggtgaacaacccgaaagaatggctccaggtggactttcagaagaccatgaaagtaacaggtgtcactactcagggagttaagtccttgctcaccagcatgtatgtgaaggagttccttatttcctcatcacaagatggccaccagtggaccctcttctttcagaatggtaaggtcaaagtgtttcagggcaatcaagacagcttcacacccgtggtgaacagtcttgatcctccactcttgacacgataccttcgaatccatccacagtcttgggttcaccagattgcattgcgcatggaagtacttggatgcgaggctcaggacctctac

SEQ ID NO: 2418 - protein, 1457 aa, synthetic construct
  REGION 1..1457: note = Variant of human B-domain deleted Factor VIII
MQIELSTCFFLCLLRFCFSATRRYYLGAVELSWDYMQSDLGELPVDARFPPRVPKSFPFNTSVVYKKTLFVEFTDHLFNIAKPRPPWMGLLGPTIQAEVYDTVVITLKNMASHPVSLHAVGVSYWKASEGAEYDDQTSQREKEDDKVFPGGSHTYVWQVLKENGPMASDPLCLTYSYLSHVDLVKDLNSGLIGALLVCREGSLAKEKTQTLHKFILLFAVFDEGKSWHSETKNSLMQDRDAASARAWPKMHTVNGYVNRSLPGLIGCHRKSVYWHVIGMGTTPEVHSIFLEGHTFLVRNHRQASLEISPITFLTAQTLLMDLGQFLLFCHISSHQHDGMEAYVKVDSCPEEPQLRMKNNEEAEDYDDDLTDSEMDVVRFDDDNSPSFIQIRSVAKKHPKTWVHYIAAEEEDWDYAPLVLAPDDRSYKSQYLNNGPQRIGRKYKKVRFMAYTDETFKTREAIQHESGILGPLLYGEVGDTLLIIFKNQASRPYNIYPHGITDVRPLYSRRLPKGVKHLKDFPILPGEIFKYKWTVTVEDGPTKSDPRCLTRYYSSFVNMERDLASGLIGPLLICYKESVDQRGNQIMSDKRNVILFSVFDENRSWYLTENIQRFLPNPAGVQLEDPEFQASNIMHSINGYVFDSLQLSVCLHEVAYWYILSIGAQTDFLSVFFSGYTFKHKMVYEDTLTLFPFSGETVFMSMENPGLWILGCHNSDFRNRGMTALLKVSSCDKNTGDYYEDSYEDISAYLLSKNNAIEPRSFSQNPPVLKRHQREITRTTLQSDQEEIDYDDTISVEMKKRDFDIYDEDENQSPRSFQKKTRHYFIAAVERLWDYGMSSSPHVLRNRAQSGSVPQFKKVVFQEFTDGSFTQPLYRGELNEHLGLLGPYIRAEVEDNIMVTFRNQASRPYSFYSSLISYEEDQRQGAEPRKNFVKPNETKTYFWKVQHHMAPTKDEFDCKAWAYFSDVDLEKDVHSGLIGPLLVCHTNTLNPAHGRQVTVQEFALFFTIFDETKSWYFTENMERNCRAPCNIQMEDPTFKENYRFHAINGYIMDTLPGLVMAQDQRIRWYLLSMGSNENIHSIHFSGHVFTVRKKEEYKMALYNLYPGVFETVEMLPSKAGIWRVECLIGEHLHAGMSTLFLVYSNKCQTPLGMASGHIRDFQITASGQYGQWAPKLARLHYSGSINAWSTKEPFSWIKVDLLAPMIIHGIKTQGARQKFSSLYISQFIIMYSLDGKKWQTYRGNSTGTLMVFFGNVDSSGIKHNIFNPPIIARYIRLHPTHYSIRSTLRMELMGCDLNSCSMPLGMESKAISDAQITASSYFTNMFATWSPSKARLHLQGRSNAWRPQVNNPKEWLQVDFQKTMKVTGVTTQGVKSLLTSMYVKEFLISSSQDGHQWTLFFQNGKVKVFQGNQDSFTPVVNSLDPPLLTRYLRIHPQSWVHQIALRMEVLGCEAQDLY

SEQ ID NO: 2419 - DNA, 4371 bp, synthetic construct
  misc_feature 1..4371: note = Variant of human B-domain deleted Factor VIII
  source 1..4371: mol_type = other DNA
atgcagattgaactgtctacctgcttcttcctctgtttgctgaggttctgctttagcgccactagacggtactaccttggcgctgtggagctgtcctgggactatatgcagagtgatttgggagagcttcccgtcgacgcacgatttcctcctcgcgttccaaagtcatttcccttcaacacaagcgtggtgtacaagaagacgctcttcgtcgaattcaccgatcacctgttcaatatcgccaaacccagaccaccatggatgggtcttttggggcctaccatacaagcggaggtgtatgacacagttgttatcactctcaagaacatggcttctcatccggtaagtcttcacgcagtgggcgtgtcctactggaaagcttcagaaggagccgagtatgatgatcagacatcccagagggagaaagaagacgacaaggtatttccaggtgggtctcatacctatgtgtggcaagtgctcaaagagaatggccctatggcaagcgatccgctctgtttgacttacagctacctttcacacgttgacctcgtcaaggacctcaactccgggttgattggagccttgttggtatgcagggaaggatctcttgccaaagagaagacacagaccctccacaagtttatccttctctttgctgtgttcgatgagggcaaaagttggcatagcgaaacgaagaattccctcatgcaggatcgcgacgcagccagcgccagagcttggcccaagatgcacactgtgaacggatatgtcaataggtcacttcctggcttgattgggtgtcatcggaaaagtgtctactggcacgtgatcggaatggggacaacaccagaggtccactccatatttctcgaaggccataccttccttgttcgaaaccacagacaggcatccttggagatctctcccattacctttctcactgcccaaacgctccttatggacttgggtcagttccttctcttctgccatatcgtttcacaccagcatgatggtatggaagcttatgtgaaagtcgacagttgtcctgaggagccacagttgcgcatgaagaataatgaagaagccgaggattacgacgacgatctcaccgattctgagatggacgtggtgaggtttgatgacgacaactctccctccttcattcaaatccggagcgtggcgaagaaacaccccaagacttgggtccactatatagcggcggaagaggaggattgggattacgctcctcttgtattggcaccagatgaccgctcatacaaaagccagtacctcaacaacggaccgcagagaattggccggaagtataagaaagtgcgatttatggcctatacagacgaaacctttaagacaagggaggccatccagcatgagagtgggattttgggacctcttctttacggcgaagttggtgataccctcctcatcatcttcaagaatcaagcttctcgcccctataacatttacccacacgggatcactgacgttaggcctttgtatagcagaagacttcccaaaggcgtgaagcatctcaaagacttccccattttgccaggcgagatctttaagtacaaatggaccgtcacagtggaagatggaccgactaaatcagaccctcgatgccttacgcggtactattcctccttcgtgaatatggagagagatttggcaagcggactcataggaccactcctcatctgttacaaggaatctgtagaccagaggggtaaccagattatgagtgataaacgcaatgtgatcctttttagcgtcttcgacgagaaccggtcctggtacttgaccgagaatatacaaaggttccttcccaaccccgcaggcgttcagttggaagaccctgagtttcaggccagcaatattatgcactcaatcaacggctatgtgtttgatagtctccagctttctgtttgcctccatgaagtagcctattggtacatcttgtcaattggtgctcaaacagacttcctctccgtcttcttctccggctacacctttaagcacaagatggtgtatgaggacactctcacactctttccattttctggagaaaccgtgttcatgagcatggagaatccaggcctttggatcttgggttgccacaacagtgattttcgcaatcggggaatgactgctctcctcaaagtcagcagctgtgataagaacacaggcgactattacgaagattcttacgaggacataagtgcctacttgttgtccaagaataacgccattgagcccagatcattctcccagaatcctcccgtgcttaaaaggcatcagcgcgaaatcaccagaactactcttcagtctgatcaagaggagattgactatgacgacaccataagcgtggaaatgaagaaggaggatttcgatatctatgacgaagatgagaaccagtctccgcggagctttcagaagaagacgcgacactacttcattgcagcagtcgaaaggctttgggactacggtatgtcatcatcccctcatgtgttgcgcaatagagctcagagtggaagtgttccacagttcaagaaagtcgtctttcaagagtttacagatggcagcttcacacagcctctctatcggggcgagcttaacgaacatttgggactccttggtccctatatccgagccgaagtggaggacaacattatggttacctttaggaatcaagcctctcgcccctacagcttctactcctccctcatcagttatgaggaggatcagagacaaggcgctgaaccacggaagaactttgtgaaaccgaatgagacgaagacctacttctggaaagtacagcaccacatggcccccacaaaagacgaattcgattgcaaagcatgggcgtatttttcagacgttgacttggagaaagatgtacattcaggacttattggtcctttgttggtgtgtcacactaacactctcaatccagcccatggcaggcaggtgacagtccaggaattcgctcttttctttaccatctttgatgagaccaagtcctggtacttcacggaaaacatggagcgcaattgcagagccccctgtaacatacagatggaggaccctacctttaaggaaaattatcggttccacgcaatcaacggatacattatggatacactccctggccttgtgatggctcaggaccaacgaatcaggtggtacctactcagcatgggttctaatgagaacatacactccattcacttttcaggacatgtgttcactgtccggaagaaagaagagtataagatggccctctacaatttgtatccaggcgtgtttgagaccgttgaaatgcttccctctaaagctggcatctggagagtagagtgcttgatcggagaacatcttcacgcaggtatgagcaccttgttcctcgtgtacagcaacaaatgtcagaccccacttggcatggccagtggacacattcgcgactttcagatcacagcatctggccagtatggacaatgggccccaaagttggctcgcctccattactccggtagcataaatgcgtggtccactaaagaacctttcagctggattaaggtcgatcttcttgcccccatgatcatccacggcattaagacacagggagcgaggcagaaattctcctccctctacatctcacagttcattattatgtatagtttggacggcaagaagtggcaaacttatagaggtaacagtactggaacactcatggtgttcttcggcaacgttgatagctctggcatcaaacacaacatctttaatcctcccataatagctcggtacatcagattgcatccgacccactacagcattaggagtacactccgaatggagcttatgggttgcgacttgaattcctgttcaatgccactcggaatggagtctaaagccatctctgatgcacagataaccgccagtagctactttacgaacatgtttgctacgtggtcaccctctaaggcaaggcttcatttgcaaggccggtctaatgcctggagacctcaggtgaacaacccgaaagaatggctccaggtggactttcagaagaccatgaaagtaacaggtgtcactactcagggagttaagtccttgctcaccagcatgtatgtgaaggagttccttatttcctcatcacaagatggccaccagtggaccctcttctttcagaatggtaaggtcaaagtgtttcagggcaatcaagacagcttcacacccgtggtgaacagtcttgatcctccactcttgacacgataccttcgaatccatccacagtcttgggttcaccagattgcattgcgcatggaagtacttggatgcgaggctcaggacctctac

SEQ ID NO: 2420 - protein, 1457 aa, synthetic construct
  REGION 1..1457: note = Variant of human B-domain deleted Factor VIII
MQIELSTCFFLCLLRFCFSATRRYYLGAVELSWDYMQSDLGELPVDARFPPRVPKSFPFNTSVVYKKTLFVEFTDHLFNIAKPRPPWMGLLGPTIQAEVYDTVVITLKNMASHPVSLHAVGVSYWKASEGAEYDDQTSQREKEDDKVFPGGSHTYVWQVLKENGPMASDPLCLTYSYLSHVDLVKDLNSGLIGALLVCREGSLAKEKTQTLHKFILLFAVFDEGKSWHSETKNSLMQDRDAASARAWPKMHTVNGYVNRSLPGLIGCHRKSVYWHVIGMGTTPEVHSIFLEGHTFLVRNHRQASLEISPITFLTAQTLLMDLGQFLLFCHIVSHQHDGMEAYVKVDSCPEEPQLRMKNNEEAEDYDDDLTDSEMDVVRFDDDNSPSFIQIRSVAKKHPKTWVHYIAAEEEDWDYAPLVLAPDDRSYKSQYLNNGPQRIGRKYKKVRFMAYTDETFKTREAIQHESGILGPLLYGEVGDTLLIIFKNQASRPYNIYPHGITDVRPLYSRRLPKGVKHLKDFPILPGEIFKYKWTVTVEDGPTKSDPRCLTRYYSSFVNMERDLASGLIGPLLICYKESVDQRGNQIMSDKRNVILFSVFDENRSWYLTENIQRFLPNPAGVQLEDPEFQASNIMHSINGYVFDSLQLSVCLHEVAYWYILSIGAQTDFLSVFFSGYTFKHKMVYEDTLTLFPFSGETVFMSMENPGLWILGCHNSDFRNRGMTALLKVSSCDKNTGDYYEDSYEDISAYLLSKNNAIEPRSFSQNPPVLKRHQREITRTTLQSDQEEIDYDDTISVEMKKEDFDIYDEDENQSPRSFQKKTRHYFIAAVERLWDYGMSSSPHVLRNRAQSGSVPQFKKVVFQEFTDGSFTQPLYRGELNEHLGLLGPYIRAEVEDNIMVTFRNQASRPYSFYSSLISYEEDQRQGAEPRKNFVKPNETKTYFWKVQHHMAPTKDEFDCKAWAYFSDVDLEKDVHSGLIGPLLVCHTNTLNPAHGRQVTVQEFALFFTIFDETKSWYFTENMERNCRAPCNIQMEDPTFKENYRFHAINGYIMDTLPGLVMAQDQRIRWYLLSMGSNENIHSIHFSGHVFTVRKKEEYKMALYNLYPGVFETVEMLPSKAGIWRVECLIGEHLHAGMSTLFLVYSNKCQTPLGMASGHIRDFQITASGQYGQWAPKLARLHYSGSINAWSTKEPFSWIKVDLLAPMIIHGIKTQGARQKFSSLYISQFIIMYSLDGKKWQTYRGNSTGTLMVFFGNVDSSGIKHNIFNPPIIARYIRLHPTHYSIRSTLRMELMGCDLNSCSMPLGMESKAISDAQITASSYFTNMFATWSPSKARLHLQGRSNAWRPQVNNPKEWLQVDFQKTMKVTGVTTQGVKSLLTSMYVKEFLISSSQDGHQWTLFFQNGKVKVFQGNQDSFTPVVNSLDPPLLTRYLRIHPQSWVHQIALRMEVLGCEAQDLY

SEQ ID NO: 2421 - DNA, 4371 bp, synthetic construct
  misc_feature 1..4371: note = Variant of human B-domain deleted Factor VIII
  source 1..4371: mol_type = other DNA
atgcagattgaactgtctacctgcttcttcctctgtttgctgaggttctgctttagcgccactagacggtactaccttggcgctgtggagctgtcctgggactatatgcagagtgatttgggagagcttcccgtcgacgcacgatttcctcctcgcgttccaaagtcatttcccttcaacacaagcgtggtgtacaagaagacgctcttcgtcgaattcaccgatcacctgttcaatatcgccaaacccagaccaccatggatgggtcttttggggcctaccatacaagcggaggtgtatgacacagttgttatcactctcaagaacatggcttctcatccggtaagtcttcacgcagtgggcgtgtcctactggaaagcttcagaaggagccgagtatgatgatcagacatcccagagggagaaagaagacgacaaggtatttccaggtgggtctcatacctatgtgtggcaagtgctcaaagagaatggccctatggcaagcgatccgaagtgtttgacttacagctacctttcacacgttgacctcgtcaaggacctcaactccgggttgattggagccttgttggtatgcagggaaggatctcttgccaaagagaagacacagaccctccacaagtttatccttctctttgctgtgttcgatgagggcaaaagttggcatagcgaaacgaagaattccctcatgcaggatcgcgacgcagccagcgccagagcttggcccaagatgcacactgtgaacggatatgtcaataggtcacttcctggcttgattgggtgtcatcggaaaagtgtctactggcacgtgatcggaatggggacaacaccagaggtccactccatatttctcgaaggccataccttccttgttcgaaaccacagacaggcatccttggagatctctcccattacctttctcactgcccaaacgctccttatggacttgggtcagttccttctcttctgccatatcagctcacaccagcatgatggtatggaagcttatgtgaaagtcgacagttgtcctgaggagccacagttgcgcatgaagaataatgaagaagccgaggattacgacgacgatctcaccgattctgagatggacgtggtgaggtttgatgacgacaactctccctccttcattcaaatccggagcgtggcgaagaaacaccccaagacttgggtccactatatagcggcggaagaggaggattgggattacgctcctcttgtattggcaccagatgaccgctcatacaaaagccagtacctcaacaacggaccgcagagaattggccggaagtataagaaagtgcgatttatggcctatacagacgaaacctttaagacaagggaggccatccagcatgagagtgggattttgggacctcttctttacggcgaagttggtgataccctcctcatcatcttcaagaatcaagcttctcgcccctataacatttacccacacgggatcactgacgttaggcctttgtatagcagaagacttcccaaaggcgtgaagcatctcaaagacttccccattttgccaggcgagatctttaagtacaaatggaccgtcacagtggaagatggaccgactaaatcagaccctcgatgccttacgcggtactattcctccttcgtgaatatggagagagatttggcaagcggactcataggaccactcctcatctgttacaaggaatctgtagaccagaggggtaaccagattatgagtgataaacgcaatgtgatcctttttagcgtcttcgacgagaaccggtcctggtacttgaccgagaatatacaaaggttccttcccaaccccgcaggcgttcagttggaagaccctgagtttcaggccagcaatattatgcactcaatcaacggctatgtgtttgatagtctccagctttctgtttgcctccatgaagtagcctattggtacatcttgtcaattggtgctcaaacagacttcctctccgtcttcttctccggctacacctttaagcacaagatggtgtatgaggacactctcacactctttccattttctggagaaaccgtgttcatgagcatggagaatccaggcctttggatcttgggttgccacaacagtgattttcgcaatcggggaatgactgctctcctcaaagtcagcagctgtgataagaacacaggcgactattacgaagattcttacgaggacataagtgcctacttgttgtccaagaataacgccattgagcccagatcattctcccagaatcctcccgtgcttaaaaggcatcagcgcgaaatcaccagaactactcttcagtctgatcaagaggagattgactatgacgacaccataagcgtggaaatgaagaaggaggatttcgatatctatgacgaagatgagaaccagtctccgcggagctttcagaagaagacgcgacactacttcattgcagcagtcgaaaggctttgggactacggtatgtcatcatcccctcatgtgttgcgcaatagagctcagagtggaagtgttccacagttcaagaaagtcgtctttcaagagtttacagatggcagcttcacacagcctctctatcggggcgagcttaacgaacatttgggactccttggtccctatatccgagccgaagtggaggacaacattatggttacctttaggaatcaagcctctcgcccctacagcttctactcctccctcatcagttatgaggaggatcagagacaaggcgctgaaccacggaagaactttgtgaaaccgaatgagacgaagacctacttctggaaagtacagcaccacatggcccccacaaaagacgaattcgattgcaaagcatgggcgtatttttcagacgttgacttggagaaagatgtacattcaggacttattggtcctttgttggtgtgtcacactaacactctcaatccagcccatggcaggcaggtgacagtccaggaattcgctcttttctttaccatctttgatgagaccaagtcctggtacttcacggaaaacatggagcgcaattgcagagccccctgtaacatacagatggaggaccctacctttaaggaaaattatcggttccacgcaatcaacggatacattatggatacactccctggccttgtgatggctcaggaccaacgaatcaggtggtacctcctaagcatgggttctaatgagaacatacactccattcacttttcaggacatgtgttcactgtccggaagaaagaagagtataagatggccctctacaatttgtatccaggcgtgtttgagaccgttgaaatgcttccctctaaagctggcatctggagagtagagtgcttgatcggagaacatcttcacgcaggtatgagcaccttgttcctcgtgtacagcaacaaatgtcagaccccacttggcatggccagtggacacattcgcgactttcagatcacagcatctggccagtatggacaatgggccccaaagttggctcgcctccattactccggtagcataaatgcgtggtccactaaagaacctttcagctggattaaggtcgatcttcttgcccccatgatcatccacggcattaagacacagggagcgaggcagaaattctcctccctctacatctcacagttcattattatgtatagtttggacggcaagaagtggcaaacttatagaggtaacagtactggaacactcatggtgttcttcggcaacgttgatagctctggcatcaaacacaacatctttaatcctcccataatagctcggtacatcagattgcatccgacccactacagcattaggagtacactccgaatggagcttatgggttgcgacttgaattcctgttcaatgccactcggaatggagtctaaagccatctctgatgcacagataaccgccagtagctactttacgaacatgtttgctacgtggtcaccctctaaggcaaggcttcatttgcaaggccggtctaatgcctggagacctcaggtgaacaacccgaaagaatggctccaggtggactttcagaagaccatgaaagtaacaggtgtcactactcagggagttaagtccttgctcaccagcatgtatgtgaaggagttccttatttcctcatcacaagatggccaccagtggaccctcttctttcagaatggtaaggtcaaagtgtttcagggcaatcaagacagcttcacacccgtggtgaacagtcttgatcctccactcttgacacgataccttcgaatccatccacagtcttgggttcaccagattgcattgcgcatggaagtacttggatgcgaggctcaggacctctac

SEQ ID NO: 2422 - protein, 1457 aa, synthetic construct
  REGION 1..1457: note = Variant of human B-domain deleted Factor VIII
MQIELSTCFFLCLLRFCFSATRRYYLGAVELSWDYMQSDLGELPVDARFPPRVPKSFPFNTSVVYKKTLFVEFTDHLFNIAKPRPPWMGLLGPTIQAEVYDTVVITLKNMASHPVSLHAVGVSYWKASEGAEYDDQTSQREKEDDKVFPGGSHTYVWQVLKENGPMASDPKCLTYSYLSHVDLVKDLNSGLIGALLVCREGSLAKEKTQTLHKFILLFAVFDEGKSWHSETKNSLMQDRDAASARAWPKMHTVNGYVNRSLPGLIGCHRKSVYWHVIGMGTTPEVHSIFLEGHTFLVRNHRQASLEISPITFLTAQTLLMDLGQFLLFCHISSHQHDGMEAYVKVDSCPEEPQLRMKNNEEAEDYDDDLTDSEMDVVRFDDDNSPSFIQIRSVAKKHPKTWVHYIAAEEEDWDYAPLVLAPDDRSYKSQYLNNGPQRIGRKYKKVRFMAYTDETFKTREAIQHESGILGPLLYGEVGDTLLIIFKNQASRPYNIYPHGITDVRPLYSRRLPKGVKHLKDFPILPGEIFKYKWTVTVEDGPTKSDPRCLTRYYSSFVNMERDLASGLIGPLLICYKESVDQRGNQIMSDKRNVILFSVFDENRSWYLTENIQRFLPNPAGVQLEDPEFQASNIMHSINGYVFDSLQLSVCLHEVAYWYILSIGAQTDFLSVFFSGYTFKHKMVYEDTLTLFPFSGETVFMSMENPGLWILGCHNSDFRNRGMTALLKVSSCDKNTGDYYEDSYEDISAYLLSKNNAIEPRSFSQNPPVLKRHQREITRTTLQSDQEEIDYDDTISVEMKKEDFDIYDEDENQSPRSFQKKTRHYFIAAVERLWDYGMSSSPHVLRNRAQSGSVPQFKKVVFQEFTDGSFTQPLYRGELNEHLGLLGPYIRAEVEDNIMVTFRNQASRPYSFYSSLISYEEDQRQGAEPRKNFVKPNETKTYFWKVQHHMAPTKDEFDCKAWAYFSDVDLEKDVHSGLIGPLLVCHTNTLNPAHGRQVTVQEFALFFTIFDETKSWYFTENMERNCRAPCNIQMEDPTFKENYRFHAINGYIMDTLPGLVMAQDQRIRWYLLSMGSNENIHSIHFSGHVFTVRKKEEYKMALYNLYPGVFETVEMLPSKAGIWRVECLIGEHLHAGMSTLFLVYSNKCQTPLGMASGHIRDFQITASGQYGQWAPKLARLHYSGSINAWSTKEPFSWIKVDLLAPMIIHGIKTQGARQKFSSLYISQFIIMYSLDGKKWQTYRGNSTGTLMVFFGNVDSSGIKHNIFNPPIIARYIRLHPTHYSIRSTLRMELMGCDLNSCSMPLGMESKAISDAQITASSYFTNMFATWSPSKARLHLQGRSNAWRPQVNNPKEWLQVDFQKTMKVTGVTTQGVKSLLTSMYVKEFLISSSQDGHQWTLFFQNGKVKVFQGNQDSFTPVVNSLDPPLLTRYLRIHPQSWVHQIALRMEVLGCEAQDLY

SEQ ID NO: 2423 - DNA, 4371 bp, synthetic construct
  misc_feature 1..4371: note = Variant of human B-domain deleted Factor VIII
  source 1..4371: mol_type = other DNA
atgcagattgaactgtctacctgcttcttcctctgtttgctgaggttctgctttagcgccactagacggtactaccttggcgctgtggagctgtcctgggactatatgcagagtgatttgggagagcttcccgtcgacgcacgatttcctcctcgcgttccaaagtcatttcccttcaacacaagcgtggtgtacaagaagacgctcttcgtcgaattcaccgatcacctgttcaatatcgccaaacccagaccaccatggatgggtcttttggggcctaccatacaagcggaggtgtatgacacagttgttatcactctcaagaacatggcttctcatccggtaagtcttcacgcagtgggcgtgtcctactggaaagcttcagaaggagccgagtatgatgatcagacatcccagagggagaaagaagacgacaaggtatttccaggtgggtctcatacctatgtgtggcaagtgctcaaagagaatggccctatggcaagcgatccgctctgtttgacttacagctacctttcacacgttgacctcgtcaaggacctcaactccgggttgattggagccttgttggtatgcagggaaggatctcttgccaaagagaagacacagaccctccacaagtttatccttctctttgctgtgttcgatgagggcaaaagttggcatagcgaaacgaagaattccctcatgcaggatcgcgacgcagccagcgccagagcttggcccaagatgcacactgtgaacggatatgtcaataggtcacttcctggcttgattgggtgtcatcggaaaagtgtctactggcacgtgatcggaatggggacaacaccagaggtccactccatatttctcgaaggccataccttccttgttcgaaaccacagacaggcatccttggagatctctcccattacctttctcactgcccaaacgctccttatggacttgggtcagttccttctcttctgccatatcagctcacaccagcatgatggtatggaagcttatgtgaaagtcgacagttgtcctgaggagccacagttgcgcatgaagaataatgaagaagccgaggattacgacgacgatctcaccgattctgagatggacgtggtgaggtttgatgacgacaactctccctccttcattcaaatccggagcgtggcgaagaaacaccccaagacttgggtccactatatagcggcggaagaggaggattgggattacgctcctcttgtattggcaccagatgaccgctcatacaaaagccagtacctcaacaacggaccgcagagaattggccggaagtataagaaagtgcgatttatggcctatacagacgaaacctttaagacaagggaggccatccagcatgagagtgggattttgggacctcttctttacggcgaagttggtgataccctcctcatcatcttcaagaatcaagcttctcgcccctataacatttacccacacgggatcactgacgttaggcctttgtatagcagaagacttcccaaaggcgtgaagcatctcaaagacttccccattttgccaggcgagatctttaagtacaaatggaccgtcacagtggaagatggaccgactaaatcagaccctcgatgccttacgcggtactattcctccttcgtgaatatggagagagatttggcaagcggactcataggaccactcctcatctgttacaaggaatctgtagaccagaggggtaaccagattatgagtgataaacgcaatgtgatcctttttagcgtcttcgacgagaaccggtcctggtacttgaccgagaatatacaaaggttccttcccaaccccgcaggcgttcagttggaagaccctgagtttcaggccagcaatattatgcactcaatcaacggctatgtgtttgatagtctccagctttctgtttgcctccatgaagtagcctattggtacatcttgtcaattggtgctcaaacagacttcctctccgtcttcttctccggctacacctttaagcacaagatggtgtatgaggacactctcacactctttccattttctggagaaaccgtgttcatgagcatggagaatccaggcctttggatcttgggttgccacaacagtgattttcgcaatcggggaatgactgctctcctcaaagtcagcagctgtgataagaacacaggcgactattacgaagattcttacgaggacataagtgcctacttgttgtccaagaataacgccattgagcccagatcattctcccagaatcctcccgtgcttaaaaggcatcagcgcgaaatcaccagaactactcttcagtctgatcaagaggagattgactatgacgacaccataagcgtggaaatgaagaaggaggatttcgatatctatgacgaagatcagaaccagtctccgcggagctttcagaagaagacgcgacactacttcattgcagcagtcgaaaggctttgggactacggtatgtcatcatcccctcatgtgttgcgcaatagagctcagagtggaagtgttccacagttcaagaaagtcgtctttcaagagtttacagatggcagcttcacacagcctctctatcggggcgagcttaacgaacatttgggactccttggtccctatatccgagccgaagtggaggacaacattatggttacctttaggaatcaagcctctcgcccctacagcttctactcctccctcatcagttatgaggaggatcagagacaaggcgctgaaccacggaagaactttgtgaaaccgaatgagacgaagacctacttctggaaagtacagcaccacatggcccccacaaaagacgaattcgattgcaaagcatgggcgtatttttcagacgttgacttggagaaagatgtacattcaggacttattggtcctttgttggtgtgtcacactaacactctcaatccagcccatggcaggcaggtgacagtccaggaattcgctcttttctttaccatctttgatgagaccaagtcctggtacttcacggaaaacatggagcgcaattgcagagccccctgtaacatacagatggaggaccctacctttaaggaaaattatcggttccacgcaatcaacggatacattatggatacactccctggccttgtgatggctcaggaccaacgaatcaggtggtacctcctcagcatgggttctaatgagaacatacactccattcacttttcaggacatgtgttcactgtccggaagaaagaagagtataagatggccctctacaatttgtatccaggcgtgtttgagaccgttgaaatgcttccctctaaagctggcatctggagagtagagtgcttgatcggagaacatcttcacgcaggtatgagcaccttgttcctcgtgtacagcaacaaatgtcagaccccacttggcatggccagtggacacattcgcgactttcagatcacagcatctggccagtatggacaatgggccccaaagttggctcgcctccattactccggtagcataaatgcgtggtccactaaagaacctttcagctggattaaggtcgatcttcttgcccccatgatcatccacggcattaagacacagggagcgaggcagaaattctcctccctctacatctcacagttcattattatgtatagtttggacggcaagaagtggcaaacttatagaggtaacagtactggaacactcatggtgttcttcggcaacgttgatagctctggcatcaaacacaacatctttaatcctcccataatagctcggtacatcagattgcatccgacccactacagcattaggagtacactccgaatggagcttatgggttgcgacttgaattcctgttcaatgccactcggaatggagtctaaagccatctctgatgcacagataaccgccagtagctactttacgaacatgtttgctacgtggtcaccctctaaggcaaggcttcatttgcaaggccggtctaatgcctggagacctcaggtgaacaacccgaaagaatggctccaggtggactttcagaagaccatgaaagtaacaggtgtcactactcagggagttaagtccttgctcaccagcatgtatgtgaaggagttccttatttcctcatcacaagatggccaccagtggaccctcttctttcagaatggtaaggtcaaagtgtttcagggcaatcaagacagcttcacacccgtggtgaacagtcttgatcctccactcttgacacgataccttcgaatccatccacagtcttgggttcaccagattgcattgcgcatggaagtacttggatgcgaggctcaggacctctac

SEQ ID NO: 2424 - protein, 1457 aa, synthetic construct
  REGION 1..1457: note = Variant of human B-domain deleted Factor VIII
MQIELSTCFFLCLLRFCFSATRRYYLGAVELSWDYMQSDLGELPVDARFPPRVPKSFPFNTSVVYKKTLFVEFTDHLFNIAKPRPPWMGLLGPTIQAEVYDTVVITLKNMASHPVSLHAVGVSYWKASEGAEYDDQTSQREKEDDKVFPGGSHTYVWQVLKENGPMASDPLCLTYSYLSHVDLVKDLNSGLIGALLVCREGSLAKEKTQTLHKFILLFAVFDEGKSWHSETKNSLMQDRDAASARAWPKMHTVNGYVNRSLPGLIGCHRKSVYWHVIGMGTTPEVHSIFLEGHTFLVRNHRQASLEISPITFLTAQTLLMDLGQFLLFCHISSHQHDGMEAYVKVDSCPEEPQLRMKNNEEAEDYDDDLTDSEMDVVRFDDDNSPSFIQIRSVAKKHPKTWVHYIAAEEEDWDYAPLVLAPDDRSYKSQYLNNGPQRIGRKYKKVRFMAYTDETFKTREAIQHESGILGPLLYGEVGDTLLIIFKNQASRPYNIYPHGITDVRPLYSRRLPKGVKHLKDFPILPGEIFKYKWTVTVEDGPTKSDPRCLTRYYSSFVNMERDLASGLIGPLLICYKESVDQRGNQIMSDKRNVILFSVFDENRSWYLTENIQRFLPNPAGVQLEDPEFQASNIMHSINGYVFDSLQLSVCLHEVAYWYILSIGAQTDFLSVFFSGYTFKHKMVYEDTLTLFPFSGETVFMSMENPGLWILGCHNSDFRNRGMTALLKVSSCDKNTGDYYEDSYEDISAYLLSKNNAIEPRSFSQNPPVLKRHQREITRTTLQSDQEEIDYDDTISVEMKKEDFDIYDEDQNQSPRSFQKKTRHYFIAAVERLWDYGMSSSPHVLRNRAQSGSVPQFKKVVFQEFTDGSFTQPLYRGELNEHLGLLGPYIRAEVEDNIMVTFRNQASRPYSFYSSLISYEEDQRQGAEPRKNFVKPNETKTYFWKVQHHMAPTKDEFDCKAWAYFSDVDLEKDVHSGLIGPLLVCHTNTLNPAHGRQVTVQEFALFFTIFDETKSWYFTENMERNCRAPCNIQMEDPTFKENYRFHAINGYIMDTLPGLVMAQDQRIRWYLLSMGSNENIHSIHFSGHVFTVRKKEEYKMALYNLYPGVFETVEMLPSKAGIWRVECLIGEHLHAGMSTLFLVYSNKCQTPLGMASGHIRDFQITASGQYGQWAPKLARLHYSGSINAWSTKEPFSWIKVDLLAPMIIHGIKTQGARQKFSSLYISQFIIMYSLDGKKWQTYRGNSTGTLMVFFGNVDSSGIKHNIFNPPIIARYIRLHPTHYSIRSTLRMELMGCDLNSCSMPLGMESKAISDAQITASSYFTNMFATWSPSKARLHLQGRSNAWRPQVNNPKEWLQVDFQKTMKVTGVTTQGVKSLLTSMYVKEFLISSSQDGHQWTLFFQNGKVKVFQGNQDSFTPVVNSLDPPLLTRYLRIHPQSWVHQIALRMEVLGCEAQDLY

SEQ ID NO: 2425 - DNA, 4371 bp, synthetic construct
  misc_feature 1..4371: note = Variant of human B-domain deleted Factor VIII
  source 1..4371: mol_type = other DNA
atgcagattgaactgtctacctgcttcttcctctgtttgctgaggttctgctttagcgccactagacggtactaccttggcgctgtggagctgtcctgggactatatgcagagtgatttgggagagcttcccgtcgacgcacgatttcctcctcgcgttccaaagtcatttcccttcaacacaagcgtggtgtacaagaagacgctcttcgtcgaattcaccgatcacctgttcaatatcgccaaacccagaccaccatggatgggtcttttggggcctaccatacaagcggaggtgtatgacacagttgttatcactctcaagaacatggcttctcatccggtaagtcttcacgcagtgggcgtgtcctactggaaagcttcagaaggagccgagtatgatgatcagacatcccagagggagaaagaagacgacaaggtatttccaggtgggtctcatacctatgtgtggcaagtgctcaaagagaatggccctatggcaagcgatccgctctgtttgacttacagctacctttcacacgttgacctcgtcaaggacctcaactccgggttgattggagccttgttggtatgcagggaaggatctcttgccaaagagaagacacagaccctccacaagtttatccttctctttgctgtgttcgatgagggcaaaagttggcatagcgaaacgaagaattccctcatgcaggatcgcgacgcagccagcgccagagcttggcccaagatgcacactgtgaacggatatgtcaataggtcacttcctggcttgattgggtgtcatcggaaaagtgtctactggcacgtgatcggaatggggacaacaccagaggtccactccatatttctcgaaggccataccttccttgttcgaaaccacagacaggcatccttggagatctctcccattacctttctcactgcccaaacgctccttatggacttgggtcagttccttctcttctgccatatcagctcacaccagcatgatggtatggaagcttatgtgaaagtcgacagttgtcctgaggagccacagttgcgcatgaagaataatgaagaagccgaggattacgacgacgatctcaccgattctgagatggacgtggtgaggtttgatgacgacaactctccctccttcattcaaatccggagcgtggcgaagaaacaccccaagacttgggtccactatatagcggcggaagaggaggattgggattacgctcctcttgtattggcaccagatgaccgctcatacaaaagccagtacctcaacaacggaccgcagagaattggccggaagtataagaaagtgcgatttatggcctatacagacgaaacctttaagacaagggaggccatccagcatgagagtgggattttgggacctcttctttacggcgaagttggtgataccctcctcatcatcttcaagaatcaagcttctcgcccctataacatttacccacacgggatcactgacgttaggcctttgtatagcagaagacttcccaaaggcgtgaagcatctcaaagacttccccattttgccaggcgagatctttaagtacaaatggaccgtcacagtggaagatggaccgactaaatcagaccctcgatgccttacgcggtactattcctccttcgtgaatatggagagagatttggcaagcggactcataggaccactcctcatctgttacaaggaatctgtagaccagaggggtaaccagattatgagtgataaacgcaatgtgatcctttttagcgtcttcgacgagaaccggtcctggtacttgaccgagaatatacaaaggttccttcccaaccccgcaggcgttcagttggaagaccctgagtttcaggccagcaatattatgcactcaatcaacggctatgtgtttgatagtctccagctttctgtttgcctccatgaagtagcctattggtacatcttgtcaattggtgctcaaacagacttcctctccgtcttcttctccggctacacctttaagcacaagcttgtgtatgaggacactctcacactctttccattttctggagaaaccgtgttcatgagcatggagaatccaggcctttggatcttgggttgccacaacagtgattttcgcaatcggggaatgactgctctcctcaaagtcagcagctgtgataagaacacaggcgactattacgaagattcttacgaggacataagtgcctacttgttgtccaagaataacgccattgagcccagatcattctcccagaatcctcccgtgcttaaaaggcatcagcgcgaaatcaccagaactactcttcagtctgatcaagaggagattgactatgacgacaccataagcgtggaaatgaagaaggaggatttcgatatctatgacgaagatgagaaccagtctccgcggagctttcagaagaagacgcgacactacttcattgcagcagtcgaaaggctttgggactacggtatgtcatcatcccctcatgtgttgcgcaatagagctcagagtggaagtgttccacagttcaagaaagtcgtctttcaagagtttacagatggcagcttcacacagcctctctatcggggcgagcttaacgaacatttgggactccttggtccctatatccgagccgaagtggaggacaacattatggttacctttaggaatcaagcctctcgcccctacagcttctactcctccctcatcagttatgaggaggatcagagacaaggcgctgaaccacggaagaactttgtgaaaccgaatgagacgaagacctacttctggaaagtacagcaccacatggcccccacaaaagacgaattcgattgcaaagcatgggcgtatttttcagacgttgacttggagaaagatgtacattcaggacttattggtcctttgttggtgtgtcacactaacactctcaatccagcccatggcaggcaggtgacagtccaggaattcgctcttttctttaccatctttgatgagaccaagtcctggtacttcacggaaaacatggagcgcaattgcagagccccctgtaacatacagatggaggaccctacctttaaggaaaattatcggttccacgcaatcaacggatacattatggatacactccctggccttgtgatggctcaggaccaacgaatcaggtggtacctcctcagcatgggttctaatgagaacatacactccattcacttttcaggacatgtgttcactgtccggaagaaagaagagtataagatggccctctacaatttgtatccaggcgtgtttgagaccgttgaaatgcttccctctaaagctggcatctggagagtagagtgcttgatcggagaacatcttcacgcaggtatgagcaccttgttcctcgtgtacagcaacaaatgtcagaccccacttggcatggccagtggacacattcgcgactttcagatcacagcatctggccagtatggacaatgggccccaaagttggctcgcctccattactccggtagcataaatgcgtggtccactaaagaacctttcagctggattaaggtcgatcttcttgcccccatgatcatccacggcattaagacacagggagcgaggcagaaattctcctccctctacatctcacagttcattattatgtatagtttggacggcaagaagtggcaaacttatagaggtaacagtactggaacactcatggtgttcttcggcaacgttgatagctctggcatcaaacacaacatctttaatcctcccataatagctcggtacatcagattgcatccgacccactacagcattaggagtacactccgaatggagcttatgggttgcgacttgaattcctgttcaatgccactcggaatggagtctaaagccatctctgatgcacagataaccgccagtagctactttacgaacatgtttgctacgtggtcaccctctaaggcaaggcttcatttgcaaggccggtctaatgcctggagacctcaggtgaacaacccgaaagaatggctccaggtggactttcagaagaccatgaaagtaacaggtgtcactactcagggagttaagtccttgctcaccagcatgtatgtgaaggagttccttatttcctcatcacaagatggccaccagtggaccctcttctttcagaatggtaaggtcaaagtgtttcagggcaatcaagacagcttcacacccgtggtgaacagtcttgatcctccactcttgacacgataccttcgaatccatccacagtcttgggttcaccagattgcattgcgcatggaagtacttggatgcgaggctcaggacctctac

SEQ ID NO: 2426 - protein, 1457 aa, synthetic construct
  REGION 1..1457: note = Variant of human B-domain deleted Factor VIII
MQIELSTCFFLCLLRFCFSATRRYYLGAVELSWDYMQSDLGELPVDARFPPRVPKSFPFNTSVVYKKTLFVEFTDHLFNIAKPRPPWMGLLGPTIQAEVYDTVVITLKNMASHPVSLHAVGVSYWKASEGAEYDDQTSQREKEDDKVFPGGSHTYVWQVLKENGPMASDPLCLTYSYLSHVDLVKDLNSGLIGALLVCREGSLAKEKTQTLHKFILLFAVFDEGKSWHSETKNSLMQDRDAASARAWPKMHTVNGYVNRSLPGLIGCHRKSVYWHVIGMGTTPEVHSIFLEGHTFLVRNHRQASLEISPITFLTAQTLLMDLGQFLLFCHISSHQHDGMEAYVKVDSCPEEPQLRMKNNEEAEDYDDDLTDSEMDVVRFDDDNSPSFIQIRSVAKKHPKTWVHYIAAEEEDWDYAPLVLAPDDRSYKSQYLNNGPQRIGRKYKKVRFMAYTDETFKTREAIQHESGILGPLLYGEVGDTLLIIFKNQASRPYNIYPHGITDVRPLYSRRLPKGVKHLKDFPILPGEIFKYKWTVTVEDGPTKSDPRCLTRYYSSFVNMERDLASGLIGPLLICYKESVDQRGNQIMSDKRNVILFSVFDENRSWYLTENIQRFLPNPAGVQLEDPEFQASNIMHSINGYVFDSLQLSVCLHEVAYWYILSIGAQTDFLSVFFSGYTFKHKLVYEDTLTLFPFSGETVFMSMENPGLWILGCHNSDFRNRGMTALLKVSSCDKNTGDYYEDSYEDISAYLLSKNNAIEPRSFSQNPPVLKRHQREITRTTLQSDQEEIDYDDTISVEMKKEDFDIYDEDENQSPRSFQKKTRHYFIAAVERLWDYGMSSSPHVLRNRAQSGSVPQFKKVVFQEFTDGSFTQPLYRGELNEHLGLLGPYIRAEVEDNIMVTFRNQASRPYSFYSSLISYEEDQRQGAEPRKNFVKPNETKTYFWKVQHHMAPTKDEFDCKAWAYFSDVDLEKDVHSGLIGPLLVCHTNTLNPAHGRQVTVQEFALFFTIFDETKSWYFTENMERNCRAPCNIQMEDPTFKENYRFHAINGYIMDTLPGLVMAQDQRIRWYLLSMGSNENIHSIHFSGHVFTVRKKEEYKMALYNLYPGVFETVEMLPSKAGIWRVECLIGEHLHAGMSTLFLVYSNKCQTPLGMASGHIRDFQITASGQYGQWAPKLARLHYSGSINAWSTKEPFSWIKVDLLAPMIIHGIKTQGARQKFSSLYISQFIIMYSLDGKKWQTYRGNSTGTLMVFFGNVDSSGIKHNIFNPPIIARYIRLHPTHYSIRSTLRMELMGCDLNSCSMPLGMESKAISDAQITASSYFTNMFATWSPSKARLHLQGRSNAWRPQVNNPKEWLQVDFQKTMKVTGVTTQGVKSLLTSMYVKEFLISSSQDGHQWTLFFQNGKVKVFQGNQDSFTPVVNSLDPPLLTRYLRIHPQSWVHQIALRMEVLGCEAQDLY

SEQ ID NO: 2427 - DNA, 4371 bp, synthetic construct
  misc_feature 1..4371: note = Variant of human B-domain deleted Factor VIII
  source 1..4371: mol_type = other DNA
atgcagattgaactgtctacctgcttcttcctctgtttgctgaggttctgctttagcgccactagacggtactaccttggcgctgtggagctgtcctgggactatatgcagagtgatttgggagagcttcccgtcgacgcacgatttcctcctcgcgttccaaagtcatttcccttcaacacaagcgtggtgtacaagaagacgctcttcgtcgaattcaccgatcacctgttcaatatcgccaaacccagaccaccatggatgggtcttttggggcctaccatacaagcggaggtgtatgacacagttgttatcactctcaagaacatggcttctcatccggtaagtcttcacgcagtgggcgtgtcctactggaaagcttcagaaggagccgagtatgatgatcagacatcccagagggagaaagaagacgacaaggtatttccaggtgggtctcatacctatgtgtggcaagtgctcaaagagaatggccctatggcaagcgatccgctctgtttgacttacagctacctttcacacgttgacctcgtcaaggacctcaactccgggttgattggagccttgttggtatgcagggaaggatctcttgccaaagagaagacacagaccctccacaagtttatccttctctttgctgtgttcgatgagggcaaaagttggcatagcgaaacgaagaattccctcatgcaggatcgcgacgcagccagcgccagagcttggcccaagatgcacactgtgaacggatatgtcaataggtcacttcctggcttgattgggtgtcatcggaaaagtgtctactggcacgtgatcggaatggggacaacaccagaggtccactccatatttctcgaaggccataccttccttgttcgaaaccacagacaggcatccttggagatctctcccattacctttctcactgcccaaacgctccttatggacttgggtcagttccttctcttctgccatatcagctcacaccagcatgatggtatggaagcttatgtgaaagtcgacagttgtcctgaggagccacagttgcgcatgaagaataatgaagaagccgaggattacgacgacgatctcaccgattctgagatggacgtggtgaggtttgatgacgacaactctccctccttcattcaaatccggagcgtggcgaagaaacaccccaagacttgggtccactatatagcggcggaagaggaggattgggattacgctcctcttgtattggcaccagatgaccgctcatacaaaagccagtacctcaacaacggaccgcagagaattggccggaagtataagaaagtgcgatttatggcctatacagacgaaacctttaagacaagggaggccatccagcatgagagtgggattttgggacctcttctttacggcgaagttggtgataccctcctcatcatcttcaagaatcaagcttctcgcccctataacatttacccacacgggatcactgacgttaggcctttgtatagcagaagacttcccaaaggcgtgaagcatctcaaagacttccccattttgccaggcgagatctttaagtacaaatggaccgtcacagtggaagatggaccgactaaatcagaccctcgatgccttacgcggtactattcctccttcgtgaatatggagagagatttggcaagcggactcataggaccactcctcatctgttacaaggaatctgtagaccagaggggtaaccagattatgagtgataaacgcaatgtgatcctttttagcgtcttcgacgagaaccggtcctggtacttgaccgagaatatacaaaggttccttcccaaccccgcaggcgttcagttggaagaccctgagtttcaggccagcaatattatgcactcaatcaacggctatgtgtttgatagtctccagctttctgtttgcctccatgaagtagcctattggtacatcttgtcaattggtgctcaaacagacttcctctccgtcttcttctccggctacacctttaagcacaagatggtgtatgaggacactctcacactctttccattttctggagaaaccgtgttcatgagcatggagaatccaggcctttggatcttgggttgccacaacagtgattttcgcaatcggggaatgactgctctcctcaaagtcagcagctgtgataagaacacaggcgactattacgaagattcttacgaggacataagtgcctacttgttgtccaagaataacgccattgagcccagatcattctcccagaatcctcccgtgcttaaaaggcatcagcgcgaaatcaccagaactactcttcagtctgatcaagaggagattgactatgacgacaccataagcgtggaaatgaagaagggggatttcgatatctatgacgaagatgagaaccagtctccgcggagctttcagaagaagacgcgacactacttcattgcagcagtcgaaaggctttgggactacggtatgtcatcatcccctcatgtgttgcgcaatagagctcagagtggaagtgttccacagttcaagaaagtcgtctttcaagagtttacagatggcagcttcacacagcctctctatcggggcgagcttaacgaacatttgggactccttggtccctatatccgagccgaagtggaggacaacattatggttacctttaggaatcaagcctctcgcccctacagcttctactcctccctcatcagttatgaggaggatcagagacaaggcgctgaaccacggaagaactttgtgaaaccgaatgagacgaagacctacttctggaaagtacagcaccacatggcccccacaaaagacgaattcgattgcaaagcatgggcgtatttttcagacgttgacttggagaaagatgtacattcaggacttattggtcctttgttggtgtgtcacactaacactctcaatccagcccatggcaggcaggtgacagtccaggaattcgctcttttctttaccatctttgatgagaccaagtcctggtacttcacggaaaacatggagcgcaattgcagagccccctgtaacatacagatggaggaccctacctttaaggaaaattatcggttccacgcaatcaacggatacattatggatacactccctggccttgtgatggctcaggaccaacgaatcaggtggtacctcctcagcatgggttctaatgagaacatacactccattcacttttcaggacatgtgttcactgtccggaagaaagaagagtataagatggccctctacaatttgtatccaggcgtgtttgagaccgttgaaatgcttccctctaaagctggcatctggagagtagagtgcttgatcggagaacatcttcacgcaggtatgagcaccttgttcctcgtgtacagcaacaaatgtcagaccccacttggcatggccagtggacacattcgcgactttcagatcacagcatctggccagtatggacaatgggccccaaagttggctcgcctccattactccggtagcataaatgcgtggtccactaaagaacctttcagctggattaaggtcgatcttcttgcccccatgatcatccacggcattaagacacagggagcgaggcagaaattctcctccctctacatctcacagttcattattatgtatagtttggacggcaagaagtggcaaacttatagaggtaacagtactggaacactcatggtgttcttcggcaacgttgatagctctggcatcaaacacaacatctttaatcctcccataatagctcggtacatcagattgcatccgacccactacagcattaggagtacactccgaatggagcttatgggttgcgacttgaattcctgttcaatgccactcggaatggagtctaaagccatctctgatgcacagataaccgccagtagctactttacgaacatgtttgctacgtggtcaccctctaaggcaaggcttcatttgcaaggccggtctaatgcctggagacctcaggtgaacaacccgaaagaatggctccaggtggactttcagaagaccatgaaagtaacaggtgtcactactcagggagttaagtccttgctcaccagcatgtatgtgaaggagttccttatttcctcatcacaagatggccaccagtggaccctcttctttcagaatggtaaggtcaaagtgtttcagggcaatcaagacagcttcacacccgtggtgaacagtcttgatcctccactcttgacacgataccttcgaatccatccacagtcttgggttcaccagattgcattgcgcatggaagtacttggatgcgaggctcaggacctctac

SEQ ID NO: 2428 - protein, 1457 aa, synthetic construct
  REGION 1..1457: note = Variant of human B-domain deleted Factor VIII
MQIELSTCFFLCLLRFCFSATRRYYLGAVELSWDYMQSDLGELPVDARFPPRVPKSFPFNTSVVYKKTLFVEFTDHLFNIAKPRPPWMGLLGPTIQAEVYDTVVITLKNMASHPVSLHAVGVSYWKASEGAEYDDQTSQREKEDDKVFPGGSHTYVWQVLKENGPMASDPLCLTYSYLSHVDLVKDLNSGLIGALLVCREGSLAKEKTQTLHKFILLFAVFDEGKSWHSETKNSLMQDRDAASARAWPKMHTVNGYVNRSLPGLIGCHRKSVYWHVIGMGTTPEVHSIFLEGHTFLVRNHRQASLEISPITFLTAQTLLMDLGQFLLFCHISSHQHDGMEAYVKVDSCPEEPQLRMKNNEEAEDYDDDLTDSEMDVVRFDDDNSPSFIQIRSVAKKHPKTWVHYIAAEEEDWDYAPLVLAPDDRSYKSQYLNNGPQRIGRKYKKVRFMAYTDETFKTREAIQHESGILGPLLYGEVGDTLLIIFKNQASRPYNIYPHGITDVRPLYSRRLPKGVKHLKDFPILPGEIFKYKWTVTVEDGPTKSDPRCLTRYYSSFVNMERDLASGLIGPLLICYKESVDQRGNQIMSDKRNVILFSVFDENRSWYLTENIQRFLPNPAGVQLEDPEFQASNIMHSINGYVFDSLQLSVCLHEVAYWYILSIGAQTDFLSVFFSGYTFKHKMVYEDTLTLFPFSGETVFMSMENPGLWILGCHNSDFRNRGMTALLKVSSCDKNTGDYYEDSYEDISAYLLSKNNAIEPRSFSQNPPVLKRHQREITRTTLQSDQEEIDYDDTISVEMKKGDFDIYDEDENQSPRSFQKKTRHYFIAAVERLWDYGMSSSPHVLRNRAQSGSVPQFKKVVFQEFTDGSFTQPLYRGELNEHLGLLGPYIRAEVEDNIMVTFRNQASRPYSFYSSLISYEEDQRQGAEPRKNFVKPNETKTYFWKVQHHMAPTKDEFDCKAWAYFSDVDLEKDVHSGLIGPLLVCHTNTLNPAHGRQVTVQEFALFFTIFDETKSWYFTENMERNCRAPCNIQMEDPTFKENYRFHAINGYIMDTLPGLVMAQDQRIRWYLLSMGSNENIHSIHFSGHVFTVRKKEEYKMALYNLYPGVFETVEMLPSKAGIWRVECLIGEHLHAGMSTLFLVYSNKCQTPLGMASGHIRDFQITASGQYGQWAPKLARLHYSGSINAWSTKEPFSWIKVDLLAPMIIHGIKTQGARQKFSSLYISQFIIMYSLDGKKWQTYRGNSTGTLMVFFGNVDSSGIKHNIFNPPIIARYIRLHPTHYSIRSTLRMELMGCDLNSCSMPLGMESKAISDAQITASSYFTNMFATWSPSKARLHLQGRSNAWRPQVNNPKEWLQVDFQKTMKVTGVTTQGVKSLLTSMYVKEFLISSSQDGHQWTLFFQNGKVKVFQGNQDSFTPVVNSLDPPLLTRYLRIHPQSWVHQIALRMEVLGCEAQDLY

SEQ ID NO: 2429 - DNA, 4371 bp, synthetic construct
  misc_feature 1..4371: note = Variant of human B-domain deleted Factor VIII
  source 1..4371: mol_type = other DNA
atgcagattgaactgtctacctgcttcttcctctgtttgctgaggttctgctttagcgccactagacggtactaccttggcgctgtggagctgtcctgggactatatgcagagtgatttgggagagcttcccgtcgacgcacgatttcctcctcgcgttccaaagtcatttcccttcaacacaagcgtggtgtacaagaagacgctcttcgtcgaattcaccgatcacctgttcaatatcgccaaacccagaccaccatggatgggtcttttggggcctaccatacaagcggaggtgtatgacacagttgttatcactctcaagaacatggcttctcatccggtaagtcttcacgcagtgggcgtgtcctactggaaagcttcagaaggagccgagtatgatgatcagacatcccagagggagaaagaagacgacaaggtatttccaggtgggtctcatacctatgtgtggcaagtgctcaaagagaatggccctatggcaagcgatccgctctgtttgacttacagctacctttcacacgttgacctcgtcaaggacctcaactccgggttgattggagccttgttggtatgcagggaaggatctcttgccaaagagaagacacagaccctccacaagtttatccttctctttgctgtgttcgatgagggcaaaagttggcatagcgaaacgaagaattccctcatgcaggatcgcgacgcagccagcgccagagcttggcccaagatgcacactgtgaacggatatgtcaataggtcacttcctggcttgattgggtgtcatcggaaaagtgtctactggcacgtgatcggaatggggacaacaccagaggtccactccatatttctcgaaggccataccttccttgttcgaaaccacagacaggcatccttggagatctctcccattacctttctcactgcccaaacgctccttatggacttgggtcagttccttctcttctgccatatcagctcacaccagcatgatggtatggaagcttatgtgaaagtcgacagttgtcctgaggagccacagttgcgcatgaagaataatgaagaagccgaggattacgacgacgatctcaccgattctgagatggacgtggtgaggtttgatgacgacaactctccctccttcattcaaatccggagcgtggcgaagaaacaccccaagacttgggtccactatatagcggcggaagaggaggattgggattacgctcctcttgtattggcaccagatgaccgctcatacaaaagccagtacctcaacaacggaccgcagagaattggccggaagtataagaaagtgcgatttatggcctatacagacgaaacctttaagacaagggaggccatccagcatgagagtgggattttgggacctcttctttacggcgaagttggtgataccctcctcatcatcttcaagaatcaagcttctcgcccctataacatttacccacacgggatcactgacgttaggcctttgtatagcagaagacttcccaaaggcgtgaagcatctcaaagacttccccattttgccaggcgagatctttaagtacaaatggaccgtcacagtggaagatggaccgactaaatcagaccctcgatgccttacgcggtactattcctccttcgtgaatatggagagagatttggcaagcggactcataggaccactcctcatctgttacaaggaatctgtagaccagaggggtaaccagattatgagtgataaacgcaatgtgatcctttttagcgtcttcgacgagaaccggtcctggtacttgaccgagaatatacaaaggttccttcccaaccccgcaggcgttcagttggaagaccctgagtttcaggccagcaatattatgcactcaatcaacggctatgtgtttgatagtctccagctttctgtttgcctccatgaagtagcctattggtacatcttgtcaattggtgctcaaacagacttcctctccgtcttcttctccggctacacctttaagcacaagatggtgtatgaggacactctcacactctttccattttctggagaaaccgtgttcatgagcatggagaatccaggcctttggatcttgggttgccacaacagtgattttcgcaatcggggaatgactgctctcctcaaagtcagcagctgtgataagaacacaggcgactatacggaagattcttacgaggacataagtgcctacttgttgtccaagaataacgccattgagcccagatcattctcccagaatcctcccgtgcttaaaaggcatcagcgcgaaatcaccagaactactcttcagtctgatcaagaggagattgactatgacgacaccataagcgtggaaatgaagaaggaggatttcgatatctatgacgaagatgagaaccagtctccgcggagctttcagaagaagacgcgacactacttcattgcagcagtcgaaaggctttgggactacggtatgtcatcatcccctcatgtgttgcgcaatagagctcagagtggaagtgttccacagttcaagaaagtcgtctttcaagagtttacagatggcagcttcacacagcctctctatcggggcgagcttaacgaacatttgggactccttggtccctatatccgagccgaagtggaggacaacattatggttacctttaggaatcaagcctctcgcccctacagcttctactcctccctcatcagttatgaggaggatcagagacaaggcgctgaaccacggaagaactttgtgaaaccgaatgagacgaagacctacttctggaaagtacagcaccacatggcccccacaaaagacgaattcgattgcaaagcatgggcgtatttttcagacgttgacttggagaaagatgtacattcaggacttattggtcctttgttggtgtgtcacactaacactctcaatccagcccatggcaggcaggtgacagtccaggaattcgctcttttctttaccatctttgatgagaccaagtcctggtacttcacggaaaacatggagcgcaattgcagagccccctgtaacatacagatggaggaccctacctttaaggaaaattatcggttccacgcaatcaacggatacattatggatacactccctggccttgtgatggctcaggaccaacgaatcaggtggtacctcctcagcatgggttctaatgagaacatacactccattcacttttcaggacatgtgttcactgtccggaagaaagaagagtataagatggccctctacaatttgtatccaggcgtgtttgagaccgttgaaatgcttccctctaaagctggcatctggagagtagagtgcttgatcggagaacatcttcacgcaggtatgagcaccttgttcctcgtgtacagcaacaaatgtcagaccccacttggcatggccagtggacacattcgcgactttcagatcacagcatctggccagtatggacaatgggccccaaagttggctcgcctccattactccggtagcataaatgcgtggtccactaaagaacctttcagctggattaaggtcgatcttcttgcccccatgatcatccacggcattaagacacagggagcgaggcagaaattctcctccctctacatctcacagttcattattatgtatagtttggacggcaagaagtggcaaacttatagaggtaacagtactggaacactcatggtgttcttcggcaacgttgatagctctggcatcaaacacaacatctttaatcctcccataatagctcggtacatcagattgcatccgacccactacagcattaggagtacactccgaatggagcttatgggttgcgacttgaattcctgttcaatgccactcggaatggagtctaaagccatctctgatgcacagataaccgccagtagctactttacgaacatgtttgctacgtggtcaccctctaaggcaaggcttcatttgcaaggccggtctaatgcctggagacctcaggtgaacaacccgaaagaatggctccaggtggactttcagaagaccatgaaagtaacaggtgtcactactcagggagttaagtccttgctcaccagcatgtatgtgaaggagttccttatttcctcatcacaagatggccaccagtggaccctcttctttcagaatggtaaggtcaaagtgtttcagggcaatcaagacagcttcacacccgtggtgaacagtcttgatcctccactcttgacacgataccttcgaatccatccacagtcttgggttcaccagattgcattgcgcatggaagtacttggatgcgaggctcaggacctctac

SEQ ID NO: 2430 - protein, 1457 aa, synthetic construct
  REGION 1..1457: note = Variant of human B-domain deleted Factor VIII
MQIELSTCFFLCLLRFCFSATRRYYLGAVELSWDYMQSDLGELPVDARFPPRVPKSFPFNTSVVYKKTLFVEFTDHLFNIAKPRPPWMGLLGPTIQAEVYDTVVITLKNMASHPVSLHAVGVSYWKASEGAEYDDQTSQREKEDDKVFPGGSHTYVWQVLKENGPMASDPLCLTYSYLSHVDLVKDLNSGLIGALLVCREGSLAKEKTQTLHKFILLFAVFDEGKSWHSETKNSLMQDRDAASARAWPKMHTVNGYVNRSLPGLIGCHRKSVYWHVIGMGTTPEVHSIFLEGHTFLVRNHRQASLEISPITFLTAQTLLMDLGQFLLFCHISSHQHDGMEAYVKVDSCPEEPQLRMKNNEEAEDYDDDLTDSEMDVVRFDDDNSPSFIQIRSVAKKHPKTWVHYIAAEEEDWDYAPLVLAPDDRSYKSQYLNNGPQRIGRKYKKVRFMAYTDETFKTREAIQHESGILGPLLYGEVGDTLLIIFKNQASRPYNIYPHGITDVRPLYSRRLPKGVKHLKDFPILPGEIFKYKWTVTVEDGPTKSDPRCLTRYYSSFVNMERDLASGLIGPLLICYKESVDQRGNQIMSDKRNVILFSVFDENRSWYLTENIQRFLPNPAGVQLEDPEFQASNIMHSINGYVFDSLQLSVCLHEVAYWYILSIGAQTDFLSVFFSGYTFKHKMVYEDTLTLFPFSGETVFMSMENPGLWILGCHNSDFRNRGMTALLKVSSCDKNTGDYTEDSYEDISAYLLSKNNAIEPRSFSQNPPVLKRHQREITRTTLQSDQEEIDYDDTISVEMKKEDFDIYDEDENQSPRSFQKKTRHYFIAAVERLWDYGMSSSPHVLRNRAQSGSVPQFKKVVFQEFTDGSFTQPLYRGELNEHLGLLGPYIRAEVEDNIMVTFRNQASRPYSFYSSLISYEEDQRQGAEPRKNFVKPNETKTYFWKVQHHMAPTKDEFDCKAWAYFSDVDLEKDVHSGLIGPLLVCHTNTLNPAHGRQVTVQEFALFFTIFDETKSWYFTENMERNCRAPCNIQMEDPTFKENYRFHAINGYIMDTLPGLVMAQDQRIRWYLLSMGSNENIHSIHFSGHVFTVRKKEEYKMALYNLYPGVFETVEMLPSKAGIWRVECLIGEHLHAGMSTLFLVYSNKCQTPLGMASGHIRDFQITASGQYGQWAPKLARLHYSGSINAWSTKEPFSWIKVDLLAPMIIHGIKTQGARQKFSSLYISQFIIMYSLDGKKWQTYRGNSTGTLMVFFGNVDSSGIKHNIFNPPIIARYIRLHPTHYSIRSTLRMELMGCDLNSCSMPLGMESKAISDAQITASSYFTNMFATWSPSKARLHLQGRSNAWRPQVNNPKEWLQVDFQKTMKVTGVTTQGVKSLLTSMYVKEFLISSSQDGHQWTLFFQNGKVKVFQGNQDSFTPVVNSLDPPLLTRYLRIHPQSWVHQIALRMEVLGCEAQDLY

SEQ ID NO: 2431 - DNA, 4371 bp, synthetic construct
  misc_feature 1..4371: note = Variant of human B-domain deleted Factor VIII
  source 1..4371: mol_type = other DNA
atgcagattgaactgtctacctgcttcttcctctgtttgctgaggttctgctttagcgccactagacggtactaccttggcgctgtggagctgtcctgggactatatgcagagtgatttgggagagcttcccgtcgacgcacgatttcctcctcgcgttccaaagtcatttcccttcaacacaagcgtggtgtacaagaagacgctcttcgtcgaattcaccgatcacctgttcaatatcgccaaacccagaccaccatggatgggtcttttggggcctaccatacaagcggaggtgtatgacacagttgttatcactctcaagaacatggcttctcatccggtaagtcttcacgcagtgggcgtgtcctactggaaagcttcagaaggagccgagtatgatgatcagacatcccagagggagaaagaagacgacaaggtatttccaggtgggtctcatacctatgtgtggcaagtgctcaaagagaatggccctatggcaagcgatccgctctgtttgacttacagctacctttcacacgttgacctcgtcaaggacctcaactccgggttgattggagccttgttggtatgcagggaaggatctcttgccaaagagaagacacagaccctccacaagtttatccttctctttgctgtgttcgatgagggcaaaagttggcatagcgaaacgaagaattccctcatgcaggatcgcgacgcagccagcgccagagcttggcccaagatgcacactgtgaacggatatgtcaataggtcacttcctggcttgattgggtgtcatcggaaaagtgtctactggcacgtgatcggaatggggacaacaccagaggtccactccatatttctcgaaggccataccttccttgttcgaaaccacagacaggcatccttggagatctctcccattacctttctcactgcccaaacgctccttatggacttgggtcagttccttctcttctgccatatcagctcacaccagcatgatggtatggaagcttatgtgaaagtcgacagttgtcctgaggagccacagttgcgcatgaagaataatgaagaagccgaggattacgacgacgatctcaccgattctgagatggacgtggtgaggtttgatgacgacaactctccctccttcattcaaatccggagcgtggcgaagaaacaccccaagacttgggtccactatatagcggcggaagaggaggattgggattacgctcctcttgtattggcaccagatgaccgctcatacaaaagccagtacctcaacaacggaccgcagagaattggccggaagtataagaaagtgcgatttatggcctatacagacgaaacctttaagacaagggaggccatccagcatgagagtgggattttgggacctcttctttacggcgaagttggtgataccctcctcatcatcttcaagaatcaagcttctcgcccctataacatttacccacacgggatcactgacgttaggcctttgtatagcagaagacttcccaaaggcgtgaagcatctcaaagacttccccattttgccaggcgagatctttaagtacaaatggaccgtcacagtggaagatggaccgactaaatcagaccctcgatgccttacgcggtactattcctccttcgtgaatatggagagagatttggcaagcggactcataggaccactcctcatctgttacaaggaatctgtagaccagaggggtaaccagattatgagtgataaacgcaatgtgatcctttttagcgtcttcgacgagaaccggtcctggtacttgaccgagaatatacaaaggttccttcccaaccccgcaggcgttcagttggaagaccctgagtttcaggccagcaatattatgcactcaatcaacggctatgtgtttgatagtctccagctttctgtttgcctccatgaagtagcctattggtacatcttgtcaattggtgctcaaacagacttcctctccgtcttcttctccggctacacctttaagcacaaggaggtgtatgaggacactctcacactctttccattttctggagaaaccgtgttcatgagcatggagaatccaggcctttggatcttgggttgccacaacagtgattttcgcaatcggggaatgactgctctcctcaaagtcagcagctgtgataagaacacaggcgactattacgaagattcttacgaggacataagtgcctacttgttgtccaagaataacgccattgagcccagatcattctcccagaatcctcccgtgcttaaaaggcatcagcgcgaaatcaccagaactactcttcagtctgatcaagaggagattgactatgacgacaccataagcgtggaaatgaagaaggaggatttcgatatctatgacgaagatgagaaccagtctccgcggagctttcagaagaagacgcgacactacttcattgcagcagtcgaaaggctttgggactacggtatgtcatcatcccctcatgtgttgcgcaatagagctcagagtggaagtgttccacagttcaagaaagtcgtctttcaagagtttacagatggcagcttcacacagcctctctatcggggcgagcttaacgaacatttgggactccttggtccctatatccgagccgaagtggaggacaacattatggttacctttaggaatcaagcctctcgcccctacagcttctactcctccctcatcagttatgaggaggatcagagacaaggcgctgaaccacggaagaactttgtgaaaccgaatgagacgaagacctacttctggaaagtacagcaccacatggcccccacaaaagacgaattcgattgcaaagcatgggcgtatttttcagacgttgacttggagaaagatgtacattcaggacttattggtcctttgttggtgtgtcacactaacactctcaatccagcccatggcaggcaggtgacagtccaggaattcgctcttttctttaccatctttgatgagaccaagtcctggtacttcacggaaaacatggagcgcaattgcagagccccctgtaacatacagatggaggaccctacctttaaggaaaattatcggttccacgcaatcaacggatacattatggatacactccctggccttgtgatggctcaggaccaacgaatcaggtggtacctcctcagcatgggttctaatgagaacatacactccattcacttttcaggacatgtgttcactgtccggaagaaagaagagtataagatggccctctacaatttgtatccaggcgtgtttgagaccgttgaaatgcttccctctaaagctggcatctggagagtagagtgcttgatcggagaacatcttcacgcaggtatgagcaccttgttcctcgtgtacagcaacaaatgtcagaccccacttggcatggccagtggacacattcgcgactttcagatcacagcatctggccagtatggacaatgggccccaaagttggctcgcctccattactccggtagcataaatgcgtggtccactaaagaacctttcagctggattaaggtcgatcttcttgcccccatgatcatccacggcattaagacacagggagcgaggcagaaattctcctccctctacatctcacagttcattattatgtatagtttggacggcaagaagtggcaaacttatagaggtaacagtactggaacactcatggtgttcttcggcaacgttgatagctctggcatcaaacacaacatctttaatcctcccataatagctcggtacatcagattgcatccgacccactacagcattaggagtacactccgaatggagcttatgggttgcgacttgaattcctgttcaatgccactcggaatggagtctaaagccatctctgatgcacagataaccgccagtagctactttacgaacatgtttgctacgtggtcaccctctaaggcaaggcttcatttgcaaggccggtctaatgcctggagacctcaggtgaacaacccgaaagaatggctccaggtggactttcagaagaccatgaaagtaacaggtgtcactactcagggagttaagtccttgctcaccagcatgtatgtgaaggagttccttatttcctcatcacaagatggccaccagtggaccctcttctttcagaatggtaaggtcaaagtgtttcagggcaatcaagacagcttcacacccgtggtgaacagtcttgatcctccactcttgacacgataccttcgaatccatccacagtcttgggttcaccagattgcattgcgcatggaagtacttggatgcgaggctcaggacctctac

SEQ ID NO: 2432 - protein, 1457 aa, synthetic construct
  REGION 1..1457: note = Variant of human B-domain deleted Factor VIII
MQIELSTCFFLCLLRFCFSATRRYYLGAVELSWDYMQSDLGELPVDARFPPRVPKSFPFNTSVVYKKTLFVEFTDHLFNIAKPRPPWMGLLGPTIQAEVYDTVVITLKNMASHPVSLHAVGVSYWKASEGAEYDDQTSQREKEDDKVFPGGSHTYVWQVLKENGPMASDPLCLTYSYLSHVDLVKDLNSGLIGALLVCREGSLAKEKTQTLHKFILLFAVFDEGKSWHSETKNSLMQDRDAASARAWPKMHTVNGYVNRSLPGLIGCHRKSVYWHVIGMGTTPEVHSIFLEGHTFLVRNHRQASLEISPITFLTAQTLLMDLGQFLLFCHISSHQHDGMEAYVKVDSCPEEPQLRMKNNEEAEDYDDDLTDSEMDVVRFDDDNSPSFIQIRSVAKKHPKTWVHYIAAEEEDWDYAPLVLAPDDRSYKSQYLNNGPQRIGRKYKKVRFMAYTDETFKTREAIQHESGILGPLLYGEVGDTLLIIFKNQASRPYNIYPHGITDVRPLYSRRLPKGVKHLKDFPILPGEIFKYKWTVTVEDGPTKSDPRCLTRYYSSFVNMERDLASGLIGPLLICYKESVDQRGNQIMSDKRNVILFSVFDENRSWYLTENIQRFLPNPAGVQLEDPEFQASNIMHSINGYVFDSLQLSVCLHEVAYWYILSIGAQTDFLSVFFSGYTFKHKEVYEDTLTLFPFSGETVFMSMENPGLWILGCHNSDFRNRGMTALLKVSSCDKNTGDYYEDSYEDISAYLLSKNNAIEPRSFSQNPPVLKRHQREITRTTLQSDQEEIDYDDTISVEMKKEDFDIYDEDENQSPRSFQKKTRHYFIAAVERLWDYGMSSSPHVLRNRAQSGSVPQFKKVVFQEFTDGSFTQPLYRGELNEHLGLLGPYIRAEVEDNIMVTFRNQASRPYSFYSSLISYEEDQRQGAEPRKNFVKPNETKTYFWKVQHHMAPTKDEFDCKAWAYFSDVDLEKDVHSGLIGPLLVCHTNTLNPAHGRQVTVQEFALFFTIFDETKSWYFTENMERNCRAPCNIQMEDPTFKENYRFHAINGYIMDTLPGLVMAQDQRIRWYLLSMGSNENIHSIHFSGHVFTVRKKEEYKMALYNLYPGVFETVEMLPSKAGIWRVECLIGEHLHAGMSTLFLVYSNKCQTPLGMASGHIRDFQITASGQYGQWAPKLARLHYSGSINAWSTKEPFSWIKVDLLAPMIIHGIKTQGARQKFSSLYISQFIIMYSLDGKKWQTYRGNSTGTLMVFFGNVDSSGIKHNIFNPPIIARYIRLHPTHYSIRSTLRMELMGCDLNSCSMPLGMESKAISDAQITASSYFTNMFATWSPSKARLHLQGRSNAWRPQVNNPKEWLQVDFQKTMKVTGVTTQGVKSLLTSMYVKEFLISSSQDGHQWTLFFQNGKVKVFQGNQDSFTPVVNSLDPPLLTRYLRIHPQSWVHQIALRMEVLGCEAQDLY

SEQ ID NO: 2433 - DNA, 4371 bp, synthetic construct
  misc_feature 1..4371: note = Variant of human B-domain deleted Factor VIII
  source 1..4371: mol_type = other DNA
atgcagattgaactgtctacctgcttcttcctctgtttgctgaggttctgctttagcgccactagacggtactaccttggcgctgtggagctgtcctgggactatatgcagagtgatttgggagagcttcccgtcgacgcacgatttcctcctcgcgttccaaagtcatttcccttcaacacaagcgtggtgtacaagaagacgctcttcgtcgaattcaccgatcacctgttcaatatcgccaaacccagaccaccatggatgggtcttttggggcctaccatacaagcggaggtgtatgacacagttgttatcactctcaagaacatggcttctcatccggtaagtcttcacgcagtgggcgtgtcctactggaaagcttcagaaggagccgagtatgatgatcagacatcccagagggagaaagaagacgacaaggtatttccaggtgggtctcatacctatgtgtggcaagtgctcaaagagaatggccctatggcaagcgatccgctctgtttgacttacagctacctttcacacgttgacctcgtcaaggacctcaactccgggttgattggagccttgttggtatgcagggaaggatctcttgccaaagagaagacacagaccctccacaagtttatccttctctttgctgtgttcgatgagggcaaaagttggcatagcgaaacgaagaattccctcatgcaggatcgcgacgcagccagcgccagagcttggcccaagatgcacactgtgaacggatatgtcaataggtcacttcctggcttgattgggtgtcatcggaaaagtgtctactggcacgtgatcggaatggggacaacaccagaggtccactccatatttctcgaaggccataccttccttgttcgaaaccacagacaggcatccttggagatctctcccattacctttctcactgcccaaacgctccttatggacttgggtcagttccttctcttctgccatatcagctcacaccagcatgatggtatggaagcttatgtgaaagtcgacagttgtcctgaggagccacagttgcgcatgaagaataatgaagaagccgaggattacgacgacgatctcaccgattctgagatggacgtggtgaggtttgatgacgacaactctccctccttcattcaaatccggagcgtggcgaagaaacaccccaagacttgggtccactatatagcggcggaagaggaggattgggattacgctcctcttgtattggcaccagatgaccgctcatacaaaagccagtacctcaacaacggaccgcagagaattggccggaagtataagaaagtgcgatttatggcctatacagacgaaacctttaagacaagggaggccatccagcatgagagtgggattttgggacctcttctttacggcgaagttggtgataccctcctcatcatcttcaagaatcaagcttctcgcccctataacatttacccacacgggatcactgacgttaggcctttgtatagcagaagacttcccaaaggcgtgaagcatctcaaagacttccccattttgccaggcgagatctttaagtacaaatggaccgtcacagtggaagatggaccgactaaatcagaccctcgatgccttacgcggtactattcctccttcgtgaatatggagagagatttggcaagcggactcataggaccactcctcatctgttacaaggaatctgtagaccagaggggtaaccagattatgagtgataaacgcaatgtgatcctttttagcgtcttcgacgagaaccggtcctggtacttgaccgagaatatacaaaggttccttcccaaccccgcaggcgttcagttggaagaccctgagtttcaggccagcaatattatgcactcaatcaacggctatgtgtttgatagtctccagctttctgtttgcctccatgaagtagcctattggtacatcttgtcaattggtgctcaaacagacttcctctccgtcttcttctccggctacacctttaagcacaagatggtgtatgaggacactctcacactctttccattttctggagaaaccgtgttcatgagcatggagaatccaggcctttggatcttgggttgccacaacagtgattttcgcaatcggggaatgactgctctcctcaaagtcagcagctgtgattgtaacacaggcgactattacgaagattcttacgaggacataagtgcctacttgttgtccaagaataacgccattgagcccagatcattctcccagaatcctcccgtgcttaaaaggcatcagcgcgaaatcaccagaactactcttcagtctgatcaagaggagattgactatgacgacaccataagcgtggaaatgaagaaggaggatttcgatatctatgacgaagatgagaaccagtctccgcggagctttcagaagaagacgcgacactacttcattgcagcagtcgaaaggctttgggactacggtatgtcatcatcccctcatgtgttgcgcaatagagctcagagtggaagtgttccacagttcaagaaagtcgtctttcaagagtttacagatggcagcttcacacagcctctctatcggggcgagcttaacgaacatttgggactccttggtccctatatccgagccgaagtggaggacaacattatggttacctttaggaatcaagcctctcgcccctacagcttctactcctccctcatcagttatgaggaggatcagagacaaggcgctgaaccacggaagaactttgtgaaaccgaatgagacgaagacctacttctggaaagtacagcaccacatggcccccacaaaagacgaattcgattgcaaagcatgggcgtatttttcagacgttgacttggagaaagatgtacattcaggacttattggtcctttgttggtgtgtcacactaacactctcaatccagcccatggcaggcaggtgacagtccaggaattcgctcttttctttaccatctttgatgagaccaagtcctggtacttcacggaaaacatggagcgcaattgcagagccccctgtaacatacagatggaggaccctacctttaaggaaaattatcggttccacgcaatcaacggatacattatggatacactccctggccttgtgatggctcaggaccaacgaatcaggtggtacctcctcagcatgggttctaatgagaacatacactccattcacttttcaggacatgtgttcactgtccggaagaaagaagagtataagatggccctctacaatttgtatccaggcgtgtttgagaccgttgaaatgcttccctctaaagctggcatctggagagtagagtgcttgatcggagaacatcttcacgcaggtatgagcaccttgttcctcgtgtacagcaacaaatgtcagaccccacttggcatggccagtggacacattcgcgactttcagatcacagcatctggccagtatggacaatgggccccaaagttggctcgcctccattactccggtagcataaatgcgtggtccactaaagaacctttcagctggattaaggtcgatcttcttgcccccatgatcatccacggcattaagacacagggagcgaggcagaaattctcctccctctacatctcacagttcattattatgtatagtttggacggcaagaagtggcaaacttatagaggtaacagtactggaacactcatggtgttcttcggcaacgttgatagctctggcatcaaacacaacatctttaatcctcccataatagctcggtacatcagattgcatccgacccactacagcattaggagtacactccgaatggagcttatgggttgcgacttgaattcctgttcaatgccactcggaatggagtctaaagccatctctgatgcacagataaccgccagtagctactttacgaacatgtttgctacgtggtcaccctctaaggcaaggcttcatttgcaaggccggtctaatgcctggagacctcaggtgaacaacccgaaagaatggctccaggtggactttcagaagaccatgaaagtaacaggtgtcactactcagggagttaagtccttgctcaccagcatgtatgtgaaggagttccttatttcctcatcacaagatggccaccagtggaccctcttctttcagaatggtaaggtcaaagtgtttcagggcaatcaagacagcttcacacccgtggtgaacagtcttgatcctccactcttgacacgataccttcgaatccatccacagtcttgggttcaccagattgcattgcgcatggaagtacttggatgcgaggctcaggacctctac

SEQ ID NO: 2434 - protein, 1457 aa, synthetic construct
  REGION 1..1457: note = Variant of human B-domain deleted Factor VIII
MQIELSTCFFLCLLRFCFSATRRYYLGAVELSWDYMQSDLGELPVDARFPPRVPKSFPFNTSVVYKKTLFVEFTDHLFNIAKPRPPWMGLLGPTIQAEVYDTVVITLKNMASHPVSLHAVGVSYWKASEGAEYDDQTSQREKEDDKVFPGGSHTYVWQVLKENGPMASDPLCLTYSYLSHVDLVKDLNSGLIGALLVCREGSLAKEKTQTLHKFILLFAVFDEGKSWHSETKNSLMQDRDAASARAWPKMHTVNGYVNRSLPGLIGCHRKSVYWHVIGMGTTPEVHSIFLEGHTFLVRNHRQASLEISPITFLTAQTLLMDLGQFLLFCHISSHQHDGMEAYVKVDSCPEEPQLRMKNNEEAEDYDDDLTDSEMDVVRFDDDNSPSFIQIRSVAKKHPKTWVHYIAAEEEDWDYAPLVLAPDDRSYKSQYLNNGPQRIGRKYKKVRFMAYTDETFKTREAIQHESGILGPLLYGEVGDTLLIIFKNQASRPYNIYPHGITDVRPLYSRRLPKGVKHLKDFPILPGEIFKYKWTVTVEDGPTKSDPRCLTRYYSSFVNMERDLASGLIGPLLICYKESVDQRGNQIMSDKRNVILFSVFDENRSWYLTENIQRFLPNPAGVQLEDPEFQASNIMHSINGYVFDSLQLSVCLHEVAYWYILSIGAQTDFLSVFFSGYTFKHKMVYEDTLTLFPFSGETVFMSMENPGLWILGCHNSDFRNRGMTALLKVSSCDCNTGDYYEDSYEDISAYLLSKNNAIEPRSFSQNPPVLKRHQREITRTTLQSDQEEIDYDDTISVEMKKEDFDIYDEDENQSPRSFQKKTRHYFIAAVERLWDYGMSSSPHVLRNRAQSGSVPQFKKVVFQEFTDGSFTQPLYRGELNEHLGLLGPYIRAEVEDNIMVTFRNQASRPYSFYSSLISYEEDQRQGAEPRKNFVKPNETKTYFWKVQHHMAPTKDEFDCKAWAYFSDVDLEKDVHSGLIGPLLVCHTNTLNPAHGRQVTVQEFALFFTIFDETKSWYFTENMERNCRAPCNIQMEDPTFKENYRFHAINGYIMDTLPGLVMAQDQRIRWYLLSMGSNENIHSIHFSGHVFTVRKKEEYKMALYNLYPGVFETVEMLPSKAGIWRVECLIGEHLHAGMSTLFLVYSNKCQTPLGMASGHIRDFQITASGQYGQWAPKLARLHYSGSINAWSTKEPFSWIKVDLLAPMIIHGIKTQGARQKFSSLYISQFIIMYSLDGKKWQTYRGNSTGTLMVFFGNVDSSGIKHNIFNPPIIARYIRLHPTHYSIRSTLRMELMGCDLNSCSMPLGMESKAISDAQITASSYFTNMFATWSPSKARLHLQGRSNAWRPQVNNPKEWLQVDFQKTMKVTGVTTQGVKSLLTSMYVKEFLISSSQDGHQWTLFFQNGKVKVFQGNQDSFTPVVNSLDPPLLTRYLRIHPQSWVHQIALRMEVLGCEAQDLY

SEQ ID NO: 2435 - DNA, 4371 bp, synthetic construct
  misc_feature 1..4371: note = Variant of human B-domain deleted Factor VIII
  source 1..4371: mol_type = other DNA
atgcagattgaactgtctacctgcttcttcctctgtttgctgaggttctgctttagcgccactagacggtactaccttggcgctgtggagctgtcctgggactatatgcagagtgatttgggagagcttcccgtcgacgcacgatttcctcctcgcgttccaaagtcatttcccttcaacacaagcgtggtgtacaagaagacgctcttcgtcgaattcaccgatcacctgttcaatatcgccaaacccagaccaccatggatgggtcttttggggcctaccatacaagcggaggtgtatgacacagttgttatcactctcaagaacatggcttctcatccggtaagtcttcacgcagtgggcgtgtcctactggaaagcttcagaaggagccgagtatgatgatcagacatcccagagggagaaagaagacgacaaggtatttccaggtgggtctcatacctatgtgtggcaagtgctcaaagagaatggccctatggcaagcgatccgctctgtttgacttacagctacctttcacacgttgacctcgtcaaggacctcaactccgggttgattggagccttgttggtatgcagggaaggatctcttgccaaagagaagacacagaccctccacaagtttatccttctctttgctgtgttcgatgagggcaaaagttggcatagcgaaacgaagaattccctcatgcaggatcgcgacgcagccagcgccagagcttggcccaagatgcacactgtgaacggatatgtcaataggtcacttcctggcttgattgggtgtcatcggaaaagtgtctactggcacgtgatcggaatggggacaacaccagaggtccactccatatttctcgaaggccataccttccttgttcgaaaccacagacaggcatccttggagatctctcccattacctttctcactgcccaaacgctccttatggacttgggtcagttccttctcttctgccatatcagctcacaccagcatgatggtatggaagcttatgtgaaagtcgacagttgtcctgaggagccacagttgcgcatgaagaataatgaagaagccgaggattacgacgacgatctcaccgattctgagatggacgtggtgaggtttgatgacgacaactctccctccttcattcaaatccggagcgtggcgaagaaacaccccaagacttgggtccactatatagcggcggaagaggaggattgggattacgctcctcttgtattggcaccagatgaccgctcatacaaaagccagtacctcaacaacggaccgcagagaattggccggaagtataagaaagtgcgatttatggcctatacagacgaaacctttaagacaagggaggccatccagcatgagagtgggattttgggacctcttctttacggcgaagttggtgataccctcctcatcatcttcaagaatcaagcttctcgcccctataacatttacccacacgggatcactgacgttaggcctttgtatagcagaagacttcccaaaggcgtgaagcatctcaaagacttccccattttgccaggcgagatctttaagtacaaatggaccgtcacagtggaagatggaccgactaaatcagaccctcgatgccttacgcggtactattcctccttcgtgaatatggagagagatttggcaagcggactcataggaccactcctcatctgttacaaggaatctgtagaccagaggggtaaccagattatgagtgataaacgcaatgtgatcctttttagcgtcttcgacgagaaccggtcctggtacttgaccgagaatatacaaaggttccttcccaaccccgcaggcgttcagttggaagaccctgagtttcaggccagcaatattatgcactcaatcaacggctatgtgtttgatagtctccagctttctgtttgcctccatgaagtagcctattggtacatcttgtcaattggtgctcaaacagacttcctctccgtcttcttctccggctacacctttaagcacaagatggtgtatgaggacactctcacactctttccattttctggagaaaccgtgttcatgagcatggagaatccaggcctttggatcttgggttgccacaacagtgattttcgcaatcggggaatgactgctctcctcaaagtcagcagctgtgataagaacacaggcgactattacgaagattcttacgaggacataagtgcctactgtttgtccaagaataacgccattgagcccagatcattctcccagaatcctcccgtgcttaaaaggcatcagcgcgaaatcaccagaactactcttcagtctgatcaagaggagattgactatgacgacaccataagcgtggaaatgaagaaggaggatttcgatatctatgacgaagatgagaaccagtctccgcggagctttcagaagaagacgcgacactacttcattgcagcagtcgaaaggctttgggactacggtatgtcatcatcccctcatgtgttgcgcaatagagctcagagtggaagtgttccacagttcaagaaagtcgtctttcaagagtttacagatggcagcttcacacagcctctctatcggggcgagcttaacgaacatttgggactccttggtccctatatccgagccgaagtggaggacaacattatggttacctttaggaatcaagcctctcgcccctacagcttctactcctccctcatcagttatgaggaggatcagagacaaggcgctgaaccacggaagaactttgtgaaaccgaatgagacgaagacctacttctggaaagtacagcaccacatggcccccacaaaagacgaattcgattgcaaagcatgggcgtatttttcagacgttgacttggagaaagatgtacattcaggacttattggtcctttgttggtgtgtcacactaacactctcaatccagcccatggcaggcaggtgacagtccaggaattcgctcttttctttaccatctttgatgagaccaagtcctggtacttcacggaaaacatggagcgcaattgcagagccccctgtaacatacagatggaggaccctacctttaaggaaaattatcggttccacgcaatcaacggatacattatggatacactccctggccttgtgatggctcaggaccaacgaatcaggtggtacctcctcagcatgggttctaatgagaacatacactccattcacttttcaggacatgtgttcactgtccggaagaaagaagagtataagatggccctctacaatttgtatccaggcgtgtttgagaccgttgaaatgcttccctctaaagctggcatctggagagtagagtgcttgatcggagaacatcttcacgcaggtatgagcaccttgttcctcgtgtacagcaacaaatgtcagaccccacttggcatggccagtggacacattcgcgactttcagatcacagcatctggccagtatggacaatgggccccaaagttggctcgcctccattactccggtagcataaatgcgtggtccactaaagaacctttcagctggattaaggtcgatcttcttgcccccatgatcatccacggcattaagacacagggagcgaggcagaaattctcctccctctacatctcacagttcattattatgtatagtttggacggcaagaagtggcaaacttatagaggtaacagtactggaacactcatggtgttcttcggcaacgttgatagctctggcatcaaacacaacatctttaatcctcccataatagctcggtacatcagattgcatccgacccactacagcattaggagtacactccgaatggagcttatgggttgcgacttgaattcctgttcaatgccactcggaatggagtctaaagccatctctgatgcacagataaccgccagtagctactttacgaacatgtttgctacgtggtcaccctctaaggcaaggcttcatttgcaaggccggtctaatgcctggagacctcaggtgaacaacccgaaagaatggctccaggtggactttcagaagaccatgaaagtaacaggtgtcactactcagggagttaagtccttgctcaccagcatgtatgtgaaggagttccttatttcctcatcacaagatggccaccagtggaccctcttctttcagaatggtaaggtcaaagtgtttcagggcaatcaagacagcttcacacccgtggtgaacagtcttgatcctccactcttgacacgataccttcgaatccatccacagtcttgggttcaccagattgcattgcgcatggaagtacttggatgcgaggctcaggacctctac

SEQ ID NO: 2436 - protein, 1457 aa, synthetic construct
  REGION 1..1457: note = Variant of human B-domain deleted Factor VIII
MQIELSTCFFLCLLRFCFSATRRYYLGAVELSWDYMQSDLGELPVDARFPPRVPKSFPFNTSVVYKKTLFVEFTDHLFNIAKPRPPWMGLLGPTIQAEVYDTVVITLKNMASHPVSLHAVGVSYWKASEGAEYDDQTSQREKEDDKVFPGGSHTYVWQVLKENGPMASDPLCLTYSYLSHVDLVKDLNSGLIGALLVCREGSLAKEKTQTLHKFILLFAVFDEGKSWHSETKNSLMQDRDAASARAWPKMHTVNGYVNRSLPGLIGCHRKSVYWHVIGMGTTPEVHSIFLEGHTFLVRNHRQASLEISPITFLTAQTLLMDLGQFLLFCHISSHQHDGMEAYVKVDSCPEEPQLRMKNNEEAEDYDDDLTDSEMDVVRFDDDNSPSFIQIRSVAKKHPKTWVHYIAAEEEDWDYAPLVLAPDDRSYKSQYLNNGPQRIGRKYKKVRFMAYTDETFKTREAIQHESGILGPLLYGEVGDTLLIIFKNQASRPYNIYPHGITDVRPLYSRRLPKGVKHLKDFPILPGEIFKYKWTVTVEDGPTKSDPRCLTRYYSSFVNMERDLASGLIGPLLICYKESVDQRGNQIMSDKRNVILFSVFDENRSWYLTENIQRFLPNPAGVQLEDPEFQASNIMHSINGYVFDSLQLSVCLHEVAYWYILSIGAQTDFLSVFFSGYTFKHKMVYEDTLTLFPFSGETVFMSMENPGLWILGCHNSDFRNRGMTALLKVSSCDKNTGDYYEDSYEDISAYCLSKNNAIEPRSFSQNPPVLKRHQREITRTTLQSDQEEIDYDDTISVEMKKEDFDIYDEDENQSPRSFQKKTRHYFIAAVERLWDYGMSSSPHVLRNRAQSGSVPQFKKVVFQEFTDGSFTQPLYRGELNEHLGLLGPYIRAEVEDNIMVTFRNQASRPYSFYSSLISYEEDQRQGAEPRKNFVKPNETKTYFWKVQHHMAPTKDEFDCKAWAYFSDVDLEKDVHSGLIGPLLVCHTNTLNPAHGRQVTVQEFALFFTIFDETKSWYFTENMERNCRAPCNIQMEDPTFKENYRFHAINGYIMDTLPGLVMAQDQRIRWYLLSMGSNENIHSIHFSGHVFTVRKKEEYKMALYNLYPGVFETVEMLPSKAGIWRVECLIGEHLHAGMSTLFLVYSNKCQTPLGMASGHIRDFQITASGQYGQWAPKLARLHYSGSINAWSTKEPFSWIKVDLLAPMIIHGIKTQGARQKFSSLYISQFIIMYSLDGKKWQTYRGNSTGTLMVFFGNVDSSGIKHNIFNPPIIARYIRLHPTHYSIRSTLRMELMGCDLNSCSMPLGMESKAISDAQITASSYFTNMFATWSPSKARLHLQGRSNAWRPQVNNPKEWLQVDFQKTMKVTGVTTQGVKSLLTSMYVKEFLISSSQDGHQWTLFFQNGKVKVFQGNQDSFTPVVNSLDPPLLTRYLRIHPQSWVHQIALRMEVLGCEAQDLY

SEQ ID NO: 2437 - DNA, 4371 bp, synthetic construct
  misc_feature 1..4371: note = Variant of human B-domain deleted Factor VIII
  source 1..4371: mol_type = other DNA
atgcagattgaactgtctacctgcttcttcctctgtttgctgaggttctgctttagcgccactagacggtactaccttggcgctgtggagctgtcctgggactatatgcagagtgatttgggagagcttcccgtcgacgcacgatttcctcctcgcgttccaaagtcatttcccttcaacacaagcgtggtgtacaagaagacgctcttcgtcgaattcaccgatcacctgttcaatatcgccaaacccagaccaccatggatgggtcttttggggcctaccatacaagcggaggtgtatgacacagttgttatcactctcaagaacatggcttctcatccggtaagtcttcacgcagtgggcgtgtcctactggaaagcttcagaaggagccgagtatgatgatcagacatcccagagggagaaagaagacgacaaggtatttccaggtgggtctcatacctatgtgtggcaagtgctcaaagagaatggccctatggcaagcgatccgctctgtttgacttacagctacctttcacacgttgacctcgtcaaggacctcaactccgggttgattggagccttgttggtatgcagggaaggatctcttgccaaagagaagacacagaccctccacaagtttatccttctctttgctgtgttcgatgagggcaaaagttggcatagcgaaacgaagaattccctcatgcaggatcgcgacgcagccagcgccagagcttggcccaagatgcacactgtgaacggatatgtcaataggtcacttcctggcttgattgggtgtcatcggaaaagtgtctactggcacgtgatcggaatggggacaacaccagaggtccactccatatttctcgaaggccataccttccttgttcgaaaccacagacaggcatccttggagatctctcccattacctttctcactgcccaaacgctccttatggacttgggtcagttccttctcttctgccatatcagctcacaccagcatgatggtatggaagcttatgtgaaagtcgacagttgtcctgaggagccacagttgcgcatgaagaataatgaagaagccgaggattacgacgacgatctcaccgattctgagatggacgtggtgaggtttgatgacgacaactctccctccttcattcaaatccggagcgtggcgaagaaacaccccaagacttgggtccactatatagcggcggaagaggaggattgggattacgctcctcttgtattggcaccagatgaccgctcatacaaaagccagtacctcaacaacggaccgcagagaattggccggaagtataagaaagtgcgatttatggcctatacagacgaaacctttaagacaagggaggccatccagcatgagagtgggattttgggacctcttctttacggcgaagttggtgataccctcctcatcatcttcaagaatcaagcttctcgcccctataacatttacccacacgggatcactgacgttaggcctttgtatagcagaagacttcccaaaggcgtgaagcatctcaaagacttccccattttgccaggcgagatctttaagtacaaatggaccgtcacagtggaagatggaccgactaaatcagaccctcgatgccttacgcggtactattcctccttcgtgaatatggagagagatttggcaagcggactcataggaccactcctcatctgttacaaggaatctgtagaccagaggggtaaccagattatgagtgataaacgcaatgtgatcctttttagcgtcttcgacgagaaccggtcctggtacttgaccgagaatatacaaaggttccttcccaaccccgcaggcgttcagttggaagaccctgagtttcaggccagcaatattatgcactcaatcaacggctatgtgtttgatagtctccagctttctgtttgcctccatgaagtagcctattggtacatcttgtcaattggtgctcaaacagacttcctctccgtcttcttctccggctacacctttaagcacaagatggtgtatgaggacactctcacactctttccattttctggagaaaccgtgttcatgagcatggagaatccaggcctttggatcttgggttgccacaacagtgattttcgcaatcggggaatgactgctctcctcaaagtcagcagctgtgataagaacacaggcgactattacgaagattcttacgaggacataagtgcctacttgttgtccaagaataacgccattgagcccagatcattctcccagaatcctcccgtgcttaaaaggcatcagcgcgaaatcaccagaactactcttcagtctgatcaagaggagattgactatgacgacaccataagcgtggaaatgaagaaggaggatttcgatatctatgacgaagatgagaaccagtctccgcggagctttcagaagaagacgcgacactacttcattgcagcagtcgaaaggctttgggactacggtatgtcatcatcccctcatgtgttgcgcaatagagctcagagtggaagtgttccacagttcaagaaagtcgtctttcaagagtttacagatggcagcttcacacagcctctctatcggggcgagcttaacgaacatttgggactccttggtccctatatccgagccgaagtggaggacaacattatggttacctttaggaatcaagcctctcgcccctacagcttctactcctccctcatcagttatgaggaggatcagagacaaggcgctgaaccacggaagaactttgtgaaaccgaatgagacgaagacctacttctggaaagtacagcaccacatggcccccacaaaagacgaattcgattgcaaagcatgggcgtatttttcagacgttgacttggagaaagatgtacattcaggacttattggtcctttgttggtgtgtcacactaacactctcaatccagcccatggcaggcaggtgacagtccaggaattcgctcttttctttaccatctttgatgagaccaagtcctggtacttcacggaaaacatggagcgcaattgcagagccccctgtaacatacagatggaggaccctacctttaaggaaaattatcggttccacgcaatcaacggatacattatggatacactccctggccttgtgatggctcaggaccaacgaatcaggtggtacctcctcagcatgggttctaatgagaacatacactccattcacttttcaggacatgtgttcactgtccggaagaaagaagagtataagatggccctctacaatttgtatccaggcgtgtttgagaccgttgaaatgcttccctctaaagctggcatctggagagtagagtgcttgatcggagaacatcttcacgcaggtatgagcaccttgttcctcgtgtacagcaacaaatgtcagaccccacttggcatggccagtggacacattcgcgactttcagatcacagcatctggccagtatggacaatgggccccaaagttggctcgcctccattactccggtagcataaatgcgtggtccactaaagaacctttcagctggattaaggtcgatcttcttgcccccatgatcatccacggcattaagacacagggagcgaggcagaaattctcctccctctacatctcacagttcattattatgtatagtttggacggcaagaagtggcaaacttatagaggtaacagtactggaacactcatggtgttcttcggcaacgttgatagctctggcatcaaacacaacatctttaatcctcccataatagctcggtacatcagattgcatccgacccactacagcattaggagtacactccgaatggagcttatgggttgcgacttgaattcctgttcaatgccactcggaatggagtctaaagccatctctgatgcacagataaccgccagtagctactttacgaacatgtttgctacgtggtcaccctctaaggcaaggcttcatttgcaaggccggtctaatgcctggagacctcaggtgaacaacccgaaagaatggctccaggtggactttcagaagaccatgaaagtaacaggtgtcactactcagggagttaagtccttgctcaccagcatgtatgtgaaggagttccttatttcctcatcacaagatggccaccagtggaccctcttctttcagaatggtaaggtcaaagtgtttcagggcaatcaagacacgttcacacccgtggtgaacagtcttgatcctccactcttgacacgataccttcgaatccatccacagtcttgggttcaccagattgcattgcgcatggaagtacttggatgcgaggctcaggacctctac

SEQ ID NO: 2438 - protein, 1457 aa, synthetic construct
  REGION 1..1457: note = Variant of human B-domain deleted Factor VIII
MQIELSTCFFLCLLRFCFSATRRYYLGAVELSWDYMQSDLGELPVDARFPPRVPKSFPFNTSVVYKKTLFVEFTDHLFNIAKPRPPWMGLLGPTIQAEVYDTVVITLKNMASHPVSLHAVGVSYWKASEGAEYDDQTSQREKEDDKVFPGGSHTYVWQVLKENGPMASDPLCLTYSYLSHVDLVKDLNSGLIGALLVCREGSLAKEKTQTLHKFILLFAVFDEGKSWHSETKNSLMQDRDAASARAWPKMHTVNGYVNRSLPGLIGCHRKSVYWHVIGMGTTPEVHSIFLEGHTFLVRNHRQASLEISPITFLTAQTLLMDLGQFLLFCHISSHQHDGMEAYVKVDSCPEEPQLRMKNNEEAEDYDDDLTDSEMDVVRFDDDNSPSFIQIRSVAKKHPKTWVHYIAAEEEDWDYAPLVLAPDDRSYKSQYLNNGPQRIGRKYKKVRFMAYTDETFKTREAIQHESGILGPLLYGEVGDTLLIIFKNQASRPYNIYPHGITDVRPLYSRRLPKGVKHLKDFPILPGEIFKYKWTVTVEDGPTKSDPRCLTRYYSSFVNMERDLASGLIGPLLICYKESVDQRGNQIMSDKRNVILFSVFDENRSWYLTENIQRFLPNPAGVQLEDPEFQASNIMHSINGYVFDSLQLSVCLHEVAYWYILSIGAQTDFLSVFFSGYTFKHKMVYEDTLTLFPFSGETVFMSMENPGLWILGCHNSDFRNRGMTALLKVSSCDKNTGDYYEDSYEDISAYLLSKNNAIEPRSFSQNPPVLKRHQREITRTTLQSDQEEIDYDDTISVEMKKEDFDIYDEDENQSPRSFQKKTRHYFIAAVERLWDYGMSSSPHVLRNRAQSGSVPQFKKVVFQEFTDGSFTQPLYRGELNEHLGLLGPYIRAEVEDNIMVTFRNQASRPYSFYSSLISYEEDQRQGAEPRKNFVKPNETKTYFWKVQHHMAPTKDEFDCKAWAYFSDVDLEKDVHSGLIGPLLVCHTNTLNPAHGRQVTVQEFALFFTIFDETKSWYFTENMERNCRAPCNIQMEDPTFKENYRFHAINGYIMDTLPGLVMAQDQRIRWYLLSMGSNENIHSIHFSGHVFTVRKKEEYKMALYNLYPGVFETVEMLPSKAGIWRVECLIGEHLHAGMSTLFLVYSNKCQTPLGMASGHIRDFQITASGQYGQWAPKLARLHYSGSINAWSTKEPFSWIKVDLLAPMIIHGIKTQGARQKFSSLYISQFIIMYSLDGKKWQTYRGNSTGTLMVFFGNVDSSGIKHNIFNPPIIARYIRLHPTHYSIRSTLRMELMGCDLNSCSMPLGMESKAISDAQITASSYFTNMFATWSPSKARLHLQGRSNAWRPQVNNPKEWLQVDFQKTMKVTGVTTQGVKSLLTSMYVKEFLISSSQDGHQWTLFFQNGKVKVFQGNQDTFTPVVNSLDPPLLTRYLRIHPQSWVHQIALRMEVLGCEAQDLY

SEQ ID NO: 2439 - DNA, 4371 bp, synthetic construct
  misc_feature 1..4371: note = Variant of human B-domain deleted Factor VIII
  source 1..4371: mol_type = other DNA
atgcagattgaactgtctacctgcttcttcctctgtttgctgaggttctgctttagcgccactagacggtactaccttggcgctgtggagctgtcctgggactatatgcagagtgatttgggagagcttcccgtcgacgcacgatttcctcctcgcgttccaaagtcatttcccttcaacacaagctgtgtgtacaagaagacgctcttcgtcgaattcaccgatcacctgttcaatatcgccaaacccagaccaccatggatgggtcttttggggcctaccatacaagcggaggtgtatgacacagttgttatcactctcaagaacatggcttctcatccggtaagtcttcacgcagtgggcgtgtcctactggaaagcttcagaaggagccgagtatgatgatcagacatcccagagggagaaagaagacgacaaggtatttccaggtgggtctcatacctatgtgtggcaagtgctcaaagagaatggccctatggcaagcgatccgctctgtttgacttacagctacctttcacacgttgacctcgtcaaggacctcaactccgggttgattggagccttgttggtatgcagggaaggatctcttgccaaagagaagacacagaccctccacaagtttatccttctctttgctgtgttcgatgagggcaaaagttggcatagcgaaacgaagaattccctcatgcaggatcgcgacgcagccagcgccagagcttggcccaagatgcacactgtgaacggatatgtcaataggtcacttcctggcttgattgggtgtcatcggaaaagtgtctactggcacgtgatcggaatggggacaacaccagaggtccactccatatttctcgaaggccataccttccttgttcgaaaccacagacaggcatccttggagatctctcccattacctttctcactgcccaaacgctccttatggacttgggtcagttccttctcttctgccatatcagctcacaccagcatgatggtatggaagcttatgtgaaagtcgacagttgtcctgaggagccacagttgcgcatgaagaataatgaagaagccgaggattacgacgacgatctcaccgattctgagatggacgtggtgaggtttgatgacgacaactctccctccttcattcaaatccggagcgtggcgaagaaacaccccaagacttgggtccactatatagcggcggaagaggaggattgggattacgctcctcttgtattggcaccagatgaccgctcatacaaaagccagtacctcaacaacggaccgcagagaattggccggaagtataagaaagtgcgatttatggcctatacagacgaaacctttaagacaagggaggccatccagcatgagagtgggattttgggacctcttctttacggcgaagttggtgataccctcctcatcatcttcaagaatcaagcttctcgcccctataacatttacccacacgggatcactgacgttaggcctttgtatagcagaagacttcccaaaggcgtgaagcatctcaaagacttccccattttgccaggcgagatctttaagtacaaatggaccgtcacagtggaagatggaccgactaaatcagaccctcgatgccttacgcggtactattcctccttcgtgaatatggagagagatttggcaagcggactcataggaccactcctcatctgttacaaggaatctgtagaccagaggggtaaccagattatgagtgataaacgcaatgtgatcctttttagcgtcttcgacgagaaccggtcctggtacttgaccgagaatatacaaaggttccttcccaaccccgcaggcgttcagttggaagaccctgagtttcaggccagcaatattatgcactcaatcaacggctatgtgtttgatagtctccagctttctgtttgcctccatgaagtagcctattggtacatcttgtcaattggtgctcaaacagacttcctctccgtcttcttctccggctacacctttaagcacaagatggtgtatgaggacactctcacactctttccattttctggagaaaccgtgttcatgagcatggagaatccaggcctttggatcttgggttgccacaacagtgattttcgcaatcggggaatgactgctctcctcaaagtcagcagctgtgataagaacacaggcgactattacgaagattcttacgaggacataagtgcctacttgttgtccaagaataacgccattgagcccagatcattctcccagaatcctcccgtgcttaaaaggcatcagcgcgaaatcaccagaactactcttcagtctgatcaagaggagattgactatgacgacaccataagcgtggaaatgaagaaggaggatttcgatatctatgacgaagatgagaaccagtctccgcggagctttcagaagaagacgcgacactacttcattgcagcagtcgaaaggctttgggactacggtatgtcatcatcccctcatgtgttgcgcaatagagctcagagtggaagtgttccacagttcaagaaagtcgtctttcaagagtttacagatggcagcttcacacagcctctctatcggggcgagcttaacgaacatttgggactccttggtccctatatccgagccgaagtggaggacaacattatggttacctttaggaatcaagcctctcgcccctacagcttctactcctccctcatcagttatgaggaggatcagagacaaggcgctgaaccacggaagaactttgtgaaaccgaatgagacgaagacctacttctggaaagtacagcaccacatggcccccacaaaagacgaattcgattgcaaagcatgggcgtatttttcagacgttgacttggagaaagatgtacattcaggacttattggtcctttgttggtgtgtcacactaacactctcaatccagcccatggcaggcaggtgacagtccaggaattcgctcttttctttaccatctttgatgagaccaagtcctggtacttcacggaaaacatggagcgcaattgcagagccccctgtaacatacagatggaggaccctacctttaaggaaaattatcggttccacgcaatcaacggatacattatggatacactacctggccttgtgatggctcaggaccaacgaatcaggtggtacctcctcagcatgggttctaatgagaacatacactccattcacttttcaggacatgtgttcactgtccggaagaaagaagagtataagatggccctctacaatttgtatccaggcgtgtttgagaccgttgaaatgcttccctctaaagctggcatctggagagtagagtgcttgatcggagaacatcttcacgcaggtatgagcaccttgttcctcgtgtacagcaacaaatgtcagaccccacttggcatggccagtggacacattcgcgactttcagatcacagcatctggccagtatggacaatgggccccaaagttggctcgcctccattactccggtagcataaatgcgtggtccactaaagaacctttcagctggattaaggtcgatcttcttgcccccatgatcatccacggcattaagacacagggagcgaggcagaaattctcctccctctacatctcacagttcattattatgtatagtttggacggcaagaagtggcaaacttatagaggtaacagtactggaacactcatggtgttcttcggcaacgttgatagctctggcatcaaacacaacatctttaatcctcccataatagctcggtacatcagattgcatccgacccactacagcattaggagtacactccgaatggagcttatgggttgcgacttgaattcctgttcaatgccactcggaatggagtctaaagccatctctgatgcacagataaccgccagtagctactttacgaacatgtttgctacgtggtcaccctctaaggcaaggcttcatttgcaaggccggtctaatgcctggagacctcaggtgaacaacccgaaagaatggctccaggtggactttcagaagaccatgaaagtaacaggtgtcactactcagggagttaagtccttgctcaccagcatgtatgtgaaggagttccttatttcctcatcacaagatggccaccagtggaccctcttctttcagaatggtaaggtcaaagtgtttcagggcaatcaagacagcttcacacccgtggtgaacagtcttgatcctccactcttgacacgataccttcgaatccatccacagtcttgggttcaccagattgcattgcgcatggaagtacttggatgcgaggctcaggacctctac

SEQ ID NO: 2440 - protein, 1457 aa, synthetic construct
  REGION 1..1457: note = Variant of human B-domain deleted Factor VIII
MQIELSTCFFLCLLRFCFSATRRYYLGAVELSWDYMQSDLGELPVDARFPPRVPKSFPFNTSCVYKKTLFVEFTDHLFNIAKPRPPWMGLLGPTIQAEVYDTVVITLKNMASHPVSLHAVGVSYWKASEGAEYDDQTSQREKEDDKVFPGGSHTYVWQVLKENGPMASDPLCLTYSYLSHVDLVKDLNSGLIGALLVCREGSLAKEKTQTLHKFILLFAVFDEGKSWHSETKNSLMQDRDAASARAWPKMHTVNGYVNRSLPGLIGCHRKSVYWHVIGMGTTPEVHSIFLEGHTFLVRNHRQASLEISPITFLTAQTLLMDLGQFLLFCHISSHQHDGMEAYVKVDSCPEEPQLRMKNNEEAEDYDDDLTDSEMDVVRFDDDNSPSFIQIRSVAKKHPKTWVHYIAAEEEDWDYAPLVLAPDDRSYKSQYLNNGPQRIGRKYKKVRFMAYTDETFKTREAIQHESGILGPLLYGEVGDTLLIIFKNQASRPYNIYPHGITDVRPLYSRRLPKGVKHLKDFPILPGEIFKYKWTVTVEDGPTKSDPRCLTRYYSSFVNMERDLASGLIGPLLICYKESVDQRGNQIMSDKRNVILFSVFDENRSWYLTENIQRFLPNPAGVQLEDPEFQASNIMHSINGYVFDSLQLSVCLHEVAYWYILSIGAQTDFLSVFFSGYTFKHKMVYEDTLTLFPFSGETVFMSMENPGLWILGCHNSDFRNRGMTALLKVSSCDKNTGDYYEDSYEDISAYLLSKNNAIEPRSFSQNPPVLKRHQREITRTTLQSDQEEIDYDDTISVEMKKEDFDIYDEDENQSPRSFQKKTRHYFIAAVERLWDYGMSSSPHVLRNRAQSGSVPQFKKVVFQEFTDGSFTQPLYRGELNEHLGLLGPYIRAEVEDNIMVTFRNQASRPYSFYSSLISYEEDQRQGAEPRKNFVKPNETKTYFWKVQHHMAPTKDEFDCKAWAYFSDVDLEKDVHSGLIGPLLVCHTNTLNPAHGRQVTVQEFALFFTIFDETKSWYFTENMERNCRAPCNIQMEDPTFKENYRFHAINGYIMDTLPGLVMAQDQRIRWYLLSMGSNENIHSIHFSGHVFTVRKKEEYKMALYNLYPGVFETVEMLPSKAGIWRVECLIGEHLHAGMSTLFLVYSNKCQTPLGMASGHIRDFQITASGQYGQWAPKLARLHYSGSINAWSTKEPFSWIKVDLLAPMIIHGIKTQGARQKFSSLYISQFIIMYSLDGKKWQTYRGNSTGTLMVFFGNVDSSGIKHNIFNPPIIARYIRLHPTHYSIRSTLRMELMGCDLNSCSMPLGMESKAISDAQITASSYFTNMFATWSPSKARLHLQGRSNAWRPQVNNPKEWLQVDFQKTMKVTGVTTQGVKSLLTSMYVKEFLISSSQDGHQWTLFFQNGKVKVFQGNQDSFTPVVNSLDPPLLTRYLRIHPQSWVHQIALRMEVLGCEAQDLY

SEQ ID NO: 2441 - DNA, 4371 bp, synthetic construct
  misc_feature 1..4371: note = Variant of human B-domain deleted Factor VIII
  source 1..4371: mol_type = other DNA
atgcagattgaactgtctacctgcttcttcctctgtttgctgaggttctgctttagcgccactagacggtactaccttggcgctgtggagctgtcctgggactatatgcagagtgatttgggagagcttcccgtcgacgcacgatttcctcctcgcgttccaaagtcatttcccttcaacacaagcgtggtgtacaagaagacgctcttcgtcgaattcaccgatcacctgttcaatatcgccaaacccagaccaccatggatgggtcttttggggcctaccatacaagcggaggtgtatgacacagttgttatcactctcaagaacatggcttctcatccggtaagtcttcacgcagtgggcgtgtcctactggaaagcttcagaaggagccgagtatgatgatcagacatcccagagggagaaagaagacgacaaggtatttccaggtgggtctcatacctatgtgtggcaagtgctcaaagagaatggccctatggcaagcgatccgttttgtttgacttacagctacctttcacacgttgacctcgtcaaggacctcaactccgggttgattggagccttgttggtatgcagggaaggatctcttgccaaagagaagacacagaccctccacaagtttatccttctctttgctgtgttcgatgagggcaaaagttggcatagcgaaacgaagaattccctcatgcaggatcgcgacgcagccagcgccagagcttggcccaagatgcacactgtgaacggatatgtcaataggtcacttcctggcttgattgggtgtcatcggaaaagtgtctactggcacgtgatcggaatggggacaacaccagaggtccactccatatttctcgaaggccataccttccttgttcgaaaccacagacaggcatccttggagatctctcccattacctttctcactgcccaaacgctccttatggacttgggtcagttccttctcttctgccatatcagctcacaccagcatgatggtatggaagcttatgtgaaagtcgacagttgtcctgaggagccacagttgcgcatgaagaataatgaagaagccgaggattacgacgacgatctcaccgattctgagatggacgtggtgaggtttgatgacgacaactctccctccttcattcaaatccggagcgtggcgaagaaacaccccaagacttgggtccactatatagcggcggaagaggaggattgggattacgctcctcttgtattggcaccagatgaccgctcatacaaaagccagtacctcaacaacggaccgcagagaattggccggaagtataagaaagtgcgatttatggcctatacagacgaaacctttaagacaagggaggccatccagcatgagagtgggattttgggacctcttctttacggcgaagttggtgataccctcctcatcatcttcaagaatcaagcttctcgcccctataacatttacccacacgggatcactgacgttaggcctttgtatagcagaagacttcccaaaggcgtgaagcatctcaaagacttccccattttgccaggcgagatctttaagtacaaatggaccgtcacagtggaagatggaccgactaaatcagaccctcgatgccttacgcggtactattcctccttcgtgaatatggagagagatttggcaagcggactcataggaccactcctcatctgttacaaggaatctgtagaccagaggggtaaccagattatgagtgataaacgcaatgtgatcctttttagcgtcttcgacgagaaccggtcctggtacttgaccgagaatatacaaaggttccttcccaaccccgcaggcgttcagttggaagaccctgagtttcaggccagcaatattatgcactcaatcaacggctatgtgtttgatagtctccagctttctgtttgcctccatgaagtagcctattggtacatcttgtcaattggtgctcaaacagacttcctctccgtcttcttctccggctacacctttaagcacaagatggtgtatgaggacactctcacactctttccattttctggagaaaccgtgttcatgagcatggagaatccaggcctttggatcttgggttgccacaacagtgattttcgcaatcggggaatgactgctctcctcaaagtcagcagctgtgataagaacacaggcgactattacgaagattcttacgaggacataagtgcctacttgttgtccaagaataacgccattgagcccagatcattctcccagaatcctcccgtgcttaaaaggcatcagcgcgaaatcaccagaactactcttcagtctgatcaagaggagattgactatgacgacaccataagcgtggaaatgaagaaggaggatttcgatatctatgacgaagatgagaaccagtctccgcggagctttcagaagaagacgcgacactacttcattgcagcagtcgaaaggctttgggactacggtatgtcatcatcccctcatgtgttgcgcaatagagctcagagtggaagtgttccacagttcaagaaagtcgtctttcaagagtttacagatggcagcttcacacagcctctctatcggggcgagcttaacgaacatttgggactccttggtccctatatccgagccgaagtggaggacaacattatggttacctttaggaatcaagcctctcgcccctacagcttctactcctccctcatcagttatgaggaggatcagagacaaggcgctgaaccacggaagaactttgtgaaaccgaatgagacgaagacctacttctggaaagtacagcaccacatggcccccacaaaagacgaattcgattgcaaagcatgggcgtatttttcagacgttgacttggagaaagatgtacattcaggacttattggtcctttgttggtgtgtcacactaacactctcaatccagcccatggcaggcaggtgacagtccaggaattcgctcttttctttaccatctttgatgagaccaagtcctggtacttcacggaaaacatggagcgcaattgcagagccccctgtaacatacagatggaggaccctacctttaaggaaaattatcggttccacgcaatcaacggatacattatggatacactccctggccttgtgatggctcaggaccaacgaatcaggtggtacctcctcagcatgggttctaatgagaacatacactccattcacttttcaggacatgtgttcactgtccggaagaaagaagagtataagatggccctctacaatttgtatccaggcgtgtttgagaccgttgaaatgcttccctctaaagctggcatctggagagtagagtgcttgatcggagaacatcttcacgcaggtatgagcaccttgttcctcgtgtacagcaacaaatgtcagaccccacttggcatggccagtggacacattcgcgactttcagatcacagcatctggccagtatggacaatgggccccaaagttggctcgcctccattactccggtagcataaatgcgtggtccactaaagaacctttcagctggattaaggtcgatcttcttgcccccatgatcatccacggcattaagacacagggagcgaggcagaaattctcctccctctacatctcacagttcattattatgtatagtttggacggcaagaagtggcaaacttatagaggtaacagtactggaacactcatggtgttcttcggcaacgttgatagctctggcatcaaacacaacatctttaatcctcccataatagctcggtacatcagattgcatccgacccactacagcattaggagtacactccgaatggagcttatgggttgcgacttgaattcctgttcaatgccactcggaatggagtctaaagccatctctgatgcacagataaccgccagtagctactttacgaacatgtttgctacgtggtcaccctctaaggcaaggcttcatttgcaaggccggtctaatgcctggagacctcaggtgaacaacccgaaagaatggctccaggtggactttcagaagaccatgaaagtaacaggtgtcactactcagggagttaagtccttgctcaccagcatgtatgtgaaggagttccttatttcctcatcacaagatggccaccagtggaccctcttctttcagaatggtaaggtcaaagtgtttcagggcaatcaagacagcttcacacccgtggtgaacagtcttgatcctccactcttgacacgataccttcgaatccatccacagtcttgggttcaccagattgcattgcgcatggaagtacttggatgcgaggctcaggacctctac

SEQ ID NO: 2442 - protein, 1457 aa, synthetic construct
  REGION 1..1457: note = Variant of human B-domain deleted Factor VIII
MQIELSTCFFLCLLRFCFSATRRYYLGAVELSWDYMQSDLGELPVDARFPPRVPKSFPFNTSVVYKKTLFVEFTDHLFNIAKPRPPWMGLLGPTIQAEVYDTVVITLKNMASHPVSLHAVGVSYWKASEGAEYDDQTSQREKEDDKVFPGGSHTYVWQVLKENGPMASDPFCLTYSYLSHVDLVKDLNSGLIGALLVCREGSLAKEKTQTLHKFILLFAVFDEGKSWHSETKNSLMQDRDAASARAWPKMHTVNGYVNRSLPGLIGCHRKSVYWHVIGMGTTPEVHSIFLEGHTFLVRNHRQASLEISPITFLTAQTLLMDLGQFLLFCHISSHQHDGMEAYVKVDSCPEEPQLRMKNNEEAEDYDDDLTDSEMDVVRFDDDNSPSFIQIRSVAKKHPKTWVHYIAAEEEDWDYAPLVLAPDDRSYKSQYLNNGPQRIGRKYKKVRFMAYTDETFKTREAIQHESGILGPLLYGEVGDTLLIIFKNQASRPYNIYPHGITDVRPLYSRRLPKGVKHLKDFPILPGEIFKYKWTVTVEDGPTKSDPRCLTRYYSSFVNMERDLASGLIGPLLICYKESVDQRGNQIMSDKRNVILFSVFDENRSWYLTENIQRFLPNPAGVQLEDPEFQASNIMHSINGYVFDSLQLSVCLHEVAYWYILSIGAQTDFLSVFFSGYTFKHKMVYEDTLTLFPFSGETVFMSMENPGLWILGCHNSDFRNRGMTALLKVSSCDKNTGDYYEDSYEDISAYLLSKNNAIEPRSFSQNPPVLKRHQREITRTTLQSDQEEIDYDDTISVEMKKEDFDIYDEDENQSPRSFQKKTRHYFIAAVERLWDYGMSSSPHVLRNRAQSGSVPQFKKVVFQEFTDGSFTQPLYRGELNEHLGLLGPYIRAEVEDNIMVTFRNQASRPYSFYSSLISYEEDQRQGAEPRKNFVKPNETKTYFWKVQHHMAPTKDEFDCKAWAYFSDVDLEKDVHSGLIGPLLVCHTNTLNPAHGRQVTVQEFALFFTIFDETKSWYFTENMERNCRAPCNIQMEDPTFKENYRFHAINGYIMDTLPGLVMAQDQRIRWYLLSMGSNENIHSIHFSGHVFTVRKKEEYKMALYNLYPGVFETVEMLPSKAGIWRVECLIGEHLHAGMSTLFLVYSNKCQTPLGMASGHIRDFQITASGQYGQWAPKLARLHYSGSINAWSTKEPFSWIKVDLLAPMIIHGIKTQGARQKFSSLYISQFIIMYSLDGKKWQTYRGNSTGTLMVFFGNVDSSGIKHNIFNPPIIARYIRLHPTHYSIRSTLRMELMGCDLNSCSMPLGMESKAISDAQITASSYFTNMFATWSPSKARLHLQGRSNAWRPQVNNPKEWLQVDFQKTMKVTGVTTQGVKSLLTSMYVKEFLISSSQDGHQWTLFFQNGKVKVFQGNQDSFTPVVNSLDPPLLTRYLRIHPQSWVHQIALRMEVLGCEAQDLY

SEQ ID NO: 2443 - DNA, 4371 bp, synthetic construct
  misc_feature 1..4371: note = Variant of human B-domain deleted Factor VIII
  source 1..4371: mol_type = other DNA
atgcagattgaactgtctacctgcttcttcctctgtttgctgaggttctgctttagcgccactagacggtactaccttggcgctgtggagctgtcctgggactatatgcagagtgatttgggagagcttcccgtcgacgcacgatttcctcctcgcgttccaaagtcatttcccttcaacacaagcgtggtgtacaagaagacgctcttcgtcgaattcaccgatcacctgttcaatatcgccaaacccagaccaccatggatgggtcttttggggcctaccatacaagcggaggtgtatgacacagttgttatcactctcaagaacatggcttctcatccggtaagtcttcacgcagtgggcgtgtcctactggaaagcttcagaaggagccgagtatgatgatcagacatcccagagggagaaagaagacgacaaggtatttccaggtgggtctcatacctatgtgtggcaagtgctcaaagagaatggccctatggcaagcgatccgctctgtttgacttacagctacctttcacacgttgacctcgtcaaggacctcaactccgggttgattggagccttgttggtatgcagggaaggatctcttgccaaagagaagacacagaccctccacaagtttatccttctctttgctgtgttcgatgagggcaaaagttggcatagcgaaacgaagaattccctcatgcaggatcgcgacgcagccagcgccagagcttggcccaagatgcacactgtgaacggatatgtcaataggtcacttcctggcttgattgggtgtcatcggaaaagtgtctactggcacgtgatcggaatggggacaacaccagaggtccactccatatttctcgaaggccataccttccttgttcgaaaccacagacaggcatccttggagatctctcccattacatttctcactgcccaaacgatgcttatggacttgggtcagttccttctcttctgccatatcagctcacaccagcatgatggtatggaagcttatgtgaaagtcgacagttgtcctgaggagccacagttgcgcatgaagaataatgaagaagccgaggattacgacgacgatctcaccgattctgagatggacgtggtgaggtttgatgacgacaactctccctccttcattcaaatccggagcgtggcgaagaaacaccccaagacttgggtccactatatagcggcggaagaggaggattgggattacgctcctcttgtattggcaccagatgaccgctcatacaaaagccagtacctcaacaacggaccgcagagaattggccggaagtataagaaagtgcgatttatggcctatacagacgaaacctttaagacaagggaggccatccagcatgagagtgggattttgggacctcttctttacggcgaagttggtgataccctcctcatcatcttcaagaatcaagcttctcgcccctataacatttacccacacgggatcactgacgttaggcctttgtatagcagaagacttcccaaaggcgtgaagcatctcaaagacttccccattttgccaggcgagatctttaagtacaaatggaccgtcacagtggaagatggaccgactaaatcagaccctcgatgccttacgcggtactattcctccttcgtgaatatggagagagatttggcaagcggactcataggaccactcctcatctgttacaaggaatctgtagaccagaggggtaaccagattatgagtgataaacgcaatgtgatcctttttagcgtcttcgacgagaaccggtcctggtacttgaccgagaatatacaaaggttccttcccaaccccgcaggcgttcagttggaagaccctgagtttcaggccagcaatattatgcactcaatcaacggctatgtgtttgatagtctccagctttctgtttgcctccatgaagtagcctattggtacatcttgtcaattggtgctcaaacagacttcctctccgtcttcttctccggctacacctttaagcacaagatggtgtatgaggacactctcacactctttccattttctggagaaaccgtgttcatgagcatggagaatccaggcctttggatcttgggttgccacaacagtgattttcgcaatcggggaatgactgctctcctcaaagtcagcagctgtgataagaacacaggcgactattacgaagattcttacgaggacataagtgcctacttgttgtccaagaataacgccattgagcccagatcattctcccagaatcctcccgtgcttaaaaggcatcagcgcgaaatcaccagaactactcttcagtctgatcaagaggagattgactatgacgacaccataagcgtggaaatgaagaaggaggatttcgatatctatgacgaagatgagaaccagtctccgcggagctttcagaagaagacgcgacactacttcattgcagcagtcgaaaggctttgggactacggtatgtcatcatcccctcatgtgttgcgcaatagagctcagagtggaagtgttccacagttcaagaaagtcgtctttcaagagtttacagatggcagcttcacacagcctctctatcggggcgagcttaacgaacatttgggactccttggtccctatatccgagccgaagtggaggacaacattatggttacctttaggaatcaagcctctcgcccctacagcttctactcctccctcatcagttatgaggaggatcagagacaaggcgctgaaccacggaagaactttgtgaaaccgaatgagacgaagacctacttctggaaagtacagcaccacatggcccccacaaaagacgaattcgattgcaaagcatgggcgtatttttcagacgttgacttggagaaagatgtacattcaggacttattggtcctttgttggtgtgtcacactaacactctcaatccagcccatggcaggcaggtgacagtccaggaattcgctcttttctttaccatctttgatgagaccaagtcctggtacttcacggaaaacatggagcgcaattgcagagccccctgtaacatacagatggaggaccctacctttaaggaaaattatcggttccacgcaatcaacggatacattatggatacactccctggccttgtgatggctcaggaccaacgaatcaggtggtacctcctcagcatgggttctaatgagaacatacactccattcacttttcaggacatgtgttcactgtccggaagaaagaagagtataagatggccctctacaatttgtatccaggcgtgtttgagaccgttgaaatgcttccctctaaagctggcatctggagagtagagtgcttgatcggagaacatcttcacgcaggtatgagcaccttgttcctcgtgtacagcaacaaatgtcagaccccacttggcatggccagtggacacattcgcgactttcagatcacagcatctggccagtatggacaatgggccccaaagttggctcgcctccattactccggtagcataaatgcgtggtccactaaagaacctttcagctggattaaggtcgatcttcttgcccccatgatcatccacggcattaagacacagggagcgaggcagaaattctcctccctctacatctcacagttcattattatgtatagtttggacggcaagaagtggcaaacttatagaggtaacagtactggaacactcatggtgttcttcggcaacgttgatagctctggcatcaaacacaacatctttaatcctcccataatagctcggtacatcagattgcatccgacccactacagcattaggagtacactccgaatggagcttatgggttgcgacttgaattcctgttcaatgccactcggaatggagtctaaagccatctctgatgcacagataaccgccagtagctactttacgaacatgtttgctacgtggtcaccctctaaggcaaggcttcatttgcaaggccggtctaatgcctggagacctcaggtgaacaacccgaaagaatggctccaggtggactttcagaagaccatgaaagtaacaggtgtcactactcagggagttaagtccttgctcaccagcatgtatgtgaaggagttccttatttcctcatcacaagatggccaccagtggaccctcttctttcagaatggtaaggtcaaagtgtttcagggcaatcaagacagcttcacacccgtggtgaacagtcttgatcctccactcttgacacgataccttcgaatccatccacagtcttgggttcaccagattgcattgcgcatggaagtacttggatgcgaggctcaggacctctac

SEQ ID NO: 2444 - protein, 1457 aa, synthetic construct
  REGION 1..1457: note = Variant of human B-domain deleted Factor VIII
MQIELSTCFFLCLLRFCFSATRRYYLGAVELSWDYMQSDLGELPVDARFPPRVPKSFPFNTSVVYKKTLFVEFTDHLFNIAKPRPPWMGLLGPTIQAEVYDTVVITLKNMASHPVSLHAVGVSYWKASEGAEYDDQTSQREKEDDKVFPGGSHTYVWQVLKENGPMASDPLCLTYSYLSHVDLVKDLNSGLIGALLVCREGSLAKEKTQTLHKFILLFAVFDEGKSWHSETKNSLMQDRDAASARAWPKMHTVNGYVNRSLPGLIGCHRKSVYWHVIGMGTTPEVHSIFLEGHTFLVRNHRQASLEISPITFLTAQTMLMDLGQFLLFCHISSHQHDGMEAYVKVDSCPEEPQLRMKNNEEAEDYDDDLTDSEMDVVRFDDDNSPSFIQIRSVAKKHPKTWVHYIAAEEEDWDYAPLVLAPDDRSYKSQYLNNGPQRIGRKYKKVRFMAYTDETFKTREAIQHESGILGPLLYGEVGDTLLIIFKNQASRPYNIYPHGITDVRPLYSRRLPKGVKHLKDFPILPGEIFKYKWTVTVEDGPTKSDPRCLTRYYSSFVNMERDLASGLIGPLLICYKESVDQRGNQIMSDKRNVILFSVFDENRSWYLTENIQRFLPNPAGVQLEDPEFQASNIMHSINGYVFDSLQLSVCLHEVAYWYILSIGAQTDFLSVFFSGYTFKHKMVYEDTLTLFPFSGETVFMSMENPGLWILGCHNSDFRNRGMTALLKVSSCDKNTGDYYEDSYEDISAYLLSKNNAIEPRSFSQNPPVLKRHQREITRTTLQSDQEEIDYDDTISVEMKKEDFDIYDEDENQSPRSFQKKTRHYFIAAVERLWDYGMSSSPHVLRNRAQSGSVPQFKKVVFQEFTDGSFTQPLYRGELNEHLGLLGPYIRAEVEDNIMVTFRNQASRPYSFYSSLISYEEDQRQGAEPRKNFVKPNETKTYFWKVQHHMAPTKDEFDCKAWAYFSDVDLEKDVHSGLIGPLLVCHTNTLNPAHGRQVTVQEFALFFTIFDETKSWYFTENMERNCRAPCNIQMEDPTFKENYRFHAINGYIMDTLPGLVMAQDQRIRWYLLSMGSNENIHSIHFSGHVFTVRKKEEYKMALYNLYPGVFETVEMLPSKAGIWRVECLIGEHLHAGMSTLFLVYSNKCQTPLGMASGHIRDFQITASGQYGQWAPKLARLHYSGSINAWSTKEPFSWIKVDLLAPMIIHGIKTQGARQKFSSLYISQFIIMYSLDGKKWQTYRGNSTGTLMVFFGNVDSSGIKHNIFNPPIIARYIRLHPTHYSIRSTLRMELMGCDLNSCSMPLGMESKAISDAQITASSYFTNMFATWSPSKARLHLQGRSNAWRPQVNNPKEWLQVDFQKTMKVTGVTTQGVKSLLTSMYVKEFLISSSQDGHQWTLFFQNGKVKVFQGNQDSFTPVVNSLDPPLLTRYLRIHPQSWVHQIALRMEVLGCEAQDLY

SEQ ID NO: 2445 - DNA, 4371 bp, synthetic construct
  misc_feature 1..4371: note = Variant of human B-domain deleted Factor VIII
  source 1..4371: mol_type = other DNA
atgcagattgaactgtctacctgcttcttcctctgtttgctgaggttctgctttagcgccactagacggtactaccttggcgctgtggagctgtcctgggactatatgcagagtgatttgggagagcttcccgtcgacgcacgatttcctcctcgcgttccaaagtcatttcccttcaacacaagcgtggtgtacaagaagacgctcttcgtcgaattcaccgatcacctgttcaatatcgccaaacccagaccaccatggatgggtcttttggggcctaccatacaagcggaggtgtatgacacagttgttatcactctcaagaacatggcttctcatccggtaagtcttcacgcagtgggcgtgtcctactggaaagcttcagaaggagccgagtatgatgatcagacatcccagagggagaaagaagacgacaaggtatttccaggtgggtctcatacctatgtgtggcaagtgctcaaagagaatggccctatggcaagcgatccgctctgtttgacttacagctacctttcacacgttgacctcgtcaaggacctcaactccgggttgattggagccttgttggtatgcagggaaggatctcttgccaaagagaagacacagaccctccacaagtttatccttctctttgctgtgttcgatgagggcaaaagttggcatagcgaaacgaagaattccctcatgcaggatcgcgacgcagccagcgccagagcttggcccaagatgcacactgtgaacggatatgtcaataggtcacttcctggcttgattgggtgtcatcggaaaagtgtctactggcacgtgatcggaatggggacaacaccagaggtccactccatatttctcgaaggccataccttccttgttcgaaaccacagacaggcatccttggagatctctcccattacctttctcactgcccaaacgctccttatggacttgggtcagttccttctcttctgccatatcagctcacaccagcatgatggtatggaagcttatgtgaaagtcgacagttgtcctgaggagccacagttgcgcatgaagaataatgaagaagccgaggattacgacgacgatctcaccgattctgagatggacgtggtgaggtttgatgacgacaactctccctccttcattcaaatccggagcgtggcgaagaaacaccccaagacttgggtccactatatagcggcggaagaggaggattgggattacgctcctcttgtattggcaccagatgaccgctcatacaaaagccagtacctcaacaacggaccgcagagaattggccggaagtataagaaagtgcgatttatggcctatacagacgaaacctttaagacaagggaggccatccagcatgagagtgggattttgggacctcttctttacggcgaagttggtgataccctcctcatcatcttcaagaatcaagcttctcgcccctataacatttacccacacgggatcactgacgttaggcctttgtatagcagaagacttcccaaaggcgtgaagcatctcaaagacttccccattttgccaggcgagatctttaagtacaaatggaccgtcacagtggaagatggaccgactaaatcagaccctcgatgccttacgcggtactattcctccttcgtgaatatggagagagatttggcaagcggactcataggaccactcctcatctgttacaaggaatctgtagaccagaggggtaaccagattatgagtgataaacgcaatgtgatcctttttagcgtcttcgacgagaaccggtcctggtacttgaccgagaatatacaaaggttccttcccaaccccgcaggcgttcagttggaagaccctgagtttcaggccagcaatattatgcactcaatcaacggctatgtgtttgatagtctccagctttctgtttgcctccatgaagtagcctattggtacatcttgtcaattggtgctcaaacagacttcctctccgtcttcttctccggctacacctttaagcacaagacggtgtatgaggacactctcacactctttccattttctggagaaaccgtgttcatgagcatggagaatccaggcctttggatcttgggttgccacaacagtgattttcgcaatcggggaatgactgctctcctcaaagtcagcagctgtgataagaacacaggcgactattacgaagattcttacgaggacataagtgcctacttgttgtccaagaataacgccattgagcccagatcattctcccagaatcctcccgtgcttaaaaggcatcagcgcgaaatcaccagaactactcttcagtctgatcaagaggagattgactatgacgacaccataagcgtggaaatgaagaaggaggatttcgatatctatgacgaagatgagaaccagtctccgcggagctttcagaagaagacgcgacactacttcattgcagcagtcgaaaggctttgggactacggtatgtcatcatcccctcatgtgttgcgcaatagagctcagagtggaagtgttccacagttcaagaaagtcgtctttcaagagtttacagatggcagcttcacacagcctctctatcggggcgagcttaacgaacatttgggactccttggtccctatatccgagccgaagtggaggacaacattatggttacctttaggaatcaagcctctcgcccctacagcttctactcctccctcatcagttatgaggaggatcagagacaaggcgctgaaccacggaagaactttgtgaaaccgaatgagacgaagacctacttctggaaagtacagcaccacatggcccccacaaaagacgaattcgattgcaaagcatgggcgtatttttcagacgttgacttggagaaagatgtacattcaggacttattggtcctttgttggtgtgtcacactaacactctcaatccagcccatggcaggcaggtgacagtccaggaattcgctcttttctttaccatctttgatgagaccaagtcctggtacttcacggaaaacatggagcgcaattgcagagccccctgtaacatacagatggaggaccctacctttaaggaaaattatcggttccacgcaatcaacggatacattatggatacactccctggccttgtgatggctcaggaccaacgaatcaggtggtacctcctcagcatgggttctaatgagaacatacactccattcacttttcaggacatgtgttcactgtccggaagaaagaagagtataagatggccctctacaatttgtatccaggcgtgtttgagaccgttgaaatgcttccctctaaagctggcatctggagagtagagtgcttgatcggagaacatcttcacgcaggtatgagcaccttgttcctcgtgtacagcaacaaatgtcagaccccacttggcatggccagtggacacattcgcgactttcagatcacagcatctggccagtatggacaatgggccccaaagttggctcgcctccattactccggtagcataaatgcgtggtccactaaagaacctttcagctggattaaggtcgatcttcttgcccccatgatcatccacggcattaagacacagggagcgaggcagaaattctcctccctctacatctcacagttcattattatgtatagtttggacggcaagaagtggcaaacttatagaggtaacagtactggaacactcatggtgttcttcggcaacgttgatagctctggcatcaaacacaacatctttaatcctcccataatagctcggtacatcagattgcatccgacccactacagcattaggagtacactccgaatggagcttatgggttgcgacttgaattcctgttcaatgccactcggaatggagtctaaagccatctctgatgcacagataaccgccagtagctactttacgaacatgtttgctacgtggtcaccctctaaggcaaggcttcatttgcaaggccggtctaatgcctggagacctcaggtgaacaacccgaaagaatggctccaggtggactttcagaagaccatgaaagtaacaggtgtcactactcagggagttaagtccttgctcaccagcatgtatgtgaaggagttccttatttcctcatcacaagatggccaccagtggaccctcttctttcagaatggtaaggtcaaagtgtttcagggcaatcaagacagcttcacacccgtggtgaacagtcttgatcctccactcttgacacgataccttcgaatccatccacagtcttgggttcaccagattgcattgcgcatggaagtacttggatgcgaggctcaggacctctac

SEQ ID NO: 2446 - protein, 1457 aa, synthetic construct
  REGION 1..1457: note = Variant of human B-domain deleted Factor VIII
MQIELSTCFFLCLLRFCFSATRRYYLGAVELSWDYMQSDLGELPVDARFPPRVPKSFPFNTSVVYKKTLFVEFTDHLFNIAKPRPPWMGLLGPTIQAEVYDTVVITLKNMASHPVSLHAVGVSYWKASEGAEYDDQTSQREKEDDKVFPGGSHTYVWQVLKENGPMASDPLCLTYSYLSHVDLVKDLNSGLIGALLVCREGSLAKEKTQTLHKFILLFAVFDEGKSWHSETKNSLMQDRDAASARAWPKMHTVNGYVNRSLPGLIGCHRKSVYWHVIGMGTTPEVHSIFLEGHTFLVRNHRQASLEISPITFLTAQTLLMDLGQFLLFCHISSHQHDGMEAYVKVDSCPEEPQLRMKNNEEAEDYDDDLTDSEMDVVRFDDDNSPSFIQIRSVAKKHPKTWVHYIAAEEEDWDYAPLVLAPDDRSYKSQYLNNGPQRIGRKYKKVRFMAYTDETFKTREAIQHESGILGPLLYGEVGDTLLIIFKNQASRPYNIYPHGITDVRPLYSRRLPKGVKHLKDFPILPGEIFKYKWTVTVEDGPTKSDPRCLTRYYSSFVNMERDLASGLIGPLLICYKESVDQRGNQIMSDKRNVILFSVFDENRSWYLTENIQRFLPNPAGVQLEDPEFQASNIMHSINGYVFDSLQLSVCLHEVAYWYILSIGAQTDFLSVFFSGYTFKHKTVYEDTLTLFPFSGETVFMSMENPGLWILGCHNSDFRNRGMTALLKVSSCDKNTGDYYEDSYEDISAYLLSKNNAIEPRSFSQNPPVLKRHQREITRTTLQSDQEEIDYDDTISVEMKKEDFDIYDEDENQSPRSFQKKTRHYFIAAVERLWDYGMSSSPHVLRNRAQSGSVPQFKKVVFQEFTDGSFTQPLYRGELNEHLGLLGPYIRAEVEDNIMVTFRNQASRPYSFYSSLISYEEDQRQGAEPRKNFVKPNETKTYFWKVQHHMAPTKDEFDCKAWAYFSDVDLEKDVHSGLIGPLLVCHTNTLNPAHGRQVTVQEFALFFTIFDETKSWYFTENMERNCRAPCNIQMEDPTFKENYRFHAINGYIMDTLPGLVMAQDQRIRWYLLSMGSNENIHSIHFSGHVFTVRKKEEYKMALYNLYPGVFETVEMLPSKAGIWRVECLIGEHLHAGMSTLFLVYSNKCQTPLGMASGHIRDFQITASGQYGQWAPKLARLHYSGSINAWSTKEPFSWIKVDLLAPMIIHGIKTQGARQKFSSLYISQFIIMYSLDGKKWQTYRGNSTGTLMVFFGNVDSSGIKHNIFNPPIIARYIRLHPTHYSIRSTLRMELMGCDLNSCSMPLGMESKAISDAQITASSYFTNMFATWSPSKARLHLQGRSNAWRPQVNNPKEWLQVDFQKTMKVTGVTTQGVKSLLTSMYVKEFLISSSQDGHQWTLFFQNGKVKVFQGNQDSFTPVVNSLDPPLLTRYLRIHPQSWVHQIALRMEVLGCEAQDLY

SEQ ID NO: 2447 - DNA, 4371 bp, synthetic construct
  misc_feature 1..4371: note = Variant of human B-domain deleted Factor VIII
  source 1..4371: mol_type = other DNA
atgcagattgaactgtctacctgcttcttcctctgtttgctgaggttctgctttagcgccactagacggtactaccttggcgctgtggagctgtcctgggactatatgcagagtgatttgggagagcttcccgtcgacgcacgatttcctcctcgcgttccaaagtcatttcccttcaacacaagcgtggtgtacaagaagacgctcttcgtcgaattcaccgatcacctgttcaatatcgccaaacccagaccaccatggatgggtcttttggggcctaccatacaagcggaggtgtatgacacagttgttatcactctcaagaacatggcttctcatccggtaagtcttcacgcagtgggcgtgtcctactggaaagcttcagaaggagccgagtatgatgatcagacatcccagagggagaaagaagacgacaaggtatttccaggtgggtctcatacctatgtgtggcaagtgctcaaagagaatggccctatggcaagcgatccgctctgtttgacttacagctacctttcacacgttgacctcgtcaaggacctcaactccgggttgattggagccttgttggtatgcagggaaggatctcttgccaaagagaagacacagaccctccacaagtttatccttctctttgctgtgttcgatgagggcaaaagttggcatagcgaaacgaagaattccctcatgcaggatcgcgacgcagccagcgccagagcttggcccaagatgcacactgtgaacggatatgtcaataggtcacttcctggcttgattgggtgtcatcggaaaagtgtctactggcacgtgatcggaatggggacaacaccagaggtccactccatatttctcgaaggccataccttccttgttcgaaaccacagacaggcatccttggagatctctcccattacctttctcactgcccaaacgctccttatggacttgggtcagttccttctcttctgccatatcagctcacaccagcatgatggtatggaagcttatgtgaaagtcgacagttgtcctgaggagccacagttgcgcatgaagaataatgaagaagccgaggattacgacgacgatctcaccgattctgagatggacgtggtgaggtttgatgacgacaactctccctccttcattcaaatccggagcgtggcgaagaaacaccccaagacttgggtccactatatagcggcggaagaggaggattgggattacgctcctcttgtattggcaccagatgaccgctcatacaaaagccagtacctcaacaacggaccgcagagaattggccggaagtataagaaagtgcgatttatggcctatacagacgaaacctttaagacaagggaggccatccagcatgagagtgggattttgggacctcttctttacggcgaagttggtgataccctcctcatcatcttcaagaatcaagcttctcgcccctataacatttacccacacgggatcactgacgttaggcctttgtatagcagaagacttcccaaaggcgtgaagcatctcaaagacttccccattttgccaggcgagatctttaagtacaaatggacctttacagtggaagatggaccgactaaatcagaccctcgatgccttacgcggtactattcctccttcgtgaatatggagagagatttggcaagcggactcataggaccactcctcatctgttacaaggaatctgtagaccagaggggtaaccagattatgagtgataaacgcaatgtgatcctttttagcgtcttcgacgagaaccggtcctggtacttgaccgagaatatacaaaggttccttcccaaccccgcaggcgttcagttggaagaccctgagtttcaggccagcaatattatgcactcaatcaacggctatgtgtttgatagtctccagctttctgtttgcctccatgaagtagcctattggtacatcttgtcaattggtgctcaaacagacttcctctccgtcttcttctccggctacacctttaagcacaagatggtgtatgaggacactctcacactctttccattttctggagaaaccgtgttcatgagcatggagaatccaggcctttggatcttgggttgccacaacagtgattttcgcaatcggggaatgactgctctcctcaaagtcagcagctgtgataagaacacaggcgactattacgaagattcttacgaggacataagtgcctacttgttgtccaagaataacgccattgagcccagatcattctcccagaatcctcccgtgcttaaaaggcatcagcgcgaaatcaccagaactactcttcagtctgatcaagaggagattgactatgacgacaccataagcgtggaaatgaagaaggaggatttcgatatctatgacgaagatgagaaccagtctccgcggagctttcagaagaagacgcgacactacttcattgcagcagtcgaaaggctttgggactacggtatgtcatcatcccctcatgtgttgcgcaatagagctcagagtggaagtgttccacagttcaagaaagtcgtctttcaagagtttacagatggcagcttcacacagcctctctatcggggcgagcttaacgaacatttgggactccttggtccctatatccgagccgaagtggaggacaacattatggttacctttaggaatcaagcctctcgcccctacagcttctactcctccctcatcagttatgaggaggatcagagacaaggcgctgaaccacggaagaactttgtgaaaccgaatgagacgaagacctacttctggaaagtacagcaccacatggcccccacaaaagacgaattcgattgcaaagcatgggcgtatttttcagacgttgacttggagaaagatgtacattcaggacttattggtcctttgttggtgtgtcacactaacactctcaatccagcccatggcaggcaggtgacagtccaggaattcgctcttttctttaccatctttgatgagaccaagtcctggtacttcacggaaaacatggagcgcaattgcagagccccctgtaacatacagatggaggaccctacctttaaggaaaattatcggttccacgcaatcaacggatacattatggatacactccctggccttgtgatggctcaggaccaacgaatcaggtggtacctcctcagcatgggttctaatgagaacatacactccattcacttttcaggacatgtgttcactgtccggaagaaagaagagtataagatggccctctacaatttgtatccaggcgtgtttgagaccgttgaaatgcttccctctaaagctggcatctggagagtagagtgcttgatcggagaacatcttcacgcaggtatgagcaccttgttcctcgtgtacagcaacaaatgtcagaccccacttggcatggccagtggacacattcgcgactttcagatcacagcatctggccagtatggacaatgggccccaaagttggctcgcctccattactccggtagcataaatgcgtggtccactaaagaacctttcagctggattaaggtcgatcttcttgcccccatgatcatccacggcattaagacacagggagcgaggcagaaattctcctccctctacatctcacagttcattattatgtatagtttggacggcaagaagtggcaaacttatagaggtaacagtactggaacactcatggtgttcttcggcaacgttgatagctctggcatcaaacacaacatctttaatcctcccataatagctcggtacatcagattgcatccgacccactacagcattaggagtacactccgaatggagcttatgggttgcgacttgaattcctgttcaatgccactcggaatggagtctaaagccatctctgatgcacagataaccgccagtagctactttacgaacatgtttgctacgtggtcaccctctaaggcaaggcttcatttgcaaggccggtctaatgcctggagacctcaggtgaacaacccgaaagaatggctccaggtggactttcagaagaccatgaaagtaacaggtgtcactactcagggagttaagtccttgctcaccagcatgtatgtgaaggagttccttatttcctcatcacaagatggccaccagtggaccctcttctttcagaatggtaaggtcaaagtgtttcagggcaatcaagacagcttcacacccgtggtgaacagtcttgatcctccactcttgacacgataccttcgaatccatccacagtcttgggttcaccagattgcattgcgcatggaagtacttggatgcgaggctcaggacctctac

SEQ ID NO: 2448 - protein, 1457 aa, synthetic construct
  REGION 1..1457: note = Variant of human B-domain deleted Factor VIII
MQIELSTCFFLCLLRFCFSATRRYYLGAVELSWDYMQSDLGELPVDARFPPRVPKSFPFNTSVVYKKTLFVEFTDHLFNIAKPRPPWMGLLGPTIQAEVYDTVVITLKNMASHPVSLHAVGVSYWKASEGAEYDDQTSQREKEDDKVFPGGSHTYVWQVLKENGPMASDPLCLTYSYLSHVDLVKDLNSGLIGALLVCREGSLAKEKTQTLHKFILLFAVFDEGKSWHSETKNSLMQDRDAASARAWPKMHTVNGYVNRSLPGLIGCHRKSVYWHVIGMGTTPEVHSIFLEGHTFLVRNHRQASLEISPITFLTAQTLLMDLGQFLLFCHISSHQHDGMEAYVKVDSCPEEPQLRMKNNEEAEDYDDDLTDSEMDVVRFDDDNSPSFIQIRSVAKKHPKTWVHYIAAEEEDWDYAPLVLAPDDRSYKSQYLNNGPQRIGRKYKKVRFMAYTDETFKTREAIQHESGILGPLLYGEVGDTLLIIFKNQASRPYNIYPHGITDVRPLYSRRLPKGVKHLKDFPILPGEIFKYKWTFTVEDGPTKSDPRCLTRYYSSFVNMERDLASGLIGPLLICYKESVDQRGNQIMSDKRNVILFSVFDENRSWYLTENIQRFLPNPAGVQLEDPEFQASNIMHSINGYVFDSLQLSVCLHEVAYWYILSIGAQTDFLSVFFSGYTFKHKMVYEDTLTLFPFSGETVFMSMENPGLWILGCHNSDFRNRGMTALLKVSSCDKNTGDYYEDSYEDISAYLLSKNNAIEPRSFSQNPPVLKRHQREITRTTLQSDQEEIDYDDTISVEMKKEDFDIYDEDENQSPRSFQKKTRHYFIAAVERLWDYGMSSSPHVLRNRAQSGSVPQFKKVVFQEFTDGSFTQPLYRGELNEHLGLLGPYIRAEVEDNIMVTFRNQASRPYSFYSSLISYEEDQRQGAEPRKNFVKPNETKTYFWKVQHHMAPTKDEFDCKAWAYFSDVDLEKDVHSGLIGPLLVCHTNTLNPAHGRQVTVQEFALFFTIFDETKSWYFTENMERNCRAPCNIQMEDPTFKENYRFHAINGYIMDTLPGLVMAQDQRIRWYLLSMGSNENIHSIHFSGHVFTVRKKEEYKMALYNLYPGVFETVEMLPSKAGIWRVECLIGEHLHAGMSTLFLVYSNKCQTPLGMASGHIRDFQITASGQYGQWAPKLARLHYSGSINAWSTKEPFSWIKVDLLAPMIIHGIKTQGARQKFSSLYISQFIIMYSLDGKKWQTYRGNSTGTLMVFFGNVDSSGIKHNIFNPPIIARYIRLHPTHYSIRSTLRMELMGCDLNSCSMPLGMESKAISDAQITASSYFTNMFATWSPSKARLHLQGRSNAWRPQVNNPKEWLQVDFQKTMKVTGVTTQGVKSLLTSMYVKEFLISSSQDGHQWTLFFQNGKVKVFQGNQDSFTPVVNSLDPPLLTRYLRIHPQSWVHQIALRMEVLGCEAQDLY

SEQ ID NO: 2449 - DNA, 4371 bp, synthetic construct
  misc_feature 1..4371: note = Variant of human B-domain deleted Factor VIII
  source 1..4371: mol_type = other DNA
atgcagattgaactgtctacctgcttcttcctctgtttgctgaggttctgctttagcgccactagacggtactaccttggcgctgtggagctgtcctgggactatatgcagagtgatttgggagagcttcccgtcgacgcacgatttcctcctcgcgttccaaagtcatttcccttcaacacaagcgtggtgtacaagaagacgctcttcgtcgaattcaccgatcacctgttcaatatcgccaaacccagaccaccatggatgggtcttttggggcctaccatacaagcggaggtgtatgacacagttgttatcactctcaagaacatggcttctcatccggtaagtcttcacgcagtgggcgtgtcctactggaaagcttcagaaggagccgagtatgatgatcagacatcccagagggagaaagaagacgacaaggtatttccaggtgggtctcatacctatgtgtggcaagtgctcaaagagaatggccctatggcaagcgatccgctctgtttgacttacagctacctttcacacgttgacctcgtcaaggacctcaactccgggttgattggagccttgttggtatgcagggaaggatctcttgccaaagagaagacacagaccctccacaagtttatccttctctttgctgtgttcgatgagggcaaaagttggcatagcgaaacgaagaattccctcatgcaggatcgcgacgcagccagcgccagagcttggcccaagatgcacactgtgaacggatatgtcaataggtcacttcctggcttgattgggtgtcatcggaaaagtgtctactggcacgtgatcggaatggggacaacaccagaggtccactccatatttctcgaaggccataccttccttgttcgaaaccacagacaggcatccttggagatctctcccattacctttctcactgcccaaacgctccttatggacttgggtcagttccttctcttctgccatatcagctcacaccagcatgatggtatggaagcttatgtgaaagtcgacagttgtcctgaggagccacagttgcgcatgaagaataatgaagaagccgaggattacgacgacgatctcaccgattctgagatggacgtggtgaggtttgatgacgacaactctccctccttcattcaaatccggagcgtggcgaagaaacaccccaagacttgggtccactatatagcggcggaagaggaggattgggattacgctcctcttgtattggcaccagatgaccgctcatacaaaagccagtacctcaacaacggaccgcagagaattggccggaagtataagaaagtgcgatttatggcctatacagacgaaacctttaagacaagggaggccatccagcatgagagtgggattttgggacctcttctttacggcgaagttggtgataccctcctcatcatcttcaagaatcaagcttctcgcccctataacatttacccacacgggatcactgacgttaggcctttgtatagcagaagacttcccaaaggcgtgaagcatctcaaagacttccccattttgccaggcgagatctttaagtacaaatggaccgtcacagtggaagatggaccgactaaatcagaccctcgatgccttacgcggtactattcctccttcgtgaatatggagagagatttggcaagcggactcataggaccactcctcatctgttacaaggaatctgtagaccagaggggtaaccagattatgagtgataaacgcaatgtgatcctttttagcgtcttcgacgagaaccggtcctggtacttgaccgagaatatacaaaggttccttcccaaccccgcaggcgttcagttggaagaccctgagtttcaggccagcaatattatgcactcaatcaacggctatgtgtttgatagtctccagctttctgtttgcctccatgaagtagcctattggtacatcttgtcaattggtgctcaaacagacttcctctccgtcttcttctccggctacacctttaagcacaagatggtgtatgaggacactctcacactctttccattttctggagaaaccgtgttcatgagcatggagaatccaggcctttggatcttgggttgccacaacagtgattttcgcaatcggggaatgactgctctcctcaaagtcagcagctgtgataagaacacaggcgactattacgaagattcttacgaggacataagtgcctacttgaagtccaagaataacgccattgagcccagatcattctcccagaatcctcccgtgcttaaaaggcatcagcgcgaaatcaccagaactactcttcagtctgatcaagaggagattgactatgacgacaccataagcgtggaaatgaagaaggaggatttcgatatctatgacgaagatgagaaccagtctccgcggagctttcagaagaagacgcgacactacttcattgcagcagtcgaaaggctttgggactacggtatgtcatcatcccctcatgtgttgcgcaatagagctcagagtggaagtgttccacagttcaagaaagtcgtctttcaagagtttacagatggcagcttcacacagcctctctatcggggcgagcttaacgaacatttgggactccttggtccctatatccgagccgaagtggaggacaacattatggttacctttaggaatcaagcctctcgcccctacagcttctactcctccctcatcagttatgaggaggatcagagacaaggcgctgaaccacggaagaactttgtgaaaccgaatgagacgaagacctacttctggaaagtacagcaccacatggcccccacaaaagacgaattcgattgcaaagcatgggcgtatttttcagacgttgacttggagaaagatgtacattcaggacttattggtcctttgttggtgtgtcacactaacactctcaatccagcccatggcaggcaggtgacagtccaggaattcgctcttttctttaccatctttgatgagaccaagtcctggtacttcacggaaaacatggagcgcaattgcagagccccctgtaacatacagatggaggaccctacctttaaggaaaattatcggttccacgcaatcaacggatacattatggatacactccctggccttgtgatggctcaggaccaacgaatcaggtggtacctcctcagcatgggttctaatgagaacatacactccattcacttttcaggacatgtgttcactgtccggaagaaagaagagtataagatggccctctacaatttgtatccaggcgtgtttgagaccgttgaaatgcttccctctaaagctggcatctggagagtagagtgcttgatcggagaacatcttcacgcaggtatgagcaccttgttcctcgtgtacagcaacaaatgtcagaccccacttggcatggccagtggacacattcgcgactttcagatcacagcatctggccagtatggacaatgggccccaaagttggctcgcctccattactccggtagcataaatgcgtggtccactaaagaacctttcagctggattaaggtcgatcttcttgcccccatgatcatccacggcattaagacacagggagcgaggcagaaattctcctccctctacatctcacagttcattattatgtatagtttggacggcaagaagtggcaaacttatagaggtaacagtactggaacactcatggtgttcttcggcaacgttgatagctctggcatcaaacacaacatctttaatcctcccataatagctcggtacatcagattgcatccgacccactacagcattaggagtacactccgaatggagcttatgggttgcgacttgaattcctgttcaatgccactcggaatggagtctaaagccatctctgatgcacagataaccgccagtagctactttacgaacatgtttgctacgtggtcaccctctaaggcaaggcttcatttgcaaggccggtctaatgcctggagacctcaggtgaacaacccgaaagaatggctccaggtggactttcagaagaccatgaaagtaacaggtgtcactactcagggagttaagtccttgctcaccagcatgtatgtgaaggagttccttatttcctcatcacaagatggccaccagtggaccctcttctttcagaatggtaaggtcaaagtgtttcagggcaatcaagacagcttcacacccgtggtgaacagtcttgatcctccactcttgacacgataccttcgaatccatccacagtcttgggttcaccagattgcattgcgcatggaagtacttggatgcgaggctcaggacctctac

SEQ ID NO: 2450 - protein, 1457 aa, synthetic construct
  REGION 1..1457: note = Variant of human B-domain deleted Factor VIII
MQIELSTCFFLCLLRFCFSATRRYYLGAVELSWDYMQSDLGELPVDARFPPRVPKSFPFNTSVVYKKTLFVEFTDHLFNIAKPRPPWMGLLGPTIQAEVYDTVVITLKNMASHPVSLHAVGVSYWKASEGAEYDDQTSQREKEDDKVFPGGSHTYVWQVLKENGPMASDPLCLTYSYLSHVDLVKDLNSGLIGALLVCREGSLAKEKTQTLHKFILLFAVFDEGKSWHSETKNSLMQDRDAASARAWPKMHTVNGYVNRSLPGLIGCHRKSVYWHVIGMGTTPEVHSIFLEGHTFLVRNHRQASLEISPITFLTAQTLLMDLGQFLLFCHISSHQHDGMEAYVKVDSCPEEPQLRMKNNEEAEDYDDDLTDSEMDVVRFDDDNSPSFIQIRSVAKKHPKTWVHYIAAEEEDWDYAPLVLAPDDRSYKSQYLNNGPQRIGRKYKKVRFMAYTDETFKTREAIQHESGILGPLLYGEVGDTLLIIFKNQASRPYNIYPHGITDVRPLYSRRLPKGVKHLKDFPILPGEIFKYKWTVTVEDGPTKSDPRCLTRYYSSFVNMERDLASGLIGPLLICYKESVDQRGNQIMSDKRNVILFSVFDENRSWYLTENIQRFLPNPAGVQLEDPEFQASNIMHSINGYVFDSLQLSVCLHEVAYWYILSIGAQTDFLSVFFSGYTFKHKMVYEDTLTLFPFSGETVFMSMENPGLWILGCHNSDFRNRGMTALLKVSSCDKNTGDYYEDSYEDISAYLKSKNNAIEPRSFSQNPPVLKRHQREITRTTLQSDQEEIDYDDTISVEMKKEDFDIYDEDENQSPRSFQKKTRHYFIAAVERLWDYGMSSSPHVLRNRAQSGSVPQFKKVVFQEFTDGSFTQPLYRGELNEHLGLLGPYIRAEVEDNIMVTFRNQASRPYSFYSSLISYEEDQRQGAEPRKNFVKPNETKTYFWKVQHHMAPTKDEFDCKAWAYFSDVDLEKDVHSGLIGPLLVCHTNTLNPAHGRQVTVQEFALFFTIFDETKSWYFTENMERNCRAPCNIQMEDPTFKENYRFHAINGYIMDTLPGLVMAQDQRIRWYLLSMGSNENIHSIHFSGHVFTVRKKEEYKMALYNLYPGVFETVEMLPSKAGIWRVECLIGEHLHAGMSTLFLVYSNKCQTPLGMASGHIRDFQITASGQYGQWAPKLARLHYSGSINAWSTKEPFSWIKVDLLAPMIIHGIKTQGARQKFSSLYISQFIIMYSLDGKKWQTYRGNSTGTLMVFFGNVDSSGIKHNIFNPPIIARYIRLHPTHYSIRSTLRMELMGCDLNSCSMPLGMESKAISDAQITASSYFTNMFATWSPSKARLHLQGRSNAWRPQVNNPKEWLQVDFQKTMKVTGVTTQGVKSLLTSMYVKEFLISSSQDGHQWTLFFQNGKVKVFQGNQDSFTPVVNSLDPPLLTRYLRIHPQSWVHQIALRMEVLGCEAQDLY

SEQ ID NO: 2451 - DNA, 4371 bp, synthetic construct
  misc_feature 1..4371: note = Variant of human B-domain deleted Factor VIII
  source 1..4371: mol_type = other DNA
atgcagattgaactgtctacctgcttcttcctctgtttgctgaggttctgctttagcgccactagacggtactaccttggcgctgtggagctgtcctgggactatatgcagagtgatttgggagagcttcccgtcgacgcacgatttcctcctcgcgttccaaagtcatttcccttcaacacaagcgtggtgtacaagaagacgctcttcgtcgaattcaccgatcacctgttcaatatcgccaaacccagaccaccatggatgggtcttttggggcctaccatacaagcggaggtgtatgacacagttgttatcactctcaagaacatggcttctcatccggtaagtcttcacgcagtgggcgtgtcctactggaaagcttcagaaggagccgagtatgatgatcagacatcccagagggagaaagaagacgacaaggtatttccaggtgggtctcatacctatgtgtggcaagtgctcaaagagaatggccctatggcaagcgatccgctctgtttgacttacagctacctttcacacgttgacctcgtcaaggacctcaactccgggttgattggagccttgttggtatgcagggaaggatctcttgccaaagagaagacacagaccctccacaagtttatccttctctttgctgtgttcgatgagggcaaaagttggcatagcgaaacgaagaattccctcatgcaggatcgcgacgcagccagcgccagagcttggcccaagatgcacactgtgaacggatatgtcaataggtcacttcctggcttgattgggtgtcatcggaaaagtgtctactggcacgtgatcggaatggggacaacaccagaggtccactccatatttctcgaaggccataccttccttgttcgaaaccacagacaggcatccttggagatctctcccattacctttctcactgcccaaacgctccttatggacttgggtcagttccttctcttctgccatatcagctcacaccagcatgatggtatggaagcttatgtgaaagtcgacagttgtcctgaggagccacagttgcgcatgaagaataatgaagaagccgaggattacgacgacgatctcaccgattctgagatggacgtggtgaggtttgatgacgacaactctccctccttcattcaaatccggagcgtggcgaagaaacaccccaagacttgggtccactatatagcggcggaagaggaggattgggattacgctcctcttgtattggcaccagatgaccgctcatacaaaagccagtacctcaacaacggaccgcagagaattggccggaagtataagaaagtgcgatttatggcctatacagacgaaacctttaagacaagggaggccatccagcatgagagtgggattttgggacctcttctttacggcgaagttggtgataccctcctcatcatcttcaagaatcaagcttctcgcccctataacatttacccacacgggatcactgacgttaggcctttgtatagcagaagacttcccaaaggcgtgaagcatctcaaagacttccccattttgccaggcgagatctttaagtacaaatggaccgtcacagtggaagatggaccgactaaatcagaccctcgatgccttacgcggtactattcctccttcgtgaatatggagagagatttggcaagcggactcataggaccactcctcatctgttacaaggaatctgtagaccagaggggtaaccagattatgagtgataaacgcaatgtgatcctttttagcgtcttcgacgagaaccggtcctggtacttgaccgagaatatacaaaggttccttcccaaccccgcaggcgttcagttggaagaccctgagtttcaggccagcaatattatgcactcaatcaacggctatgtgtttgatagtctccagctttctgtttgcctccatgaagtagcctattggtacatcttgtcaattggtgctcaaacagacttcctctccgtcttcttctccggctacacctttaagcacaagatggtgtatgaggacactctcacactctttccattttctggagaaaccgtgttcatgagcatggagaatccaggcctttggatcttgggttgccacaacagtgattttcgcaatcggggaatgactgctctcctcaaagtcagcagctgtgataagaacacaggcgactataatgaagattcttacgaggacataagtgcctacttgttgtccaagaataacgccattgagcccagatcattctcccagaatcctcccgtgcttaaaaggcatcagcgcgaaatcaccagaactactcttcagtctgatcaagaggagattgactatgacgacaccataagcgtggaaatgaagaaggaggatttcgatatctatgacgaagatgagaaccagtctccgcggagctttcagaagaagacgcgacactacttcattgcagcagtcgaaaggctttgggactacggtatgtcatcatcccctcatgtgttgcgcaatagagctcagagtggaagtgttccacagttcaagaaagtcgtctttcaagagtttacagatggcagcttcacacagcctctctatcggggcgagcttaacgaacatttgggactccttggtccctatatccgagccgaagtggaggacaacattatggttacctttaggaatcaagcctctcgcccctacagcttctactcctccctcatcagttatgaggaggatcagagacaaggcgctgaaccacggaagaactttgtgaaaccgaatgagacgaagacctacttctggaaagtacagcaccacatggcccccacaaaagacgaattcgattgcaaagcatgggcgtatttttcagacgttgacttggagaaagatgtacattcaggacttattggtcctttgttggtgtgtcacactaacactctcaatccagcccatggcaggcaggtgacagtccaggaattcgctcttttctttaccatctttgatgagaccaagtcctggtacttcacggaaaacatggagcgcaattgcagagccccctgtaacatacagatggaggaccctacctttaaggaaaattatcggttccacgcaatcaacggatacattatggatacactccctggccttgtgatggctcaggaccaacgaatcaggtggtacctcctcagcatgggttctaatgagaacatacactccattcacttttcaggacatgtgttcactgtccggaagaaagaagagtataagatggccctctacaatttgtatccaggcgtgtttgagaccgttgaaatgcttccctctaaagctggcatctggagagtagagtgcttgatcggagaacatcttcacgcaggtatgagcaccttgttcctcgtgtacagcaacaaatgtcagaccccacttggcatggccagtggacacattcgcgactttcagatcacagcatctggccagtatggacaatgggccccaaagttggctcgcctccattactccggtagcataaatgcgtggtccactaaagaacctttcagctggattaaggtcgatcttcttgcccccatgatcatccacggcattaagacacagggagcgaggcagaaattctcctccctctacatctcacagttcattattatgtatagtttggacggcaagaagtggcaaacttatagaggtaacagtactggaacactcatggtgttcttcggcaacgttgatagctctggcatcaaacacaacatctttaatcctcccataatagctcggtacatcagattgcatccgacccactacagcattaggagtacactccgaatggagcttatgggttgcgacttgaattcctgttcaatgccactcggaatggagtctaaagccatctctgatgcacagataaccgccagtagctactttacgaacatgtttgctacgtggtcaccctctaaggcaaggcttcatttgcaaggccggtctaatgcctggagacctcaggtgaacaacccgaaagaatggctccaggtggactttcagaagaccatgaaagtaacaggtgtcactactcagggagttaagtccttgctcaccagcatgtatgtgaaggagttccttatttcctcatcacaagatggccaccagtggaccctcttctttcagaatggtaaggtcaaagtgtttcagggcaatcaagacagcttcacacccgtggtgaacagtcttgatcctccactcttgacacgataccttcgaatccatccacagtcttgggttcaccagattgcattgcgcatggaagtacttggatgcgaggctcaggacctctac

SEQ ID NO: 2452 - protein, 1457 aa, synthetic construct
  REGION 1..1457: note = Variant of human B-domain deleted Factor VIII
MQIELSTCFFLCLLRFCFSATRRYYLGAVELSWDYMQSDLGELPVDARFPPRVPKSFPFNTSVVYKKTLFVEFTDHLFNIAKPRPPWMGLLGPTIQAEVYDTVVITLKNMASHPVSLHAVGVSYWKASEGAEYDDQTSQREKEDDKVFPGGSHTYVWQVLKENGPMASDPLCLTYSYLSHVDLVKDLNSGLIGALLVCREGSLAKEKTQTLHKFILLFAVFDEGKSWHSETKNSLMQDRDAASARAWPKMHTVNGYVNRSLPGLIGCHRKSVYWHVIGMGTTPEVHSIFLEGHTFLVRNHRQASLEISPITFLTAQTLLMDLGQFLLFCHISSHQHDGMEAYVKVDSCPEEPQLRMKNNEEAEDYDDDLTDSEMDVVRFDDDNSPSFIQIRSVAKKHPKTWVHYIAAEEEDWDYAPLVLAPDDRSYKSQYLNNGPQRIGRKYKKVRFMAYTDETFKTREAIQHESGILGPLLYGEVGDTLLIIFKNQASRPYNIYPHGITDVRPLYSRRLPKGVKHLKDFPILPGEIFKYKWTVTVEDGPTKSDPRCLTRYYSSFVNMERDLASGLIGPLLICYKESVDQRGNQIMSDKRNVILFSVFDENRSWYLTENIQRFLPNPAGVQLEDPEFQASNIMHSINGYVFDSLQLSVCLHEVAYWYILSIGAQTDFLSVFFSGYTFKHKMVYEDTLTLFPFSGETVFMSMENPGLWILGCHNSDFRNRGMTALLKVSSCDKNTGDYNEDSYEDISAYLLSKNNAIEPRSFSQNPPVLKRHQREITRTTLQSDQEEIDYDDTISVEMKKEDFDIYDEDENQSPRSFQKKTRHYFIAAVERLWDYGMSSSPHVLRNRAQSGSVPQFKKVVFQEFTDGSFTQPLYRGELNEHLGLLGPYIRAEVEDNIMVTFRNQASRPYSFYSSLISYEEDQRQGAEPRKNFVKPNETKTYFWKVQHHMAPTKDEFDCKAWAYFSDVDLEKDVHSGLIGPLLVCHTNTLNPAHGRQVTVQEFALFFTIFDETKSWYFTENMERNCRAPCNIQMEDPTFKENYRFHAINGYIMDTLPGLVMAQDQRIRWYLLSMGSNENIHSIHFSGHVFTVRKKEEYKMALYNLYPGVFETVEMLPSKAGIWRVECLIGEHLHAGMSTLFLVYSNKCQTPLGMASGHIRDFQITASGQYGQWAPKLARLHYSGSINAWSTKEPFSWIKVDLLAPMIIHGIKTQGARQKFSSLYISQFIIMYSLDGKKWQTYRGNSTGTLMVFFGNVDSSGIKHNIFNPPIIARYIRLHPTHYSIRSTLRMELMGCDLNSCSMPLGMESKAISDAQITASSYFTNMFATWSPSKARLHLQGRSNAWRPQVNNPKEWLQVDFQKTMKVTGVTTQGVKSLLTSMYVKEFLISSSQDGHQWTLFFQNGKVKVFQGNQDSFTPVVNSLDPPLLTRYLRIHPQSWVHQIALRMEVLGCEAQDLY

SEQ ID NO: 2453 - DNA, 4371 bp, synthetic construct
  misc_feature 1..4371: note = Variant of human B-domain deleted Factor VIII
  source 1..4371: mol_type = other DNA
atgcagattgaactgtctacctgcttcttcctctgtttgctgaggttctgctttagcgccactagacggtactaccttggcgctgtggagctgtcctgggactatatgcagagtgatttgggagagcttcccgtcgacgcacgatttcctcctcgcgttccaaagtcatttcccttcaacacaagcgtggtgtacaagaagacgctcttcgtcgaattcaccgatcacctgttcaatatcgccaaacccagaccaccatggatgggtcttttggggcctaccatacaagcggaggtgtatgacacagttgttatcactctcaagaacatggcttctcatccggtaagtcttcacgcagtgggcgtgtcctactggaaagcttcagaaggagccgagtatgatgatcagacatcccagagggagaaagaagacgacaaggtatttccaggtgggtctcatacctatgtgtggcaagtgctcaaagagaatggccctatggcaagcgatccgctctgtttgacttacagctacctttcacacgttgacctcgtcaaggacctcaactccgggttgattggagccttgttggtatgcagggaaggatctcttgccaaagagaagacacagaccctccacaagtttatccttctctttgctgtgttcgatgagggcaaaagttggcatagcgaaacgaagaattccctcatgcaggatcgcgacgcagccagcgccagagcttggcccaagatgcacactgtgaacggatatgtcaataggtcacttcctggcttgattgggtgtcatcggaaaagtgtctactggcacgtgatcggaatggggacaacaccagaggtccactccatatttctcgaaggccataccttccttgttcgaaaccacagacaggcatccttggagatctctcccattacctttctcactgcccaaacgctccttatggacttgggtcagttccttctcttctgccatatcagctcacaccagcatgatggtatggaagcttatgtgaaagtcgacagttgtcctgaggagccacagttgcgcatgaagaataatgaagaagccgaggattacgacgacgatctcaccgattctgagatggacgtggtgaggtttgatgacgacaactctccctccttcattcaaatccggagcgtggcgaagaaacaccccaagacttgggtccactatatagcggcggaagaggaggattgggattacgctcctcttgtattggcaccagatgaccgctcatacaaaagccagtacctcaacaacggaccgcagagaattggccggaagtataagaaagtgcgatttatggcctatacagacgaaacctttaagacaagggaggccatccagcatgagagtgggattttgggacctcttctttacggcgaagttggtgataccctcctcatcatcttcaagaatcaagcttctcgcccctataacatttacccacacgggatcactgacgttaggcctttgtatagcagaagacttcccaaaggcgtgaagcatctcaaagacttccccattttgccaggcgagatctttaagtacaaatggaccgtcacagtggaagatggaccgactaaatcagaccctcgatgccttacgcggtactattcctccttcgtgaatatggagagagatttggcaagcggactcataggaccactcctcatctgttacaaggaatctgtagaccagaggggtaaccagattatgagtgataaacgcaatgtgatcctttttagcgtcttcgacgagaaccggtcctggtacttgaccgagaatatacaaaggttccttcccaaccccgcaggcgttcagttggaagaccctgagtttcaggccagcaatattatgcactcaatcaacggctatgtgtttgatagtctccagctttctgtttgcctccatgaagtagcctattggtacatcttgtcaattggtgctcaaacagacttcctctccgtcttcttctccggctacacctttaagcacaagatggtgtatgaggacactctcacactctttccattttctggagaaaccgtgttcatgagcatggagaatccaggcctttggatcttgggttgccacaacagtgattttcgcaatcggggaatgactgctctcctcaaagtcagcagctgtgataagaacacaggcgactattacgaagattcttacgaggacataagtgcctacttgttgtccaagaataacgccattgagcccagatcattctcccagaatcctcccgtgcttaaaaggcatcagcgcgaaatcaccagaactactcttcagtctgatcaagaggagattgactatgacgacaccataagcgtggaaatgaagaaggaggatttcgatatctatgacgaagatgagaaccagtctccgcggagctttcagaagaagacgcgacactacttcattgcagcagtcgaaaggctttgggactacggtatgtcatcatcccctcatgtgttgcgcaatagagctcagagtggaagtgttccacagttcaagaaagtcgtctttcaagagtttacagatggcagcttcacacagcctctctatcggggcgagcttaacgaacatttgggactccttggtccctatatccgagccgaagtggaggacaacattatggttacctttaggaatcaagcctctcgcccctacagcttctactcctccctcatcagttatgaggaggatcagagacaaggcgctgaaccacggaagaactttgtgaaaccgaatgagacgaagacctacttctggaaagtacagcaccacatggcccccacaaaagacgaattcgattgcaaagcatgggcgtatttttcagacgttgacttggagaaagatgtacattcaggacttattggtcctttgttggtgtgtcacactaacactctcaatccagcccatggcaggcaggtgacagtccaggaattcgctcttttctttaccatctttgatgagaccaagtcctggtacttcacggaaaacatggagcgcaattgcagagccccctgtaacatacagatggaggaccctacctttaaggaaaattatcggttccacgcaatcaacggatacattatggatacactccctggccttgtgatggctcaggaccaacgaatcaggtggtacctcctcagcatgggttctaatgagaacatacactccattcacttttcaggacatgtgttcactgtccggaaggtggaagagtataagatggccctctacaatttgtatccaggcgtgtttgagaccgttgaaatgcttccctctaaagctggcatctggagagtagagtgcttgatcggagaacatcttcacgcaggtatgagcaccttgttcctcgtgtacagcaacaaatgtcagaccccacttggcatggccagtggacacattcgcgactttcagatcacagcatctggccagtatggacaatgggccccaaagttggctcgcctccattactccggtagcataaatgcgtggtccactaaagaacctttcagctggattaaggtcgatcttcttgcccccatgatcatccacggcattaagacacagggagcgaggcagaaattctcctccctctacatctcacagttcattattatgtatagtttggacggcaagaagtggcaaacttatagaggtaacagtactggaacactcatggtgttcttcggcaacgttgatagctctggcatcaaacacaacatctttaatcctcccataatagctcggtacatcagattgcatccgacccactacagcattaggagtacactccgaatggagcttatgggttgcgacttgaattcctgttcaatgccactcggaatggagtctaaagccatctctgatgcacagataaccgccagtagctactttacgaacatgtttgctacgtggtcaccctctaaggcaaggcttcatttgcaaggccggtctaatgcctggagacctcaggtgaacaacccgaaagaatggctccaggtggactttcagaagaccatgaaagtaacaggtgtcactactcagggagttaagtccttgctcaccagcatgtatgtgaaggagttccttatttcctcatcacaagatggccaccagtggaccctcttctttcagaatggtaaggtcaaagtgtttcagggcaatcaagacagcttcacacccgtggtgaacagtcttgatcctccactcttgacacgataccttcgaatccatccacagtcttgggttcaccagattgcattgcgcatggaagtacttggatgcgaggctcaggacctctac

SEQ ID NO: 2454 - protein, 1457 aa, synthetic construct
  REGION 1..1457: note = Variant of human B-domain deleted Factor VIII
MQIELSTCFFLCLLRFCFSATRRYYLGAVELSWDYMQSDLGELPVDARFPPRVPKSFPFNTSVVYKKTLFVEFTDHLFNIAKPRPPWMGLLGPTIQAEVYDTVVITLKNMASHPVSLHAVGVSYWKASEGAEYDDQTSQREKEDDKVFPGGSHTYVWQVLKENGPMASDPLCLTYSYLSHVDLVKDLNSGLIGALLVCREGSLAKEKTQTLHKFILLFAVFDEGKSWHSETKNSLMQDRDAASARAWPKMHTVNGYVNRSLPGLIGCHRKSVYWHVIGMGTTPEVHSIFLEGHTFLVRNHRQASLEISPITFLTAQTLLMDLGQFLLFCHISSHQHDGMEAYVKVDSCPEEPQLRMKNNEEAEDYDDDLTDSEMDVVRFDDDNSPSFIQIRSVAKKHPKTWVHYIAAEEEDWDYAPLVLAPDDRSYKSQYLNNGPQRIGRKYKKVRFMAYTDETFKTREAIQHESGILGPLLYGEVGDTLLIIFKNQASRPYNIYPHGITDVRPLYSRRLPKGVKHLKDFPILPGEIFKYKWTVTVEDGPTKSDPRCLTRYYSSFVNMERDLASGLIGPLLICYKESVDQRGNQIMSDKRNVILFSVFDENRSWYLTENIQRFLPNPAGVQLEDPEFQASNIMHSINGYVFDSLQLSVCLHEVAYWYILSIGAQTDFLSVFFSGYTFKHKMVYEDTLTLFPFSGETVFMSMENPGLWILGCHNSDFRNRGMTALLKVSSCDKNTGDYYEDSYEDISAYLLSKNNAIEPRSFSQNPPVLKRHQREITRTTLQSDQEEIDYDDTISVEMKKEDFDIYDEDENQSPRSFQKKTRHYFIAAVERLWDYGMSSSPHVLRNRAQSGSVPQFKKVVFQEFTDGSFTQPLYRGELNEHLGLLGPYIRAEVEDNIMVTFRNQASRPYSFYSSLISYEEDQRQGAEPRKNFVKPNETKTYFWKVQHHMAPTKDEFDCKAWAYFSDVDLEKDVHSGLIGPLLVCHTNTLNPAHGRQVTVQEFALFFTIFDETKSWYFTENMERNCRAPCNIQMEDPTFKENYRFHAINGYIMDTLPGLVMAQDQRIRWYLLSMGSNENIHSIHFSGHVFTVRKVEEYKMALYNLYPGVFETVEMLPSKAGIWRVECLIGEHLHAGMSTLFLVYSNKCQTPLGMASGHIRDFQITASGQYGQWAPKLARLHYSGSINAWSTKEPFSWIKVDLLAPMIIHGIKTQGARQKFSSLYISQFIIMYSLDGKKWQTYRGNSTGTLMVFFGNVDSSGIKHNIFNPPIIARYIRLHPTHYSIRSTLRMELMGCDLNSCSMPLGMESKAISDAQITASSYFTNMFATWSPSKARLHLQGRSNAWRPQVNNPKEWLQVDFQKTMKVTGVTTQGVKSLLTSMYVKEFLISSSQDGHQWTLFFQNGKVKVFQGNQDSFTPVVNSLDPPLLTRYLRIHPQSWVHQIALRMEVLGCEAQDLY

SEQ ID NO: 2455 - DNA, 4371 bp, synthetic construct
  misc_feature 1..4371: note = Variant of human B-domain deleted Factor VIII
  source 1..4371: mol_type = other DNA
atgcagattgaactgtctacctgcttcttcctctgtttgctgaggttctgctttagcgccactagacggtactaccttggcgctgtggagctgtcctgggactatatgcagagtgatttgggagagcttcccgtcgacgcacgatttcctcctcgcgttccaaagtcatttcccttcaacacaagcgtggtgtacaagaagacgctcttcgtcgaattcaccgatcacctgttcaatatcgccaaacccagaccaccatggatgggtcttttggggcctaccatacaagcggaggtgtatgacacagttgttatcactctcaagaacatggcttctcatccggtaagtcttcacgcagtgggcgtgtcctactggaaagcttcagaaggagccgagtatgatgatcagacatcccagagggagaaagaagacgacaaggtatttccaggtgggtctcatacctatgtgtggcaagtgctcaaagagaatggccctatggcaagcgatccgctctgtttgacttacagctacctttcacacgttgacctcgtcaaggacctcaactccgggttgattggagccttgttggtatgcagggaaggatctcttgccaaagagaagacacagaccctccacaagtttatccttctctttgctgtgttcgatgagggcaaaagttggcatagcgaaacgaagaattccctcatgcaggatcgcgacgcagccagcgccagagcttggcccaagatgcacactgtgaacggatatgtcaataggtcacttcctggcttgattgggtgtcatcggaaaagtgtctactggcacgtgatcggaatggggacaacaccagaggtccactccatatttctcgaaggccataccttccttgttcgaaaccacagacaggcatccttggagatctctcccattacctttctcactgcccaaacgctccttatggacttgggtcagttccttctcttctgccatatcagctcacaccagcatgatggtatggaagcttatgtgaaagtcgacagttgtcctgaggagccacagttgcgcatgaagaataatgaagaagccgaggattacgacgacgatctcaccgattctgagatggacgtggtgaggtttgatgacgacaactctccctccttcattcaaatccggagcgtggcgaagaaacaccccaagacttgggtccactatatagcggcggaagaggaggattgggattacgctcctcttgtattggcaccagatgaccgctcatacaaaagccagtacctcaacaacggaccgcagagaattggccggaagtataagaaagtgcgatttatggcctatacagacgaaacctttaagacaagggaggccatccagcatgagagtgggattttgggacctcttctttacggcgaagttggtgataccctcctcatcatcttcaagaatcaagcttctcgcccctataacatttacccacacgggatcactgacgttaggcctttgtatagcagaagacttcccaaaggcgtgaagcatctcaaagacttccccattttgccaggcgagatctttaagtacaaatggaccgtcacagtggaagatggaccgactaaatcagaccctcgatgccttacgcggtactattcctccttcgtgaatatggagagagatttggcaagcggactcataggaccactcctcatctgttacaaggaatctgtagaccagaggggtaaccagattatgagtgataaacgcaatgtgatcctttttagcgtcttcgacgagaaccggtcctggtacttgaccgagaatatacaaaggttccttcccaaccccgcaggcgttcagttggaagaccctgagtttcaggccagcaatattatgcactcaatcaacggctatgtgtttgatagtctccagctttctgtttgcctccatgaagtagcctattggtacatcttgtcaattggtgctcaaacagacttcctctccgtcttcttctccggctacacctttaagcacaagatggtgtatgaggacactctcacactctttccattttctggagaaaccgtgttcatgagcatggagaatccaggcctttggatcttgggttgccacaacagtgattttcgcaatcggggaatgactgctctcctcaaagtcagcagctgtgataagaacacaggcgactattacgaagattcttacgaggacataagtgcctaccagttgtccaagaataacgccattgagcccagatcattctcccagaatcctcccgtgcttaaaaggcatcagcgcgaaatcaccagaactactcttcagtctgatcaagaggagattgactatgacgacaccataagcgtggaaatgaagaaggaggatttcgatatctatgacgaagatgagaaccagtctccgcggagctttcagaagaagacgcgacactacttcattgcagcagtcgaaaggctttgggactacggtatgtcatcatcccctcatgtgttgcgcaatagagctcagagtggaagtgttccacagttcaagaaagtcgtctttcaagagtttacagatggcagcttcacacagcctctctatcggggcgagcttaacgaacatttgggactccttggtccctatatccgagccgaagtggaggacaacattatggttacctttaggaatcaagcctctcgcccctacagcttctactcctccctcatcagttatgaggaggatcagagacaaggcgctgaaccacggaagaactttgtgaaaccgaatgagacgaagacctacttctggaaagtacagcaccacatggcccccacaaaagacgaattcgattgcaaagcatgggcgtatttttcagacgttgacttggagaaagatgtacattcaggacttattggtcctttgttggtgtgtcacactaacactctcaatccagcccatggcaggcaggtgacagtccaggaattcgctcttttctttaccatctttgatgagaccaagtcctggtacttcacggaaaacatggagcgcaattgcagagccccctgtaacatacagatggaggaccctacctttaaggaaaattatcggttccacgcaatcaacggatacattatggatacactccctggccttgtgatggctcaggaccaacgaatcaggtggtacctcctcagcatgggttctaatgagaacatacactccattcacttttcaggacatgtgttcactgtccggaagaaagaagagtataagatggccctctacaatttgtatccaggcgtgtttgagaccgttgaaatgcttccctctaaagctggcatctggagagtagagtgcttgatcggagaacatcttcacgcaggtatgagcaccttgttcctcgtgtacagcaacaaatgtcagaccccacttggcatggccagtggacacattcgcgactttcagatcacagcatctggccagtatggacaatgggccccaaagttggctcgcctccattactccggtagcataaatgcgtggtccactaaagaacctttcagctggattaaggtcgatcttcttgcccccatgatcatccacggcattaagacacagggagcgaggcagaaattctcctccctctacatctcacagttcattattatgtatagtttggacggcaagaagtggcaaacttatagaggtaacagtactggaacactcatggtgttcttcggcaacgttgatagctctggcatcaaacacaacatctttaatcctcccataatagctcggtacatcagattgcatccgacccactacagcattaggagtacactccgaatggagcttatgggttgcgacttgaattcctgttcaatgccactcggaatggagtctaaagccatctctgatgcacagataaccgccagtagctactttacgaacatgtttgctacgtggtcaccctctaaggcaaggcttcatttgcaaggccggtctaatgcctggagacctcaggtgaacaacccgaaagaatggctccaggtggactttcagaagaccatgaaagtaacaggtgtcactactcagggagttaagtccttgctcaccagcatgtatgtgaaggagttccttatttcctcatcacaagatggccaccagtggaccctcttctttcagaatggtaaggtcaaagtgtttcagggcaatcaagacagcttcacacccgtggtgaacagtcttgatcctccactcttgacacgataccttcgaatccatccacagtcttgggttcaccagattgcattgcgcatggaagtacttggatgcgaggctcaggacctctac

SEQ ID NO: 2456 - protein, 1457 aa, synthetic construct
  REGION 1..1457: note = Variant of human B-domain deleted Factor VIII
MQIELSTCFFLCLLRFCFSATRRYYLGAVELSWDYMQSDLGELPVDARFPPRVPKSFPFNTSVVYKKTLFVEFTDHLFNIAKPRPPWMGLLGPTIQAEVYDTVVITLKNMASHPVSLHAVGVSYWKASEGAEYDDQTSQREKEDDKVFPGGSHTYVWQVLKENGPMASDPLCLTYSYLSHVDLVKDLNSGLIGALLVCREGSLAKEKTQTLHKFILLFAVFDEGKSWHSETKNSLMQDRDAASARAWPKMHTVNGYVNRSLPGLIGCHRKSVYWHVIGMGTTPEVHSIFLEGHTFLVRNHRQASLEISPITFLTAQTLLMDLGQFLLFCHISSHQHDGMEAYVKVDSCPEEPQLRMKNNEEAEDYDDDLTDSEMDVVRFDDDNSPSFIQIRSVAKKHPKTWVHYIAAEEEDWDYAPLVLAPDDRSYKSQYLNNGPQRIGRKYKKVRFMAYTDETFKTREAIQHESGILGPLLYGEVGDTLLIIFKNQASRPYNIYPHGITDVRPLYSRRLPKGVKHLKDFPILPGEIFKYKWTVTVEDGPTKSDPRCLTRYYSSFVNMERDLASGLIGPLLICYKESVDQRGNQIMSDKRNVILFSVFDENRSWYLTENIQRFLPNPAGVQLEDPEFQASNIMHSINGYVFDSLQLSVCLHEVAYWYILSIGAQTDFLSVFFSGYTFKHKMVYEDTLTLFPFSGETVFMSMENPGLWILGCHNSDFRNRGMTALLKVSSCDKNTGDYYEDSYEDISAYQLSKNNAIEPRSFSQNPPVLKRHQREITRTTLQSDQEEIDYDDTISVEMKKEDFDIYDEDENQSPRSFQKKTRHYFIAAVERLWDYGMSSSPHVLRNRAQSGSVPQFKKVVFQEFTDGSFTQPLYRGELNEHLGLLGPYIRAEVEDNIMVTFRNQASRPYSFYSSLISYEEDQRQGAEPRKNFVKPNETKTYFWKVQHHMAPTKDEFDCKAWAYFSDVDLEKDVHSGLIGPLLVCHTNTLNPAHGRQVTVQEFALFFTIFDETKSWYFTENMERNCRAPCNIQMEDPTFKENYRFHAINGYIMDTLPGLVMAQDQRIRWYLLSMGSNENIHSIHFSGHVFTVRKKEEYKMALYNLYPGVFETVEMLPSKAGIWRVECLIGEHLHAGMSTLFLVYSNKCQTPLGMASGHIRDFQITASGQYGQWAPKLARLHYSGSINAWSTKEPFSWIKVDLLAPMIIHGIKTQGARQKFSSLYISQFIIMYSLDGKKWQTYRGNSTGTLMVFFGNVDSSGIKHNIFNPPIIARYIRLHPTHYSIRSTLRMELMGCDLNSCSMPLGMESKAISDAQITASSYFTNMFATWSPSKARLHLQGRSNAWRPQVNNPKEWLQVDFQKTMKVTGVTTQGVKSLLTSMYVKEFLISSSQDGHQWTLFFQNGKVKVFQGNQDSFTPVVNSLDPPLLTRYLRIHPQSWVHQIALRMEVLGCEAQDLY

SEQ ID NO: 2457 - DNA, 4371 bp, synthetic construct
  misc_feature 1..4371: note = Variant of human B-domain deleted Factor VIII
  source 1..4371: mol_type = other DNA
atgcagattgaactgtctacctgcttcttcctctgtttgctgaggttctgctttagcgccactagacggtactaccttggcgctgtggagctgtcctgggactatatgcagagtgatttgggagagcttcccgtcgacgcacgatttcctcctcgcgttccaaagtcatttcccttcaacacaagcgtggtgtacaagaagacgctcttcgtcgaattcaccgatcacctgttcaatatcgccaaacccagaccaccatggatgggtcttttggggcctaccatacaagcggaggtgtatgacacagttgttatcactctcaagaacatggcttctcatccggtaagtcttcacgcagtgggcgtgtcctactggaaagcttcagaaggagccgagtatgatgatcagacatcccagagggagaaagaagacgacaaggtatttccaggtgggtctcatacctatgtgtggcaagtgctcaaagagaatggccctatggcaagcgatccgctctgtttgacttacagctacctttcacacgttgacctcgtcaaggacctcaactccgggttgattggagccttgttggtatgcagggaaggatctcttgccaaagagaagacacagaccctctttaagtttatccttctctttgctgtgttcgatgagggcaaaagttggcatagcgaaacgaagaattccctcatgcaggatcgcgacgcagccagcgccagagcttggcccaagatgcacactgtgaacggatatgtcaataggtcacttcctggcttgattgggtgtcatcggaaaagtgtctactggcacgtgatcggaatggggacaacaccagaggtccactccatatttctcgaaggccataccttccttgttcgaaaccacagacaggcatccttggagatctctcccattacctttctcactgcccaaacgctccttatggacttgggtcagttccttctcttctgccatatcagctcacaccagcatgatggtatggaagcttatgtgaaagtcgacagttgtcctgaggagccacagttgcgcatgaagaataatgaagaagccgaggattacgacgacgatctcaccgattctgagatggacgtggtgaggtttgatgacgacaactctccctccttcattcaaatccggagcgtggcgaagaaacaccccaagacttgggtccactatatagcggcggaagaggaggattgggattacgctcctcttgtattggcaccagatgaccgctcatacaaaagccagtacctcaacaacggaccgcagagaattggccggaagtataagaaagtgcgatttatggcctatacagacgaaacctttaagacaagggaggccatccagcatgagagtgggattttgggacctcttctttacggcgaagttggtgataccctcctcatcatcttcaagaatcaagcttctcgcccctataacatttacccacacgggatcactgacgttaggcctttgtatagcagaagacttcccaaaggcgtgaagcatctcaaagacttccccattttgccaggcgagatctttaagtacaaatggaccgtcacagtggaagatggaccgactaaatcagaccctcgatgccttacgcggtactattcctccttcgtgaatatggagagagatttggcaagcggactcataggaccactcctcatctgttacaaggaatctgtagaccagaggggtaaccagattatgagtgataaacgcaatgtgatcctttttagcgtcttcgacgagaaccggtcctggtacttgaccgagaatatacaaaggttccttcccaaccccgcaggcgttcagttggaagaccctgagtttcaggccagcaatattatgcactcaatcaacggctatgtgtttgatagtctccagctttctgtttgcctccatgaagtagcctattggtacatcttgtcaattggtgctcaaacagacttcctctccgtcttcttctccggctacacctttaagcacaagatggtgtatgaggacactctcacactctttccattttctggagaaaccgtgttcatgagcatggagaatccaggcctttggatcttgggttgccacaacagtgattttcgcaatcggggaatgactgctctcctcaaagtcagcagctgtgataagaacacaggcgactattacgaagattcttacgaggacataagtgcctacttgttgtccaagaataacgccattgagcccagatcattctcccagaatcctcccgtgcttaaaaggcatcagcgcgaaatcaccagaactactcttcagtctgatcaagaggagattgactatgacgacaccataagcgtggaaatgaagaaggaggatttcgatatctatgacgaagatgagaaccagtctccgcggagctttcagaagaagacgcgacactacttcattgcagcagtcgaaaggctttgggactacggtatgtcatcatcccctcatgtgttgcgcaatagagctcagagtggaagtgttccacagttcaagaaagtcgtctttcaagagtttacagatggcagcttcacacagcctctctatcggggcgagcttaacgaacatttgggactccttggtccctatatccgagccgaagtggaggacaacattatggttacctttaggaatcaagcctctcgcccctacagcttctactcctccctcatcagttatgaggaggatcagagacaaggcgctgaaccacggaagaactttgtgaaaccgaatgagacgaagacctacttctggaaagtacagcaccacatggcccccacaaaagacgaattcgattgcaaagcatgggcgtatttttcagacgttgacttggagaaagatgtacattcaggacttattggtcctttgttggtgtgtcacactaacactctcaatccagcccatggcaggcaggtgacagtccaggaattcgctcttttctttaccatctttgatgagaccaagtcctggtacttcacggaaaacatggagcgcaattgcagagccccctgtaacatacagatggaggaccctacctttaaggaaaattatcggttccacgcaatcaacggatacattatggatacactccctggccttgtgatggctcaggaccaacgaatcaggtggtacctcctcagcatgggttctaatgagaacatacactccattcacttttcaggacatgtgttcactgtccggaagaaagaagagtataagatggccctctacaatttgtatccaggcgtgtttgagaccgttgaaatgcttccctctaaagctggcatctggagagtagagtgcttgatcggagaacatcttcacgcaggtatgagcaccttgttcctcgtgtacagcaacaaatgtcagaccccacttggcatggccagtggacacattcgcgactttcagatcacagcatctggccagtatggacaatgggccccaaagttggctcgcctccattactccggtagcataaatgcgtggtccactaaagaacctttcagctggattaaggtcgatcttcttgcccccatgatcatccacggcattaagacacagggagcgaggcagaaattctcctccctctacatctcacagttcattattatgtatagtttggacggcaagaagtggcaaacttatagaggtaacagtactggaacactcatggtgttcttcggcaacgttgatagctctggcatcaaacacaacatctttaatcctcccataatagctcggtacatcagattgcatccgacccactacagcattaggagtacactccgaatggagcttatgggttgcgacttgaattcctgttcaatgccactcggaatggagtctaaagccatctctgatgcacagataaccgccagtagctactttacgaacatgtttgctacgtggtcaccctctaaggcaaggcttcatttgcaaggccggtctaatgcctggagacctcaggtgaacaacccgaaagaatggctccaggtggactttcagaagaccatgaaagtaacaggtgtcactactcagggagttaagtccttgctcaccagcatgtatgtgaaggagttccttatttcctcatcacaagatggccaccagtggaccctcttctttcagaatggtaaggtcaaagtgtttcagggcaatcaagacagcttcacacccgtggtgaacagtcttgatcctccactcttgacacgataccttcgaatccatccacagtcttgggttcaccagattgcattgcgcatggaagtacttggatgcgaggctcaggacctctac

SEQ ID NO: 2458 - protein, 1457 aa, synthetic construct
  REGION 1..1457: note = Variant of human B-domain deleted Factor VIII
MQIELSTCFFLCLLRFCFSATRRYYLGAVELSWDYMQSDLGELPVDARFPPRVPKSFPFNTSVVYKKTLFVEFTDHLFNIAKPRPPWMGLLGPTIQAEVYDTVVITLKNMASHPVSLHAVGVSYWKASEGAEYDDQTSQREKEDDKVFPGGSHTYVWQVLKENGPMASDPLCLTYSYLSHVDLVKDLNSGLIGALLVCREGSLAKEKTQTLFKFILLFAVFDEGKSWHSETKNSLMQDRDAASARAWPKMHTVNGYVNRSLPGLIGCHRKSVYWHVIGMGTTPEVHSIFLEGHTFLVRNHRQASLEISPITFLTAQTLLMDLGQFLLFCHISSHQHDGMEAYVKVDSCPEEPQLRMKNNEEAEDYDDDLTDSEMDVVRFDDDNSPSFIQIRSVAKKHPKTWVHYIAAEEEDWDYAPLVLAPDDRSYKSQYLNNGPQRIGRKYKKVRFMAYTDETFKTREAIQHESGILGPLLYGEVGDTLLIIFKNQASRPYNIYPHGITDVRPLYSRRLPKGVKHLKDFPILPGEIFKYKWTVTVEDGPTKSDPRCLTRYYSSFVNMERDLASGLIGPLLICYKESVDQRGNQIMSDKRNVILFSVFDENRSWYLTENIQRFLPNPAGVQLEDPEFQASNIMHSINGYVFDSLQLSVCLHEVAYWYILSIGAQTDFLSVFFSGYTFKHKMVYEDTLTLFPFSGETVFMSMENPGLWILGCHNSDFRNRGMTALLKVSSCDKNTGDYYEDSYEDISAYLLSKNNAIEPRSFSQNPPVLKRHQREITRTTLQSDQEEIDYDDTISVEMKKEDFDIYDEDENQSPRSFQKKTRHYFIAAVERLWDYGMSSSPHVLRNRAQSGSVPQFKKVVFQEFTDGSFTQPLYRGELNEHLGLLGPYIRAEVEDNIMVTFRNQASRPYSFYSSLISYEEDQRQGAEPRKNFVKPNETKTYFWKVQHHMAPTKDEFDCKAWAYFSDVDLEKDVHSGLIGPLLVCHTNTLNPAHGRQVTVQEFALFFTIFDETKSWYFTENMERNCRAPCNIQMEDPTFKENYRFHAINGYIMDTLPGLVMAQDQRIRWYLLSMGSNENIHSIHFSGHVFTVRKKEEYKMALYNLYPGVFETVEMLPSKAGIWRVECLIGEHLHAGMSTLFLVYSNKCQTPLGMASGHIRDFQITASGQYGQWAPKLARLHYSGSINAWSTKEPFSWIKVDLLAPMIIHGIKTQGARQKFSSLYISQFIIMYSLDGKKWQTYRGNSTGTLMVFFGNVDSSGIKHNIFNPPIIARYIRLHPTHYSIRSTLRMELMGCDLNSCSMPLGMESKAISDAQITASSYFTNMFATWSPSKARLHLQGRSNAWRPQVNNPKEWLQVDFQKTMKVTGVTTQGVKSLLTSMYVKEFLISSSQDGHQWTLFFQNGKVKVFQGNQDSFTPVVNSLDPPLLTRYLRIHPQSWVHQIALRMEVLGCEAQDLY

SEQ ID NO: 2459 - DNA, 4371 bp, synthetic construct
  misc_feature 1..4371: note = Variant of human B-domain deleted Factor VIII
  source 1..4371: mol_type = other DNA
atgcagattgaactgtctacctgcttcttcctctgtttgctgaggttctgctttagcgccactagacggtactaccttggcgctgtggagctgtcctgggactatatgcagagtgatttgggagagcttccagtcgacgcacgatttcctcctcgcgttccaaagtcatttcccttcaacacaagcgtggtgtacaagaagacgctcttcgtcgaattcaccgatcacctgttcaatatcgccaaacccagaccaccatggatgggtcttttggggcctaccatacaagcggaggtgtatgacacagttgttatcactctcaagaacatggcttctcatccggtaagtcttcacgcagtgggcgtgtcctactggaaagcttcagaaggagccgagtatgatgatcagacatcccagagggagaaagaagacgacaaggtatttccaggtgggtctcatacctatgtgtggcaagtgctcaaagagaatggccctatggcaagcgatccgctctgtttgacttacagctacctttcacacgttgacctcgtcaaggacctcaactccgggttgattggagccttgttggtatgcagggaaggatctcttgccaaagagaagacacagaccctcatgaagtttatccttctctttgctgtgttcgatgagggcaaaagttggcatagcgaaacgaagaattccctcatgcaggatcgcgacgcagccagcgccagagcttggcccaagatgcacactgtgaacggatatgtcaataggtcacttcctggcttgattgggtgtcatcggaaaagtgtctactggcacgtgatcggaatggggacaacaccagaggtccactccatatttctcgaaggccataccttccttgttcgaaaccacagacaggcatccttggagatctctcccattacctttctcactgcccaaacgctccttatggacttgggtcagttccttctcttctgccatatcagctcacaccagcatgatggtatggaagcttatgtgaaagtcgacagttgtcctgaggagccacagttgcgcatgaagaataatgaagaagccgaggattacgacgacgatctcaccgattctgagatggacgtggtgaggtttgatgacgacaactctccctccttcattcaaatccggagcgtggcgaagaaacaccccaagacttgggtccactatatagcggcggaagaggaggattgggattacgctcctcttgtattggcaccagatgaccgctcatacaaaagccagtacctcaacaacggaccgcagagaattggccggaagtataagaaagtgcgatttatggcctatacagacgaaacctttaagacaagggaggccatccagcatgagagtgggattttgggacctcttctttacggcgaagttggtgataccctcctcatcatcttcaagaatcaagcttctcgcccctataacatttacccacacgggatcactgacgttaggcctttgtatagcagaagacttcccaaaggcgtgaagcatctcaaagacttccccattttgccaggcgagatctttaagtacaaatggaccgtcacagtggaagatggaccgactaaatcagaccctcgatgccttacgcggtactattcctccttcgtgaatatggagagagatttggcaagcggactcataggaccactcctcatctgttacaaggaatctgtagaccagaggggtaaccagattatgagtgataaacgcaatgtgatcctttttagcgtcttcgacgagaaccggtcctggtacttgaccgagaatatacaaaggttccttcccaaccccgcaggcgttcagttggaagaccctgagtttcaggccagcaatattatgcactcaatcaacggctatgtgtttgatagtctccagctttctgtttgcctccatgaagtagcctattggtacatcttgtcaattggtgctcaaacagacttcctctccgtcttcttctccggctacacctttaagcacaagatggtgtatgaggacactctcacactctttccattttctggagaaaccgtgttcatgagcatggagaatccaggcctttggatcttgggttgccacaacagtgattttcgcaatcggggaatgactgctctcctcaaagtcagcagctgtgataagaacacaggcgactattacgaagattcttacgaggacataagtgcctacttgttgtccaagaataacgccattgagcccagatcattctcccagaatcctcccgtgcttaaaaggcatcagcgcgaaatcaccagaactactcttcagtctgatcaagaggagattgactatgacgacaccataagcgtggaaatgaagaaggaggatttcgatatctatgacgaagatgagaaccagtctccgcggagctttcagaagaagacgcgacactacttcattgcagcagtcgaaaggctttgggactacggtatgtcatcatcccctcatgtgttgcgcaatagagctcagagtggaagtgttccacagttcaagaaagtcgtctttcaagagtttacagatggcagcttcacacagcctctctatcggggcgagcttaacgaacatttgggactccttggtccctatatccgagccgaagtggaggacaacattatggttacctttaggaatcaagcctctcgcccctacagcttctactcctccctcatcagttatgaggaggatcagagacaaggcgctgaaccacggaagaactttgtgaaaccgaatgagacgaagacctacttctggaaagtacagcaccacatggcccccacaaaagacgaattcgattgcaaagcatgggcgtatttttcagacgttgacttggagaaagatgtacattcaggacttattggtcctttgttggtgtgtcacactaacactctcaatccagcccatggcaggcaggtgacagtccaggaattcgctcttttctttaccatctttgatgagaccaagtcctggtacttcacggaaaacatggagcgcaattgcagagccccctgtaacatacagatggaggaccctacctttaaggaaaattatcggttccacgcaatcaacggatacattatggatacactccctggccttgtgatggctcaggaccaacgaatcaggtggtacctcctcagcatgggttctaatgagaacatacactccattcacttttcaggacatgtgttcactgtccggaagaaagaagagtataagatggccctctacaatttgtatccaggcgtgtttgagaccgttgaaatgcttccctctaaagctggcatctggagagtagagtgcttgatcggagaacatcttcacgcaggtatgagcaccttgttcctcgtgtacagcaacaaatgtcagaccccacttggcatggccagtggacacattcgcgactttcagatcacagcatctggccagtatggacaatgggccccaaagttggctcgcctccattactccggtagcataaatgcgtggtccactaaagaacctttcagctggattaaggtcgatcttcttgcccccatgatcatccacggcattaagacacagggagcgaggcagaaattctcctccctctacatctcacagttcattattatgtatagtttggacggcaagaagtggcaaacttatagaggtaacagtactggaacactcatggtgttcttcggcaacgttgatagctctggcatcaaacacaacatctttaatcctcccataatagctcggtacatcagattgcatccgacccactacagcattaggagtacactccgaatggagcttatgggttgcgacttgaattcctgttcaatgccactcggaatggagtctaaagccatctctgatgcacagataaccgccagtagctactttacgaacatgtttgctacgtggtcaccctctaaggcaaggcttcatttgcaaggccggtctaatgcctggagacctcaggtgaacaacccgaaagaatggctccaggtggactttcagaagaccatgaaagtaacaggtgtcactactcagggagttaagtccttgctcaccagcatgtatgtgaaggagttccttatttcctcatcacaagatggccaccagtggaccctcttctttcagaatggtaaggtcaaagtgtttcagggcaatcaagacagcttcacacccgtggtgaacagtcttgatcctccactcttgacacgataccttcgaatccatccacagtcttgggttcaccagattgcattgcgcatggaagtacttggatgcgaggctcaggacctctac

SEQ ID NO: 2460 - protein, 1457 aa, synthetic construct
  REGION 1..1457: note = Variant of human B-domain deleted Factor VIII
MQIELSTCFFLCLLRFCFSATRRYYLGAVELSWDYMQSDLGELPVDARFPPRVPKSFPFNTSVVYKKTLFVEFTDHLFNIAKPRPPWMGLLGPTIQAEVYDTVVITLKNMASHPVSLHAVGVSYWKASEGAEYDDQTSQREKEDDKVFPGGSHTYVWQVLKENGPMASDPLCLTYSYLSHVDLVKDLNSGLIGALLVCREGSLAKEKTQTLMKFILLFAVFDEGKSWHSETKNSLMQDRDAASARAWPKMHTVNGYVNRSLPGLIGCHRKSVYWHVIGMGTTPEVHSIFLEGHTFLVRNHRQASLEISPITFLTAQTLLMDLGQFLLFCHISSHQHDGMEAYVKVDSCPEEPQLRMKNNEEAEDYDDDLTDSEMDVVRFDDDNSPSFIQIRSVAKKHPKTWVHYIAAEEEDWDYAPLVLAPDDRSYKSQYLNNGPQRIGRKYKKVRFMAYTDETFKTREAIQHESGILGPLLYGEVGDTLLIIFKNQASRPYNIYPHGITDVRPLYSRRLPKGVKHLKDFPILPGEIFKYKWTVTVEDGPTKSDPRCLTRYYSSFVNMERDLASGLIGPLLICYKESVDQRGNQIMSDKRNVILFSVFDENRSWYLTENIQRFLPNPAGVQLEDPEFQASNIMHSINGYVFDSLQLSVCLHEVAYWYILSIGAQTDFLSVFFSGYTFKHKMVYEDTLTLFPFSGETVFMSMENPGLWILGCHNSDFRNRGMTALLKVSSCDKNTGDYYEDSYEDISAYLLSKNNAIEPRSFSQNPPVLKRHQREITRTTLQSDQEEIDYDDTISVEMKKEDFDIYDEDENQSPRSFQKKTRHYFIAAVERLWDYGMSSSPHVLRNRAQSGSVPQFKKVVFQEFTDGSFTQPLYRGELNEHLGLLGPYIRAEVEDNIMVTFRNQASRPYSFYSSLISYEEDQRQGAEPRKNFVKPNETKTYFWKVQHHMAPTKDEFDCKAWAYFSDVDLEKDVHSGLIGPLLVCHTNTLNPAHGRQVTVQEFALFFTIFDETKSWYFTENMERNCRAPCNIQMEDPTFKENYRFHAINGYIMDTLPGLVMAQDQRIRWYLLSMGSNENIHSIHFSGHVFTVRKKEEYKMALYNLYPGVFETVEMLPSKAGIWRVECLIGEHLHAGMSTLFLVYSNKCQTPLGMASGHIRDFQITASGQYGQWAPKLARLHYSGSINAWSTKEPFSWIKVDLLAPMIIHGIKTQGARQKFSSLYISQFIIMYSLDGKKWQTYRGNSTGTLMVFFGNVDSSGIKHNIFNPPIIARYIRLHPTHYSIRSTLRMELMGCDLNSCSMPLGMESKAISDAQITASSYFTNMFATWSPSKARLHLQGRSNAWRPQVNNPKEWLQVDFQKTMKVTGVTTQGVKSLLTSMYVKEFLISSSQDGHQWTLFFQNGKVKVFQGNQDSFTPVVNSLDPPLLTRYLRIHPQSWVHQIALRMEVLGCEAQDLY

SEQ ID NO: 2461 - DNA, 4371 bp, synthetic construct
  misc_feature 1..4371: note = Variant of human B-domain deleted Factor VIII
  source 1..4371: mol_type = other DNA
atgcagattgaactgtctacctgcttcttcctctgtttgctgaggttctgctttagcgccactagacggtactaccttggcgctgtggagctgtcctgggactatatgcagagtgatttgggagagcttcccgtcgacgcacgatttcctcctcgcgttccaaagtcatttcccttcaacacaagcgtggtgtacaagaagacgctcttcgtcgaattcaccgatcacctgttcaatatcgccaaacccagaccaccatggatgggtcttttggggcctaccatacaagcggaggtgtatgacacagttgttatcactctcaagaacatggcttctcatccggtaagtcttcacgcagtgggcgtgtcctactggaaagcttcagaaggagccgagtatgatgatcagacatcccagagggagaaagaagacgacaaggtatttccaggtgggtctcatacctatgtgtggcaagtgctcaaagagaatggccctatggcaagcgatccgctctgtttgacttacagctacctttcacacgttgacctcgtcaaggacctcaactccgggttgattggagccttgttggtatgcagggaaggatctcttgccaaagagaagacacagaccctccacaagtttatccttctctttgctgtgttcgatgagggcaaaagttggcatagcgaaacgaagaattccctcatgcaggatcgcgacgcagccagcgccagagcttggcccaagatgcacactgtgaacggatatgtcaataggtcacttcctggcttgattgggtgtcatcggaaaagtgtctactggcacgtgatcggaatggggacaacaccagaggtccactccatatttctcgaaggccataccttccttgttcgaaaccacagacaggcatccttggagatctctcccattacctttctcactgcccaaacgctccttatggacttgggtcagttccttctcttctgccatatcagctcacaccagcatgatggtatggaagcttatgtgaaagtcgacagttgtcctgaggagccacagttgcgcatgaagaataatgaagaagccgaggattacgacgacgatctcaccgattctgagatggacgtggtgaggtttgatgacgacaactctccctccttcattcaaatccggagcgtggcgaagaaacaccccaagacttgggtccactatatagcggcggaagaggaggattgggattacgctcctcttgtattggcaccagatgaccgctcatacaaaagccagtacctcaacaacggaccgcagagaattggccggaagtataagaaagtgcgatttatggcctatacagacgaaacctttaagacaagggaggccatccagcatgagagtgggattttgggacctcttctttacggcgaagttggtgataccctcctcatcatcttcaagaatcaagcttctcgcccctataacatttacccacacgggatcactgacgttaggcctttgtatagcagaagacttcccaaaggcgtgaagcatctcaaagacttccccattttgccaggcgagatctttaagtacaaatggaccgtcacagtggaagatggaccgactaaatcagaccctcgatgccttacgcggtactattcctccttcgtgaatatggagagagatttggcaagcggactcataggaccactcctcatctgttacaaggaatctgtagaccagaggggtaaccagattatgagtgataaacgcaatgtgatcctttttagcgtcttcgacgagaaccggtcctggtacttgaccgagaatatacaaaggttccttcccaaccccgcaggcgttcagttggaagaccctgagtttcaggccagcaatattatgcactcaatcaacggctatgtgtttgatagtctccagctttctgtttgcctccatgaagtagcctattggtacatcttgtcaattggtgctcaaacagacttcctctccgtcttcttctccggctacacctttaagcacaagatggtgtatgaggacactctcacactctttccattttctggagaaaccgtgttcatgagcatggagaatccaggcctttggatcttgggttgccacaacagtgattttcgcaatcggggaatgactgctctcctcaaagtcagcagctgtgataagaacacaggcgactattacgaagattcttacgaggacataagtgcctacttgttgtccaagaataacgccattgagcccagatcattctcccagaatcctcccgtgcttaaaaggcatcagcgcgaatctaccagaactactcttcagtctgatcaagaggagattgactatgacgacaccataagcgtggaaatgaagaaggaggatttcgatatctatgacgaagatgagaaccagtctccgcggagctttcagaagaagacgcgacactacttcattgcagcagtcgaaaggctttgggactacggtatgtcatcatcccctcatgtgttgcgcaatagagctcagagtggaagtgttccacagttcaagaaagtcgtctttcaagagtttacagatggcagcttcacacagcctctctatcggggcgagcttaacgaacatttgggactccttggtccctatatccgagccgaagtggaggacaacattatggttacctttaggaatcaagcctctcgcccctacagcttctactcctccctcatcagttatgaggaggatcagagacaaggcgctgaaccacggaagaactttgtgaaaccgaatgagacgaagacctacttctggaaagtacagcaccacatggcccccacaaaagacgaattcgattgcaaagcatgggcgtatttttcagacgttgacttggagaaagatgtacattcaggacttattggtcctttgttggtgtgtcacactaacactctcaatccagcccatggcaggcaggtgacagtccaggaattcgctcttttctttaccatctttgatgagaccaagtcctggtacttcacggaaaacatggagcgcaattgcagagccccctgtaacatacagatggaggaccctacctttaaggaaaattatcggttccacgcaatcaacggatacattatggatacactccctggccttgtgatggctcaggaccaacgaatcaggtggtacctcctcagcatgggttctaatgagaacatacactccattcacttttcaggacatgtgttcactgtccggaagaaagaagagtataagatggccctctacaatttgtatccaggcgtgtttgagaccgttgaaatgcttccctctaaagctggcatctggagagtagagtgcttgatcggagaacatcttcacgcaggtatgagcaccttgttcctcgtgtacagcaacaaatgtcagaccccacttggcatggccagtggacacattcgcgactttcagatcacagcatctggccagtatggacaatgggccccaaagttggctcgcctccattactccggtagcataaatgcgtggtccactaaagaacctttcagctggattaaggtcgatcttcttgcccccatgatcatccacggcattaagacacagggagcgaggcagaaattctcctccctctacatctcacagttcattattatgtatagtttggacggcaagaagtggcaaacttatagaggtaacagtactggaacactcatggtgttcttcggcaacgttgatagctctggcatcaaacacaacatctttaatcctcccataatagctcggtacatcagattgcatccgacccactacagcattaggagtacactccgaatggagcttatgggttgcgacttgaattcctgttcaatgccactcggaatggagtctaaagccatctctgatgcacagataaccgccagtagctactttacgaacatgtttgctacgtggtcaccctctaaggcaaggcttcatttgcaaggccggtctaatgcctggagacctcaggtgaacaacccgaaagaatggctccaggtggactttcagaagaccatgaaagtaacaggtgtcactactcagggagttaagtccttgctcaccagcatgtatgtgaaggagttccttatttcctcatcacaagatggccaccagtggaccctcttctttcagaatggtaaggtcaaagtgtttcagggcaatcaagacagcttcacacccgtggtgaacagtcttgatcctccactcttgacacgataccttcgaatccatccacagtcttgggttcaccagattgcattgcgcatggaagtacttggatgcgaggctcaggacctctac

SEQ ID NO: 2462 - protein, 1457 aa, synthetic construct
  REGION 1..1457: note = Variant of human B-domain deleted Factor VIII
MQIELSTCFFLCLLRFCFSATRRYYLGAVELSWDYMQSDLGELPVDARFPPRVPKSFPFNTSVVYKKTLFVEFTDHLFNIAKPRPPWMGLLGPTIQAEVYDTVVITLKNMASHPVSLHAVGVSYWKASEGAEYDDQTSQREKEDDKVFPGGSHTYVWQVLKENGPMASDPLCLTYSYLSHVDLVKDLNSGLIGALLVCREGSLAKEKTQTLHKFILLFAVFDEGKSWHSETKNSLMQDRDAASARAWPKMHTVNGYVNRSLPGLIGCHRKSVYWHVIGMGTTPEVHSIFLEGHTFLVRNHRQASLEISPITFLTAQTLLMDLGQFLLFCHISSHQHDGMEAYVKVDSCPEEPQLRMKNNEEAEDYDDDLTDSEMDVVRFDDDNSPSFIQIRSVAKKHPKTWVHYIAAEEEDWDYAPLVLAPDDRSYKSQYLNNGPQRIGRKYKKVRFMAYTDETFKTREAIQHESGILGPLLYGEVGDTLLIIFKNQASRPYNIYPHGITDVRPLYSRRLPKGVKHLKDFPILPGEIFKYKWTVTVEDGPTKSDPRCLTRYYSSFVNMERDLASGLIGPLLICYKESVDQRGNQIMSDKRNVILFSVFDENRSWYLTENIQRFLPNPAGVQLEDPEFQASNIMHSINGYVFDSLQLSVCLHEVAYWYILSIGAQTDFLSVFFSGYTFKHKMVYEDTLTLFPFSGETVFMSMENPGLWILGCHNSDFRNRGMTALLKVSSCDKNTGDYYEDSYEDISAYLLSKNNAIEPRSFSQNPPVLKRHQRESTRTTLQSDQEEIDYDDTISVEMKKEDFDIYDEDENQSPRSFQKKTRHYFIAAVERLWDYGMSSSPHVLRNRAQSGSVPQFKKVVFQEFTDGSFTQPLYRGELNEHLGLLGPYIRAEVEDNIMVTFRNQASRPYSFYSSLISYEEDQRQGAEPRKNFVKPNETKTYFWKVQHHMAPTKDEFDCKAWAYFSDVDLEKDVHSGLIGPLLVCHTNTLNPAHGRQVTVQEFALFFTIFDETKSWYFTENMERNCRAPCNIQMEDPTFKENYRFHAINGYIMDTLPGLVMAQDQRIRWYLLSMGSNENIHSIHFSGHVFTVRKKEEYKMALYNLYPGVFETVEMLPSKAGIWRVECLIGEHLHAGMSTLFLVYSNKCQTPLGMASGHIRDFQITASGQYGQWAPKLARLHYSGSINAWSTKEPFSWIKVDLLAPMIIHGIKTQGARQKFSSLYISQFIIMYSLDGKKWQTYRGNSTGTLMVFFGNVDSSGIKHNIFNPPIIARYIRLHPTHYSIRSTLRMELMGCDLNSCSMPLGMESKAISDAQITASSYFTNMFATWSPSKARLHLQGRSNAWRPQVNNPKEWLQVDFQKTMKVTGVTTQGVKSLLTSMYVKEFLISSSQDGHQWTLFFQNGKVKVFQGNQDSFTPVVNSLDPPLLTRYLRIHPQSWVHQIALRMEVLGCEAQDLY

SEQ ID NO: 2463 - DNA, 4371 bp, synthetic construct
  misc_feature 1..4371: note = Variant of human B-domain deleted Factor VIII
  source 1..4371: mol_type = other DNA
atgcagattgaactgtctacctgcttcttcctctgtttgctgaggttctgctttagcgccactagacggtactaccttggcgctgtggagctgtcctgggactatatgcagagtgatttgggagagcttcccgtcgacgcacgatttcctcctcgcgttccaaagtcatttcccttcaacacaagcgtggtgtacaagaagacgctcttcgtcgaattcaccgatcacctgttcaatatcgccaaacccagaccaccatggatgggtcttttggggcctaccatacaagcggaggtgtatgacacagttgttatcactctcaagaacatggcttctcatccggtaagtcttcacgcagtgggcgtgtcctactggaaagcttcagaaggagccgagtatgatgatcagacatcccagagggagaaagaagacgacaaggtatttccaggtgggtctcatacctatgtgtggcaagtgctcaaagagaatggccctatggcaagcgatccgctctgtttgacttacagctacctttcacacgttgacctcgtcaaggacctcaactccgggttgattggagccttgttggtatgcagggaaggatctcttgccaaagagaagacacagaccctccacaagtttatccttctctttgctgtgttcgatgagggcaaaagttggcatagcgaaacgaagaattccctcatgcaggatcgcgacgcagccagcgccagagcttggcccaagatgcacactgtgaacggatatgtcaataggtcacttcctggcttgattgggtgtcatcggaaaagtgtctactggcacgtgatcggaatggggacaacaccagaggtccactccatatttctcgaaggccataccttccttgttcgaaaccacagacaggcatccttggagatctctcccattacctttctcactgcccaaacgctccttatggacttgggtcagttccttctcttctgccatatcagctcacaccagcatgatggtatggaagcttatgtgaaagtcgacagttgtcctgaggagccacagttgcgcatgaagaataatgaagaagccgaggattacgacgacgatctcaccgattctgagatggacgtggtgaggtttgatgacgacaactctccctcctggattcaaatccggagcgtggcgaagaaacaccccaagacttgggtccactatatagcggcggaagaggaggattgggattacgctcctcttgtattggcaccagatgaccgctcatacaaaagccagtacctcaacaacggaccgcagagaattggccggaagtataagaaagtgcgatttatggcctatacagacgaaacctttaagacaagggaggccatccagcatgagagtgggattttgggacctcttctttacggcgaagttggtgataccctcctcatcatcttcaagaatcaagcttctcgcccctataacatttacccacacgggatcactgacgttaggcctttgtatagcagaagacttcccaaaggcgtgaagcatctcaaagacttccccattttgccaggcgagatctttaagtacaaatggaccgtcacagtggaagatggaccgactaaatcagaccctcgatgccttacgcggtactattcctccttcgtgaatatggagagagatttggcaagcggactcataggaccactcctcatctgttacaaggaatctgtagaccagaggggtaaccagattatgagtgataaacgcaatgtgatcctttttagcgtcttcgacgagaaccggtcctggtacttgaccgagaatatacaaaggttccttcccaaccccgcaggcgttcagttggaagaccctgagtttcaggccagcaatattatgcactcaatcaacggctatgtgtttgatagtctccagctttctgtttgcctccatgaagtagcctattggtacatcttgtcaattggtgctcaaacagacttcctctccgtcttcttctccggctacacctttaagcacaagatggtgtatgaggacactctcacactctttccattttctggagaaaccgtgttcatgagcatggagaatccaggcctttggatcttgggttgccacaacagtgattttcgcaatcggggaatgactgctctcctcaaagtcagcagctgtgataagaacacaggcgactattacgaagattcttacgaggacataagtgcctacttgttgtccaagaataacgccattgagcccagatcattctcccagaatcctcccgtgcttaaaaggcatcagcgcgaaatcaccagaactactcttcagtctgatcaagaggagattgactatgacgacaccataagcgtggaaatgaagaaggaggatttcgatatctatgacgaagatgagaaccagtctccgcggagctttcagaagaagacgcgacactacttcattgcagcagtcgaaaggctttgggactacggtatgtcatcatcccctcatgtgttgcgcaatagagctcagagtggaagtgttccacagttcaagaaagtcgtctttcaagagtttacagatggcagcttcacacagcctctctatcggggcgagcttaacgaacatttgggactccttggtccctatatccgagccgaagtggaggacaacattatggttacctttaggaatcaagcctctcgcccctacagcttctactcctccctcatcagttatgaggaggatcagagacaaggcgctgaaccacggaagaactttgtgaaaccgaatgagacgaagacctacttctggaaagtacagcaccacatggcccccacaaaagacgaattcgattgcaaagcatgggcgtatttttcagacgttgacttggagaaagatgtacattcaggacttattggtcctttgttggtgtgtcacactaacactctcaatccagcccatggcaggcaggtgacagtccaggaattcgctcttttctttaccatctttgatgagaccaagtcctggtacttcacggaaaacatggagcgcaattgcagagccccctgtaacatacagatggaggaccctacctttaaggaaaattatcggttccacgcaatcaacggatacattatggatacactccctggccttgtgatggctcaggaccaacgaatcaggtggtacctcctcagcatgggttctaatgagaacatacactccattcacttttcaggacatgtgttcactgtccggaagaaagaagagtataagatggccctctacaatttgtatccaggcgtgtttgagaccgttgaaatgcttccctctaaagctggcatctggagagtagagtgcttgatcggagaacatcttcacgcaggtatgagcaccttgttcctcgtgtacagcaacaaatgtcagaccccacttggcatggccagtggacacattcgcgactttcagatcacagcatctggccagtatggacaatgggccccaaagttggctcgcctccattactccggtagcataaatgcgtggtccactaaagaacctttcagctggattaaggtcgatcttcttgcccccatgatcatccacggcattaagacacagggagcgaggcagaaattctcctccctctacatctcacagttcattattatgtatagtttggacggcaagaagtggcaaacttatagaggtaacagtactggaacactcatggtgttcttcggcaacgttgatagctctggcatcaaacacaacatctttaatcctcccataatagctcggtacatcagattgcatccgacccactacagcattaggagtacactccgaatggagcttatgggttgcgacttgaattcctgttcaatgccactcggaatggagtctaaagccatctctgatgcacagataaccgccagtagctactttacgaacatgtttgctacgtggtcaccctctaaggcaaggcttcatttgcaaggccggtctaatgcctggagacctcaggtgaacaacccgaaagaatggctccaggtggactttcagaagaccatgaaagtaacaggtgtcactactcagggagttaagtccttgctcaccagcatgtatgtgaaggagttccttatttcctcatcacaagatggccaccagtggaccctcttctttcagaatggtaaggtcaaagtgtttcagggcaatcaagacagcttcacacccgtggtgaacagtcttgatcctccactcttgacacgataccttcgaatccatccacagtcttgggttcaccagattgcattgcgcatggaagtacttggatgcgaggctcaggacctctac

SEQ ID NO: 2464 - protein, 1457 aa, synthetic construct
  REGION 1..1457: note = Variant of human B-domain deleted Factor VIII
MQIELSTCFFLCLLRFCFSATRRYYLGAVELSWDYMQSDLGELPVDARFPPRVPKSFPFNTSVVYKKTLFVEFTDHLFNIAKPRPPWMGLLGPTIQAEVYDTVVITLKNMASHPVSLHAVGVSYWKASEGAEYDDQTSQREKEDDKVFPGGSHTYVWQVLKENGPMASDPLCLTYSYLSHVDLVKDLNSGLIGALLVCREGSLAKEKTQTLHKFILLFAVFDEGKSWHSETKNSLMQDRDAASARAWPKMHTVNGYVNRSLPGLIGCHRKSVYWHVIGMGTTPEVHSIFLEGHTFLVRNHRQASLEISPITFLTAQTLLMDLGQFLLFCHISSHQHDGMEAYVKVDSCPEEPQLRMKNNEEAEDYDDDLTDSEMDVVRFDDDNSPSWIQIRSVAKKHPKTWVHYIAAEEEDWDYAPLVLAPDDRSYKSQYLNNGPQRIGRKYKKVRFMAYTDETFKTREAIQHESGILGPLLYGEVGDTLLIIFKNQASRPYNIYPHGITDVRPLYSRRLPKGVKHLKDFPILPGEIFKYKWTVTVEDGPTKSDPRCLTRYYSSFVNMERDLASGLIGPLLICYKESVDQRGNQIMSDKRNVILFSVFDENRSWYLTENIQRFLPNPAGVQLEDPEFQASNIMHSINGYVFDSLQLSVCLHEVAYWYILSIGAQTDFLSVFFSGYTFKHKMVYEDTLTLFPFSGETVFMSMENPGLWILGCHNSDFRNRGMTALLKVSSCDKNTGDYYEDSYEDISAYLLSKNNAIEPRSFSQNPPVLKRHQREITRTTLQSDQEEIDYDDTISVEMKKEDFDIYDEDENQSPRSFQKKTRHYFIAAVERLWDYGMSSSPHVLRNRAQSGSVPQFKKVVFQEFTDGSFTQPLYRGELNEHLGLLGPYIRAEVEDNIMVTFRNQASRPYSFYSSLISYEEDQRQGAEPRKNFVKPNETKTYFWKVQHHMAPTKDEFDCKAWAYFSDVDLEKDVHSGLIGPLLVCHTNTLNPAHGRQVTVQEFALFFTIFDETKSWYFTENMERNCRAPCNIQMEDPTFKENYRFHAINGYIMDTLPGLVMAQDQRIRWYLLSMGSNENIHSIHFSGHVFTVRKKEEYKMALYNLYPGVFETVEMLPSKAGIWRVECLIGEHLHAGMSTLFLVYSNKCQTPLGMASGHIRDFQITASGQYGQWAPKLARLHYSGSINAWSTKEPFSWIKVDLLAPMIIHGIKTQGARQKFSSLYISQFIIMYSLDGKKWQTYRGNSTGTLMVFFGNVDSSGIKHNIFNPPIIARYIRLHPTHYSIRSTLRMELMGCDLNSCSMPLGMESKAISDAQITASSYFTNMFATWSPSKARLHLQGRSNAWRPQVNNPKEWLQVDFQKTMKVTGVTTQGVKSLLTSMYVKEFLISSSQDGHQWTLFFQNGKVKVFQGNQDSFTPVVNSLDPPLLTRYLRIHPQSWVHQIALRMEVLGCEAQDLY

SEQ ID NO: 2465 - DNA, 4371 bp, synthetic construct
  misc_feature 1..4371: note = Variant of human B-domain deleted Factor VIII
  source 1..4371: mol_type = other DNA
atgcagattgaactgtctacctgcttcttcctctgtttgctgaggttctgctttagcgccactagacggtactaccttggcgctgtggagctgtcctgggactatatgcagagtgatttgggagagcttcccgtcgacgcacgatttcctcctcgcgttccaaagtcatttcccttcaacacaagcgtggtgtacaagaagacgctcttcgtcgaattcaccgatcacctgttcaatatcgccaaacccagaccaccatggatgggtcttttggggcctaccatacaagcggaggtgtatgacacagttgttatcactctcaagaacatggcttctcatccggtaagtcttcacgcagtgggcgtgtcctactggaaagcttcagaaggagccgagtatgatgatcagacatcccagagggagaaagaagacgacaaggtatttccaggtgggtctcatacctatgtgtggcaagtgctcaaagagaatggccctatggcaagcgatccgctctgtttgacttacagctacctttcacacgttgacctcgtcaaggacctcaactccgggttgattggagccttgttggtatgcagggaaggatctcttgccaaagagaagacacagaccctccacaagtttatccttctctttgctgtgttcgatgagggcaaaagttggcatagcgaaacgaagaattccctcatgcaggatcgcgacgcagccagcgccagagcttggcccaagatgcacactgtgaacggatatgtcaataggtcacttcctggcttgattgggtgtcatcggaaaagtgtctactggcacgtgatcggaatggggacaacaccagaggtccactccatatttctcgaaggccataccttccttgttcgaaaccacagacaggcatccttggagatctctcccattacctttctcactgcccaaacgctccttatggacttgggtcagttccttctcttctgccatatcagctcacaccagcatgatggtatggaagcttatgtgaaagtcgacagttgtcctgaggagccacagttgcgcatgaagaataatgaagaagccgaggattacgacgacgatctcaccgattctgagatggacgtggtgaggtttgatgacgacaactctccctccttcattcaaatccggagcgtggcgaagaaacaccccaagacttgggtccactatatagcggcggaagaggaggattgggattacgctcctcttgtattggcaccagatgaccgctcatacaaaagccagtacctcaacaacggaccgcagagaattggccggaagtataagaaagtgcgatttatggcctatacagacgaaacctttaagacaagggaggccatccagcatgagagtgggattttgggacctcttctttacggcgaagttggtgataccctcctcatcatcttcaagaatcaagcttctcgcccctataacatttacccacacgggcttactgacgttaggcctttgtatagcagaagacttcccaaaggcgtgaagcatctcaaagacttccccattttgccaggcgagatctttaagtacaaatggaccgtcacagtggaagatggaccgactaaatcagaccctcgatgccttacgcggtactattcctccttcgtgaatatggagagagatttggcaagcggactcataggaccactcctcatctgttacaaggaatctgtagaccagaggggtaaccagattatgagtgataaacgcaatgtgatcctttttagcgtcttcgacgagaaccggtcctggtacttgaccgagaatatacaaaggttccttcccaaccccgcaggcgttcagttggaagaccctgagtttcaggccagcaatattatgcactcaatcaacggctatgtgtttgatagtctccagctttctgtttgcctccatgaagtagcctattggtacatcttgtcaattggtgctcaaacagacttcctctccgtcttcttctccggctacacctttaagcacaagatggtgtatgaggacactctcacactctttccattttctggagaaaccgtgttcatgagcatggagaatccaggcctttggatcttgggttgccacaacagtgattttcgcaatcggggaatgactgctctcctcaaagtcagcagctgtgataagaacacaggcgactattacgaagattcttacgaggacataagtgcctacttgttgtccaagaataacgccattgagcccagatcattctcccagaatcctcccgtgcttaaaaggcatcagcgcgaaatcaccagaactactcttcagtctgatcaagaggagattgactatgacgacaccataagcgtggaaatgaagaaggaggatttcgatatctatgacgaagatgagaaccagtctccgcggagctttcagaagaagacgcgacactacttcattgcagcagtcgaaaggctttgggactacggtatgtcatcatcccctcatgtgttgcgcaatagagctcagagtggaagtgttccacagttcaagaaagtcgtctttcaagagtttacagatggcagcttcacacagcctctctatcggggcgagcttaacgaacatttgggactccttggtccctatatccgagccgaagtggaggacaacattatggttacctttaggaatcaagcctctcgcccctacagcttctactcctccctcatcagttatgaggaggatcagagacaaggcgctgaaccacggaagaactttgtgaaaccgaatgagacgaagacctacttctggaaagtacagcaccacatggcccccacaaaagacgaattcgattgcaaagcatgggcgtatttttcagacgttgacttggagaaagatgtacattcaggacttattggtcctttgttggtgtgtcacactaacactctcaatccagcccatggcaggcaggtgacagtccaggaattcgctcttttctttaccatctttgatgagaccaagtcctggtacttcacggaaaacatggagcgcaattgcagagccccctgtaacatacagatggaggaccctacctttaaggaaaattatcggttccacgcaatcaacggatacattatggatacactccctggccttgtgatggctcaggaccaacgaatcaggtggtacctcctcagcatgggttctaatgagaacatacactccattcacttttcaggacatgtgttcactgtccggaagaaagaagagtataagatggccctctacaatttgtatccaggcgtgtttgagaccgttgaaatgcttccctctaaagctggcatctggagagtagagtgcttgatcggagaacatcttcacgcaggtatgagcaccttgttcctcgtgtacagcaacaaatgtcagaccccacttggcatggccagtggacacattcgcgactttcagatcacagcatctggccagtatggacaatgggccccaaagttggctcgcctccattactccggtagcataaatgcgtggtccactaaagaacctttcagctggattaaggtcgatcttcttgcccccatgatcatccacggcattaagacacagggagcgaggcagaaattctcctccctctacatctcacagttcattattatgtatagtttggacggcaagaagtggcaaacttatagaggtaacagtactggaacactcatggtgttcttcggcaacgttgatagctctggcatcaaacacaacatctttaatcctcccataatagctcggtacatcagattgcatccgacccactacagcattaggagtacactccgaatggagcttatgggttgcgacttgaattcctgttcaatgccactcggaatggagtctaaagccatctctgatgcacagataaccgccagtagctactttacgaacatgtttgctacgtggtcaccctctaaggcaaggcttcatttgcaaggccggtctaatgcctggagacctcaggtgaacaacccgaaagaatggctccaggtggactttcagaagaccatgaaagtaacaggtgtcactactcagggagttaagtccttgctcaccagcatgtatgtgaaggagttccttatttcctcatcacaagatggccaccagtggaccctcttctttcagaatggtaaggtcaaagtgtttcagggcaatcaagacagcttcacacccgtggtgaacagtcttgatcctccactcttgacacgataccttcgaatccatccacagtcttgggttcaccagattgcattgcgcatggaagtacttggatgcgaggctcaggacctctac

SEQ ID NO: 2466 - protein, 1457 aa, synthetic construct
  REGION 1..1457: note = Variant of human B-domain deleted Factor VIII
MQIELSTCFFLCLLRFCFSATRRYYLGAVELSWDYMQSDLGELPVDARFPPRVPKSFPFNTSVVYKKTLFVEFTDHLFNIAKPRPPWMGLLGPTIQAEVYDTVVITLKNMASHPVSLHAVGVSYWKASEGAEYDDQTSQREKEDDKVFPGGSHTYVWQVLKENGPMASDPLCLTYSYLSHVDLVKDLNSGLIGALLVCREGSLAKEKTQTLHKFILLFAVFDEGKSWHSETKNSLMQDRDAASARAWPKMHTVNGYVNRSLPGLIGCHRKSVYWHVIGMGTTPEVHSIFLEGHTFLVRNHRQASLEISPITFLTAQTLLMDLGQFLLFCHISSHQHDGMEAYVKVDSCPEEPQLRMKNNEEAEDYDDDLTDSEMDVVRFDDDNSPSFIQIRSVAKKHPKTWVHYIAAEEEDWDYAPLVLAPDDRSYKSQYLNNGPQRIGRKYKKVRFMAYTDETFKTREAIQHESGILGPLLYGEVGDTLLIIFKNQASRPYNIYPHGLTDVRPLYSRRLPKGVKHLKDFPILPGEIFKYKWTVTVEDGPTKSDPRCLTRYYSSFVNMERDLASGLIGPLLICYKESVDQRGNQIMSDKRNVILFSVFDENRSWYLTENIQRFLPNPAGVQLEDPEFQASNIMHSINGYVFDSLQLSVCLHEVAYWYILSIGAQTDFLSVFFSGYTFKHKMVYEDTLTLFPFSGETVFMSMENPGLWILGCHNSDFRNRGMTALLKVSSCDKNTGDYYEDSYEDISAYLLSKNNAIEPRSFSQNPPVLKRHQREITRTTLQSDQEEIDYDDTISVEMKKEDFDIYDEDENQSPRSFQKKTRHYFIAAVERLWDYGMSSSPHVLRNRAQSGSVPQFKKVVFQEFTDGSFTQPLYRGELNEHLGLLGPYIRAEVEDNIMVTFRNQASRPYSFYSSLISYEEDQRQGAEPRKNFVKPNETKTYFWKVQHHMAPTKDEFDCKAWAYFSDVDLEKDVHSGLIGPLLVCHTNTLNPAHGRQVTVQEFALFFTIFDETKSWYFTENMERNCRAPCNIQMEDPTFKENYRFHAINGYIMDTLPGLVMAQDQRIRWYLLSMGSNENIHSIHFSGHVFTVRKKEEYKMALYNLYPGVFETVEMLPSKAGIWRVECLIGEHLHAGMSTLFLVYSNKCQTPLGMASGHIRDFQITASGQYGQWAPKLARLHYSGSINAWSTKEPFSWIKVDLLAPMIIHGIKTQGARQKFSSLYISQFIIMYSLDGKKWQTYRGNSTGTLMVFFGNVDSSGIKHNIFNPPIIARYIRLHPTHYSIRSTLRMELMGCDLNSCSMPLGMESKAISDAQITASSYFTNMFATWSPSKARLHLQGRSNAWRPQVNNPKEWLQVDFQKTMKVTGVTTQGVKSLLTSMYVKEFLISSSQDGHQWTLFFQNGKVKVFQGNQDSFTPVVNSLDPPLLTRYLRIHPQSWVHQIALRMEVLGCEAQDLY

SEQ ID NO: 2467 - DNA, 4371 bp, synthetic construct
  misc_feature 1..4371: note = Variant of human B-domain deleted Factor VIII
  source 1..4371: mol_type = other DNA
atgcagattgaactgtctacctgcttcttcctctgtttgctgaggttctgctttagcgccactagacggtactaccttggcgctgtggagctgtcctgggactatatgcagagtgatttgggagagcttcccgtcgacgcacgatttcctcctcgcgttccaaagtcatttcccttcaacacaagcgtggtgtacaagaagacgctcttcgtcgaattcaccgatcacctgttcaatatcgccaaacccagaccaccatggatgggtcttttggggcctaccatacaagcggaggtgtatgacacagttgttatcactctcaagaacatggcttctcatccggtaagtcttcacgcagtgggcgtgtcctactggaaagcttcagaaggagccgagtatgatgatcagacatcccagagggagaaagaagacgacaaggtatttccaggtgggtctcatacctatgtgtggcaagtgctcaaagagaatggccctatggcaagcgatccgctctgtttgacttacagctacctttcacacgttgacctcgtcaaggacctcaactccgggttgattggagccttgttggtatgcagggaaggatctcttgccaaagagaagacacagaccctccacaagtttatccttctctttgctgtgttcgatgagggcaaaagttggcatagcgaaacgaagaattccctcatgcaggatcgcgacgcagccagcgccagagcttggcccaagatgcacactgtgaacggatatgtcaataggtcacttcctggcttgattgggtgtcatcggaaaagtgtctactggcacgtgatcggaatggggacaacaccagaggtccactccatatttctcgaaggccataccttccttgttcgaaaccacagacaggcatccttggagatctctcccattacctttctcactgcccaaacgctccttatggacttgggtcagttccttctcttctgccatatcagctcacaccagcatgatggtatggaagcttatgtgaaagtcgacagttgtcctgaggagccacagttgcgcatgaagaataatgaagaagccgaggattacgacgacgatctcaccgattctgagatggacgtggtgaggtttgatgacgacaactctccctcccggattcaaatccggagcgtggcgaagaaacaccccaagacttgggtccactatatagcggcggaagaggaggattgggattacgctcctcttgtattggcaccagatgaccgctcatacaaaagccagtacctcaacaacggaccgcagagaattggccggaagtataagaaagtgcgatttatggcctatacagacgaaacctttaagacaagggaggccatccagcatgagagtgggattttgggacctcttctttacggcgaagttggtgataccctcctcatcatcttcaagaatcaagcttctcgcccctataacatttacccacacgggatcactgacgttaggcctttgtatagcagaagacttcccaaaggcgtgaagcatctcaaagacttccccattttgccaggcgagatctttaagtacaaatggaccgtcacagtggaagatggaccgactaaatcagaccctcgatgccttacgcggtactattcctccttcgtgaatatggagagagatttggcaagcggactcataggaccactcctcatctgttacaaggaatctgtagaccagaggggtaaccagattatgagtgataaacgcaatgtgatcctttttagcgtcttcgacgagaaccggtcctggtacttgaccgagaatatacaaaggttccttcccaaccccgcaggcgttcagttggaagaccctgagtttcaggccagcaatattatgcactcaatcaacggctatgtgtttgatagtctccagctttctgtttgcctccatgaagtagcctattggtacatcttgtcaattggtgctcaaacagacttcctctccgtcttcttctccggctacacctttaagcacaagatggtgtatgaggacactctcacactctttccattttctggagaaaccgtgttcatgagcatggagaatccaggcctttggatcttgggttgccacaacagtgattttcgcaatcggggaatgactgctctcctcaaagtcagcagctgtgataagaacacaggcgactattacgaagattcttacgaggacataagtgcctacttgttgtccaagaataacgccattgagcccagatcattctcccagaatcctcccgtgcttaaaaggcatcagcgcgaaatcaccagaactactcttcagtctgatcaagaggagattgactatgacgacaccataagcgtggaaatgaagaaggaggatttcgatatctatgacgaagatgagaaccagtctccgcggagctttcagaagaagacgcgacactacttcattgcagcagtcgaaaggctttgggactacggtatgtcatcatcccctcatgtgttgcgcaatagagctcagagtggaagtgttccacagttcaagaaagtcgtctttcaagagtttacagatggcagcttcacacagcctctctatcggggcgagcttaacgaacatttgggactccttggtccctatatccgagccgaagtggaggacaacattatggttacctttaggaatcaagcctctcgcccctacagcttctactcctccctcatcagttatgaggaggatcagagacaaggcgctgaaccacggaagaactttgtgaaaccgaatgagacgaagacctacttctggaaagtacagcaccacatggcccccacaaaagacgaattcgattgcaaagcatgggcgtatttttcagacgttgacttggagaaagatgtacattcaggacttattggtcctttgttggtgtgtcacactaacactctcaatccagcccatggcaggcaggtgacagtccaggaattcgctcttttctttaccatctttgatgagaccaagtcctggtacttcacggaaaacatggagcgcaattgcagagccccctgtaacatacagatggaggaccctacctttaaggaaaattatcggttccacgcaatcaacggatacattatggatacactccctggccttgtgatggctcaggaccaacgaatcaggtggtacctcctcagcatgggttctaatgagaacatacactccattcacttttcaggacatgtgttcactgtccggaagaaagaagagtataagatggccctctacaatttgtatccaggcgtgtttgagaccgttgaaatgcttccctctaaagctggcatctggagagtagagtgcttgatcggagaacatcttcacgcaggtatgagcaccttgttcctcgtgtacagcaacaaatgtcagaccccacttggcatggccagtggacacattcgcgactttcagatcacagcatctggccagtatggacaatgggccccaaagttggctcgcctccattactccggtagcataaatgcgtggtccactaaagaacctttcagctggattaaggtcgatcttcttgcccccatgatcatccacggcattaagacacagggagcgaggcagaaattctcctccctctacatctcacagttcattattatgtatagtttggacggcaagaagtggcaaacttatagaggtaacagtactggaacactcatggtgttcttcggcaacgttgatagctctggcatcaaacacaacatctttaatcctcccataatagctcggtacatcagattgcatccgacccactacagcattaggagtacactccgaatggagcttatgggttgcgacttgaattcctgttcaatgccactcggaatggagtctaaagccatctctgatgcacagataaccgccagtagctactttacgaacatgtttgctacgtggtcaccctctaaggcaaggcttcatttgcaaggccggtctaatgcctggagacctcaggtgaacaacccgaaagaatggctccaggtggactttcagaagaccatgaaagtaacaggtgtcactactcagggagttaagtccttgctcaccagcatgtatgtgaaggagttccttatttcctcatcacaagatggccaccagtggaccctcttctttcagaatggtaaggtcaaagtgtttcagggcaatcaagacagcttcacacccgtggtgaacagtcttgatcctccactcttgacacgataccttcgaatccatccacagtcttgggttcaccagattgcattgcgcatggaagtacttggatgcgaggctcaggacctctac

SEQ ID NO: 2468 - protein, 1457 aa, synthetic construct
  REGION 1..1457: note = Variant of human B-domain deleted Factor VIII
MQIELSTCFFLCLLRFCFSATRRYYLGAVELSWDYMQSDLGELPVDARFPPRVPKSFPFNTSVVYKKTLFVEFTDHLFNIAKPRPPWMGLLGPTIQAEVYDTVVITLKNMASHPVSLHAVGVSYWKASEGAEYDDQTSQREKEDDKVFPGGSHTYVWQVLKENGPMASDPLCLTYSYLSHVDLVKDLNSGLIGALLVCREGSLAKEKTQTLHKFILLFAVFDEGKSWHSETKNSLMQDRDAASARAWPKMHTVNGYVNRSLPGLIGCHRKSVYWHVIGMGTTPEVHSIFLEGHTFLVRNHRQASLEISPITFLTAQTLLMDLGQFLLFCHISSHQHDGMEAYVKVDSCPEEPQLRMKNNEEAEDYDDDLTDSEMDVVRFDDDNSPSRIQIRSVAKKHPKTWVHYIAAEEEDWDYAPLVLAPDDRSYKSQYLNNGPQRIGRKYKKVRFMAYTDETFKTREAIQHESGILGPLLYGEVGDTLLIIFKNQASRPYNIYPHGITDVRPLYSRRLPKGVKHLKDFPILPGEIFKYKWTVTVEDGPTKSDPRCLTRYYSSFVNMERDLASGLIGPLLICYKESVDQRGNQIMSDKRNVILFSVFDENRSWYLTENIQRFLPNPAGVQLEDPEFQASNIMHSINGYVFDSLQLSVCLHEVAYWYILSIGAQTDFLSVFFSGYTFKHKMVYEDTLTLFPFSGETVFMSMENPGLWILGCHNSDFRNRGMTALLKVSSCDKNTGDYYEDSYEDISAYLLSKNNAIEPRSFSQNPPVLKRHQREITRTTLQSDQEEIDYDDTISVEMKKEDFDIYDEDENQSPRSFQKKTRHYFIAAVERLWDYGMSSSPHVLRNRAQSGSVPQFKKVVFQEFTDGSFTQPLYRGELNEHLGLLGPYIRAEVEDNIMVTFRNQASRPYSFYSSLISYEEDQRQGAEPRKNFVKPNETKTYFWKVQHHMAPTKDEFDCKAWAYFSDVDLEKDVHSGLIGPLLVCHTNTLNPAHGRQVTVQEFALFFTIFDETKSWYFTENMERNCRAPCNIQMEDPTFKENYRFHAINGYIMDTLPGLVMAQDQRIRWYLLSMGSNENIHSIHFSGHVFTVRKKEEYKMALYNLYPGVFETVEMLPSKAGIWRVECLIGEHLHAGMSTLFLVYSNKCQTPLGMASGHIRDFQITASGQYGQWAPKLARLHYSGSINAWSTKEPFSWIKVDLLAPMIIHGIKTQGARQKFSSLYISQFIIMYSLDGKKWQTYRGNSTGTLMVFFGNVDSSGIKHNIFNPPIIARYIRLHPTHYSIRSTLRMELMGCDLNSCSMPLGMESKAISDAQITASSYFTNMFATWSPSKARLHLQGRSNAWRPQVNNPKEWLQVDFQKTMKVTGVTTQGVKSLLTSMYVKEFLISSSQDGHQWTLFFQNGKVKVFQGNQDSFTPVVNSLDPPLLTRYLRIHPQSWVHQIALRMEVLGCEAQDLY

SEQ ID NO: 2469 - DNA, 4371 bp, synthetic construct
  misc_feature 1..4371: note = Variant of human B-domain deleted Factor VIII
  source 1..4371: mol_type = other DNA
atgcagattgaactgtctacctgcttcttcctctgtttgctgaggttctgctttagcgccactagacggtactaccttggcgctgtggagctgtcctgggactatatgcagagtgatttgggagagcttcccgtcgacgcacgatttcctcctcgcgttccaaagtcatttcccttcaacacaagcgtggtgtacaagaagacgctcttcgtcgaattcaccgatcacctgttcaatatcgccaaacccagaccaccatggatgggtcttttggggcctaccatacaagcggaggtgtatgacacagttgttatcactctcaagaacatggcttctcatccggtaagtcttcacgcagtgggcgtgtcctactggaaagcttcagaaggagccgagtatgatgatcagacatcccagagggagaaagaagacgacaaggtatttccaggtgggtctcatacctatgtgtggcaagtgctcaaagagaatggccctatggcaagcgatccgctctgtttgacttacagctacctttcacacgttgacctcgtcaaggacctcaactccgggttgattggagccttgttggtatgcagggaaggatctcttgccaaagagaagacacagaccctccacaagtttatccttctctttgctgtgttcgatgagggcaaaagttggcatagcgaaacgaagaattccctcatgcaggatcgcgacgcagccagcgccagagcttggcccaagatgcacactgtgaacggatatgtcaataggtcacttcctggcttgattgggtgtcatcggaaaagtgtctactggcacgtgatcggaatggggacaacaccagaggtccactccatatttctcgaaggccataccttccttgttcgaaaccacagacaggcatccttggagatctctcccattacctttctcactgcccaaacgctccttatggacttgggtcagttccttctcttctgccatatcagctcacaccagcatgatggtatggaagcttatgtgaaagtcgacagttgtcctgaggagccacagttgcgcatgaagaataatgaagaagccgaggattacgacgacgatctcaccgattctgagatggacgtggtgaggtttgatgacgacaactctccctccttcattcaaatccggagcgtggcgaagaaacaccccaagacttgggtccactatatagcggcggaagaggaggattgggattacgctcctcttgtattggcaccagatgaccgctcatacaaaagccagtacctcaacaacggaccgcagagaattggccggaagtataagaaagtgcgatttatggcctatacagacgaaacctttaagacaagggaggccatccagcatgagagtgggattttgggacctcttctttacggcgaagttggtgataccctcctcatcatcttcaagaatcaagcttctcgcccctataacatttacccacacgggatcactgacgttaggcctttgtatagcagaagacttcccaaaggcgtgaagcatctcaaagacttccccattttgccaggcgagatctttaagtacaaatggaccgtcacagtggaagatggaccgactaaatcagaccctcgatgccttacgcggtactattcctccttcgtgaatatggagagagatttggcaagcggactcataggaccactcctcatctgttacaaggaatctgtagaccagaggggtaaccagattatgagtgataaacgcaatgtgatcctttttagcgtcttcgacgagaaccggtcctggtacttgaccgagaatatacaaaggttccttcccaaccccgcaggcgttcagttggaagaccctgagtttcaggccagcaatattatgcactcaatcaacggctatgtgtttgatagtctccagctttctgtttgcctccatgaagtagcctattggtacatcttgtcaattggtgctcaaacagacttcctctccgtcttcttctccggctacacctttaagcacaagatggtgtatgaggacactctcacactctttccattttctggagaaaccgtgttcatgagcatggagaatccaggcctttggatcttgggttgccacaacagtgattttcgcaatcggggaatgactgctctcctcaaagtcagcagctgtgataagaacacaggcgactattacgaagattcttacgaggacataagtgcctacttgttgtccaagaataacgccattgagcccagatcattctcccagaatcctcccgtgcttaaaaggcatcagcgcgaaatcaccagaactactcttcagtctgatcaagaggagattgactatgacgacaccataagcgtggaaatgaagaaggaggatttcgatatctatgacgaagatgagaaccagtctccgcggagctttcagaagaagacgcgacactacttcattgcagcagtcgaaaggctttgggactacggtatgtcatcatcccctcatgtgttgcgcaatagagctcagagtggaagtgttccacagttcaagaaagtcgtctttcaagagtttacagatggcagcttcacacagcctctctatcggggcgagcttaacgaacatttgggactccttggtccctatatccgagccgaagtggaggacaacattatggttacctttaggaatcaagcctctcgcccctacagcttctactcctccctcatcagttatgaggaggatcagagacaaggcgctgaaccacggaagaactttgtgaaaccgaatgagacgaagacctacttctggaaagtacagcaccacatggcccccacaaaagacgaattcgattgcaaagcatgggcgtatttttcagacgttgacttggagaaagatgtacattcaggacttattggtcctttgttggtgtgtcacactaacactctcaatccagcccatggcaggcaggtgacagtccaggaattcgctcttttctttaccatctttgatgagaccaagtcctggtacttcacggaaaacatggagcgcaattgcagagccccctgtaacatacagatggaggaccctacctttaaggaaaattatcggttccacgcaatcaacggatacattatggatacactccctggccttgtgatggctcaggaccaacgaatcaggtggtacctcctcagcatgggttctaatgagaacatacactccattcacttttcaggacatgtgttcactgtccggaagaaagaagagtataagatggccctctacaatttgtatccaggcgtgtttgagaccgttgaaatgcttccctctaaagctggcatctggagagtagagtgcttgatcggagaacatcttcacgcaggtatgagcaccttgttcctcgtgtacagcaacaaatgtcagctgccacttggcatggccagtggacacattcgcgactttcagatcacagcatctggccagtatggacaatgggccccaaagttggctcgcctccattactccggtagcataaatgcgtggtccactaaagaacctttcagctggattaaggtcgatcttcttgcccccatgatcatccacggcattaagacacagggagcgaggcagaaattctcctccctctacatctcacagttcattattatgtatagtttggacggcaagaagtggcaaacttatagaggtaacagtactggaacactcatggtgttcttcggcaacgttgatagctctggcatcaaacacaacatctttaatcctcccataatagctcggtacatcagattgcatccgacccactacagcattaggagtacactccgaatggagcttatgggttgcgacttgaattcctgttcaatgccactcggaatggagtctaaagccatctctgatgcacagataaccgccagtagctactttacgaacatgtttgctacgtggtcaccctctaaggcaaggcttcatttgcaaggccggtctaatgcctggagacctcaggtgaacaacccgaaagaatggctccaggtggactttcagaagaccatgaaagtaacaggtgtcactactcagggagttaagtccttgctcaccagcatgtatgtgaaggagttccttatttcctcatcacaagatggccaccagtggaccctcttctttcagaatggtaaggtcaaagtgtttcagggcaatcaagacagcttcacacccgtggtgaacagtcttgatcctccactcttgacacgataccttcgaatccatccacagtcttgggttcaccagattgcattgcgcatggaagtacttggatgcgaggctcaggacctctac

SEQ ID NO: 2470 - protein, 1457 aa, synthetic construct
  REGION 1..1457: note = Variant of human B-domain deleted Factor VIII
MQIELSTCFFLCLLRFCFSATRRYYLGAVELSWDYMQSDLGELPVDARFPPRVPKSFPFNTSVVYKKTLFVEFTDHLFNIAKPRPPWMGLLGPTIQAEVYDTVVITLKNMASHPVSLHAVGVSYWKASEGAEYDDQTSQREKEDDKVFPGGSHTYVWQVLKENGPMASDPLCLTYSYLSHVDLVKDLNSGLIGALLVCREGSLAKEKTQTLHKFILLFAVFDEGKSWHSETKNSLMQDRDAASARAWPKMHTVNGYVNRSLPGLIGCHRKSVYWHVIGMGTTPEVHSIFLEGHTFLVRNHRQASLEISPITFLTAQTLLMDLGQFLLFCHISSHQHDGMEAYVKVDSCPEEPQLRMKNNEEAEDYDDDLTDSEMDVVRFDDDNSPSFIQIRSVAKKHPKTWVHYIAAEEEDWDYAPLVLAPDDRSYKSQYLNNGPQRIGRKYKKVRFMAYTDETFKTREAIQHESGILGPLLYGEVGDTLLIIFKNQASRPYNIYPHGITDVRPLYSRRLPKGVKHLKDFPILPGEIFKYKWTVTVEDGPTKSDPRCLTRYYSSFVNMERDLASGLIGPLLICYKESVDQRGNQIMSDKRNVILFSVFDENRSWYLTENIQRFLPNPAGVQLEDPEFQASNIMHSINGYVFDSLQLSVCLHEVAYWYILSIGAQTDFLSVFFSGYTFKHKMVYEDTLTLFPFSGETVFMSMENPGLWILGCHNSDFRNRGMTALLKVSSCDKNTGDYYEDSYEDISAYLLSKNNAIEPRSFSQNPPVLKRHQREITRTTLQSDQEEIDYDDTISVEMKKEDFDIYDEDENQSPRSFQKKTRHYFIAAVERLWDYGMSSSPHVLRNRAQSGSVPQFKKVVFQEFTDGSFTQPLYRGELNEHLGLLGPYIRAEVEDNIMVTFRNQASRPYSFYSSLISYEEDQRQGAEPRKNFVKPNETKTYFWKVQHHMAPTKDEFDCKAWAYFSDVDLEKDVHSGLIGPLLVCHTNTLNPAHGRQVTVQEFALFFTIFDETKSWYFTENMERNCRAPCNIQMEDPTFKENYRFHAINGYIMDTLPGLVMAQDQRIRWYLLSMGSNENIHSIHFSGHVFTVRKKEEYKMALYNLYPGVFETVEMLPSKAGIWRVECLIGEHLHAGMSTLFLVYSNKCQLPLGMASGHIRDFQITASGQYGQWAPKLARLHYSGSINAWSTKEPFSWIKVDLLAPMIIHGIKTQGARQKFSSLYISQFIIMYSLDGKKWQTYRGNSTGTLMVFFGNVDSSGIKHNIFNPPIIARYIRLHPTHYSIRSTLRMELMGCDLNSCSMPLGMESKAISDAQITASSYFTNMFATWSPSKARLHLQGRSNAWRPQVNNPKEWLQVDFQKTMKVTGVTTQGVKSLLTSMYVKEFLISSSQDGHQWTLFFQNGKVKVFQGNQDSFTPVVNSLDPPLLTRYLRIHPQSWVHQIALRMEVLGCEAQDLY

SEQ ID NO: 2471 - DNA, 4371 bp, synthetic construct
  misc_feature 1..4371: note = Variant of human B-domain deleted Factor VIII
  source 1..4371: mol_type = other DNA
atgcagattgaactgtctacctgcttcttcctctgtttgctgaggttctgctttagcgccactagacggtactaccttggcgctgtggagctgtcctgggactatatgcagagtgatttgggagagcttcccgtcgacgcacgatttcctcctcgcgttccaaagtcatttcccttcaacacaagcgtggtgtacaagaagacgctcttcgtcgaattcaccgatcacctgttcaatatcgccaaacccagaccaccatggatgggtcttttggggcctaccatacaagcggaggtgtatgacacagttgttatcactctcaagaacatggcttctcatccggtaagtcttcacgcagtgggcgtgtcctactggaaagcttcagaaggagccgagtatgatgatcagacatcccagagggagaaagaagacgacaaggtatttccaggtgggtctcatacctatgtgtggcaagtgctcaaagagaatggccctatggcaagcgatccgctctgtttgacttacagctacctttcacacgttgacctcgtcaaggacctcaactccgggttgattggagccttgttggtatgcagggaaggatctcttgccaaagagaagacacagaccctccacaagtttatccttctctttgctgtgttcgatgagggcaaaagttggcatagcgaaacgaagaattccctcatgcaggatcgcgacgcagccagcgccagagcttggcccaagatgcacactgtgaacggatatgtcaataggtcacttcctggcttgattgggtgtcatcggaaaagtgtctactggcacgtgatcggaatggggacaacaccagaggtccactccatatttctcgaaggccataccttccttgttcgaaaccacagacaggcatccttggagatctctcccattacctttctcactgcccaaacgctccttatggacttgggtcagttccttctcttctgccatatcagctcacaccagcatgatggtatggaagcttatgtgaaagtcgacagttgtcctgaggagccacagttgcgcatgaagaataatgaagaagccgaggattacgacgacgatctcaccgattctgagatggacgtggtgaggtttgatgacgacaactctccctccttcattcaaatccggagcgtggcgaagaaacaccccaagacttgggtccactatatagcggcggaagaggaggattgggattacgctcctcttgtattggcaccagatgaccgctcatacaaaagccagtacctcaacaacggaccgcagagaattggccggaagtataagaaagtgcgatttatggcctatacagacgaaacctttaagacaagggaggccatccagcatgagagtgggattttgggacctcttctttacggcgaagttggtgataccctcctcatcatcttcaagaatcaagcttctcgcccctataacatttacccacacgggatcactgacgttaggcctttgtatagcagaagacttcccaaaggcgtgaagcatctcaaagacttccccattttgccaggcgagatctttaagtacaaatggaccgtcacagtggaagatggaccgactaaatcagaccctcgatgccttacgcggtactattcctccttcgtgaatatggagagagatttggcaagcggactcataggaccactcctcatctgttacaaggaatctgtagaccagaggggtaaccagattatgagtgataaacgcaatgtgatcctttttagcgtcttcgacgagaaccggtcctggtacttgaccgagaatatacaaaggttccttcccaaccccgcaggcgttcagttggaagaccctgagtttcaggccagcaatattatgcactcaatcaacggctatgtgtttgatagtctccagctttctgtttgcctccatgaagtagcctattggtacatcttgtcaattggtgctcaaacagacttcctctccgtcttcttctccggctacacctttaagcacaagatggtgtatgaggacactctcacactctttccattttctggagaaaccgtgttcatgagcatggagaatccaggcctttggatcttgggttgccacaacagtgattttcgcaatcggggaatgactgctctcctcaaagtcagcagctgtgataagaacacaggcgactattacgaagattcttacgaggacataagtgcctacttgttgtccaagaataacgccattgagcccagatcattctcccagaatcctcccgtgcttaaaaggcatcagcgcgaaatcaccagaactactcttcagtctgatcaagaggagattgactatgacgacaccataagcgtggaaatgaagaaggaggatttcgatatctatgacgaagatgagaaccagtctccgcggagctttcagaagaagacgcgacactacttcattgcagcagtcgaaaggctttgggactacggtatgtcatcatcccctcatgtgttgcgcaatagagctcagagtggaagtgttccacagttcaagaaagtcgtctttcaagagtttacagatggcagcttcacacagcctctctatcggggcgagcttaacgaacatttgggactccttggtccctatatccgagccgaagtggaggacaacattatggttacctttaggaatcaagcctctcgaccctacagcttctactcctccctcatcagttatgaggaggatcagagacaaggcgctgaaccacggaagaactttgtgaaaccgaatgagacgaagacctacttctggaaagtacagcaccacatggcccccacaaaagacgaattcgattgcaaagcatgggcgtatttttcagacgttgacttggagaaagatgtacattcaggacttattggtcctttgttggtgtgtcacactaacactctcaatccagcccatggcaggcaggtgacagtccaggaattcgctcttttctttaccatctttgatgagaccaagtcctggtacttcacggaaaacatggagcgcaattgcagagccccctgtaacatacagatggaggaccctacctttaaggaaaattatcggttccacgcaatcaacggatacattatggatacactccctggccttgtgatggctcaggaccaacgaatcaggtggtacctcctcagcatgggttctaatgagaacatacactccattcacttttcaggacatgtgttcactgtccggaagaaagaagagtataagatggccctctacaatttgtatccaggcgtgtttgagaccgttgaaatgcttccctctaaagctggcatctggagagtagagtgcttgatcggagaacatcttcacgcaggtatgagcaccttgttcctcgtgtacagcaacaaatgtcagaccccacttggcatggccagtggacacattcgcgactttcagatcacagcatctggccagtatggacaatgggccccaaagttggctcgcctccattactccggtagcataaatgcgtggtccactaaagaacctttcagctggattaaggtcgatcttcttgcccccatgatcatccacggcattaagacacagggagcgaggcagaaattctcctccctctacatctcacagttcattattatgtatagtttggacggcaagaagtggcaaacttatagaggtaacagtactggaacactcatggtgttcttcggcaacgttgatagctctggcatcaaacacaacatctttaatcctcccataatagctcggtacatcagattgcatccgacccactacagcattaggagtacactccgaatggagcttatgggttgcgacttgaattcctgttcaatgccactcggaatggagtctaaagccatctctgatgcacagataaccgccagtagctactttacgaacatgtttgctacgtggtcaccctctaaggcaaggcttcatttgcaaggccggtctaatgcctggagacctcaggtgaacaacccgaaagaatggctccaggtggactttcagaagaccatgaaagtaacaggtgtcactactcagggagttaagtccttgctcaccagcatgtatgtgaaggagttccttatttcctcatcacaagatggccaccagtggaccctcttctttcagaatggtaaggtcaaagtgtttcagggcaatcaagacagcttcacacccgtggtgaacagtcttgatcctccactcttgacacgataccttcgaatccatccacagtcttggacgcaccagattgcattgcgcatggaagtacttggatgcgaggctcaggacctctac

SEQ ID NO: 2472 - protein, 1457 aa, synthetic construct
  REGION 1..1457: note = Variant of human B-domain deleted Factor VIII
MQIELSTCFFLCLLRFCFSATRRYYLGAVELSWDYMQSDLGELPVDARFPPRVPKSFPFNTSVVYKKTLFVEFTDHLFNIAKPRPPWMGLLGPTIQAEVYDTVVITLKNMASHPVSLHAVGVSYWKASEGAEYDDQTSQREKEDDKVFPGGSHTYVWQVLKENGPMASDPLCLTYSYLSHVDLVKDLNSGLIGALLVCREGSLAKEKTQTLHKFILLFAVFDEGKSWHSETKNSLMQDRDAASARAWPKMHTVNGYVNRSLPGLIGCHRKSVYWHVIGMGTTPEVHSIFLEGHTFLVRNHRQASLEISPITFLTAQTLLMDLGQFLLFCHISSHQHDGMEAYVKVDSCPEEPQLRMKNNEEAEDYDDDLTDSEMDVVRFDDDNSPSFIQIRSVAKKHPKTWVHYIAAEEEDWDYAPLVLAPDDRSYKSQYLNNGPQRIGRKYKKVRFMAYTDETFKTREAIQHESGILGPLLYGEVGDTLLIIFKNQASRPYNIYPHGITDVRPLYSRRLPKGVKHLKDFPILPGEIFKYKWTVTVEDGPTKSDPRCLTRYYSSFVNMERDLASGLIGPLLICYKESVDQRGNQIMSDKRNVILFSVFDENRSWYLTENIQRFLPNPAGVQLEDPEFQASNIMHSINGYVFDSLQLSVCLHEVAYWYILSIGAQTDFLSVFFSGYTFKHKMVYEDTLTLFPFSGETVFMSMENPGLWILGCHNSDFRNRGMTALLKVSSCDKNTGDYYEDSYEDISAYLLSKNNAIEPRSFSQNPPVLKRHQREITRTTLQSDQEEIDYDDTISVEMKKEDFDIYDEDENQSPRSFQKKTRHYFIAAVERLWDYGMSSSPHVLRNRAQSGSVPQFKKVVFQEFTDGSFTQPLYRGELNEHLGLLGPYIRAEVEDNIMVTFRNQASRPYSFYSSLISYEEDQRQGAEPRKNFVKPNETKTYFWKVQHHMAPTKDEFDCKAWAYFSDVDLEKDVHSGLIGPLLVCHTNTLNPAHGRQVTVQEFALFFTIFDETKSWYFTENMERNCRAPCNIQMEDPTFKENYRFHAINGYIMDTLPGLVMAQDQRIRWYLLSMGSNENIHSIHFSGHVFTVRKKEEYKMALYNLYPGVFETVEMLPSKAGIWRVECLIGEHLHAGMSTLFLVYSNKCQTPLGMASGHIRDFQITASGQYGQWAPKLARLHYSGSINAWSTKEPFSWIKVDLLAPMIIHGIKTQGARQKFSSLYISQFIIMYSLDGKKWQTYRGNSTGTLMVFFGNVDSSGIKHNIFNPPIIARYIRLHPTHYSIRSTLRMELMGCDLNSCSMPLGMESKAISDAQITASSYFTNMFATWSPSKARLHLQGRSNAWRPQVNNPKEWLQVDFQKTMKVTGVTTQGVKSLLTSMYVKEFLISSSQDGHQWTLFFQNGKVKVFQGNQDSFTPVVNSLDPPLLTRYLRIHPQSWTHQIALRMEVLGCEAQDLY

SEQ ID NO: 2473 - DNA, 4371 bp, synthetic construct
  misc_feature 1..4371: note = Variant of human B-domain deleted Factor VIII
  source 1..4371: mol_type = other DNA
atgcagattgaactgtctacctgcttcttcctctgtttgctgaggttctgctttagcgccactagacggtactaccttggcgctgtggagctgtcctgggactatatgcagagtgatttgggagagcttcccgtcgacgcacgatttcctcctcgcgttccaaagtcatttcccttcaacacaagcgtggtgtacaagaagacgctcttcgtcgaattcaccgatcacctgttcaatatcgccaaacccagaccaccatggatgggtcttttggggcctaccatacaagcggaggtgtatgacacagttgttatcactctcaagaacatggcttctcatccggtaagtcttcacgcagtgggcgtgtcctactggaaagcttcagaaggagccgagtatgatgatcagacatcccagagggagaaagaagacgacaaggtatttccaggtgggtctcatacctatgtgtggcaagtgctcaaagagaatggccctatggcaagcgatccgctctgtttgacttacagctacctttcacacgttgacctcgtcaaggacctcaactccgggttgattggagccttgttggtatgcagggaaggatctcttgccaaagagaagacacagaccctccacaagtttatccttctctttgctgtgttcgatgagggcaaaagttggcatagcgaaacgaagaattccctcatgcaggatcgcgacgcagccagcgccagagcttggcccaagatgcacactgtgaacggatatgtcaataggtcacttcctggcttgattgggtgtcatcggaaaagtgtctactggcacgtgatcggaatggggacaacaccagaggtccactccatatttctcgaaggccataccttccttgttcgaaaccacagacaggcatccttggagatctctcccattacctttctcactgcccaaacgctccttatggacttgggtcagttccttctcttctgccatatcagctcacaccagcatgatggtatggaagcttatgtgaaagtcgacagttgtcctgaggagccacagttgcgcatgaagaataatgaagaagccgaggattacgacgacgatctcaccgattctgagatggacgtggtgaggtttgatgacgacaactctccctccttcattcaaatccggagcgtggcgaagaaacaccccaagacttgggtccactatatagcggcggaagaggaggattgggattacgctcctcttgtattggcaccagatgaccgctcatacaaaagccagtacctcaacaacggaccgcagagaattggccggaagtataagaaagtgcgatttatggcctatacagacgaaacctttaagacaagggaggccatccagcatgagagtgggattttgggacctcttctttacggcgaagttggtgataccctcctcatcatcttcaagaatcaagcttctcgcccctataacatttacccacacgggatcactgacgttaggcctttgtatagcagaagacttcccaaaggcgtgaagcatctcaaagacttccccattttgccaggcgagatctttaagtacaaatggaccgtcacagtggaagatggaccgactaaatcagaccctcgatgccttacgcggtactattcctccttcgtgaatatggagagagatttggcaagcggactcataggaccactcctcatctgttacaaggaatctgtagaccagaggggtaaccagattatgagtgataaacgcaatgtgatcctttttagcgtcttcgacgagaaccggtcctggtacttgaccgagaatatacaaaggttccttcccaaccccgcaggcgttcagttggaagaccctgagtttcaggccagcaatattatgcactcaatcaacggctatgtgtttgatagtctccagctttctgtttgcctccatgaagtagcctattggtacatcttgtcaattggtgctcaaacagacttcctctccgtcttcttctccggctacacctttaagcacaagatggtgtatgaggacactctcacactctttccattttctggagaaaccgtgttcatgagcatggagaatccaggcctttggatcttgggttgccacaacagtgattttcgcaatcggggaatgactgctctcctcaaagtcagcagctgtgataagaacacaggcgactattacgaagattcttacgaggacataagtgcctacttgttgtccaagaataacgccattgagcccagatcattctcccagaatcctcccgtgcttaaaaggcatcagcgcgaaatcaccagaactactcttcagtctgatcaagaggagattgactatgacgacaccataagcgtggaaatgaagaagatggatttcgatatctatgacgaagatgagaaccagtctccgcggagctttcagaagaagacgcgacactacttcattgcagcagtcgaaaggctttgggactacggtatgtcatcatcccctcatgtgttgcgcaatagagctcagagtggaagtgttccacagttcaagaaagtcgtctttcaagagtttacagatggcagcttcacacagcctctctatcggggcgagcttaacgaacatttgggactccttggtccctatatccgagccgaagtggaggacaacattatggttacctttaggaatcaagcctctcgcccctacagcttctactcctccctcatcagttatgaggaggatcagagacaaggcgctgaaccacggaagaactttgtgaaaccgaatgagacgaagacctacttctggaaagtacagcaccacatggcccccacaaaagacgaattcgattgcaaagcatgggcgtatttttcagacgttgacttggagaaagatgtacattcaggacttattggtcctttgttggtgtgtcacactaacactctcaatccagcccatggcaggcaggtgacagtccaggaattcgctcttttctttaccatctttgatgagaccaagtcctggtacttcacggaaaacatggagcgcaattgcagagccccctgtaacatacagatggaggaccctacctttaaggaaaattatcggttccacgcaatcaacggatacattatggatacactccctggccttgtgatggctcaggaccaacgaatcaggtggtacctcctcagcatgggttctaatgagaacatacactccattcacttttcaggacatgtgttcactgtccggaagaaagaagagtataagatggccctctacaatttgtatccaggcgtgtttgagaccgttgaaatgcttccctctaaagctggcatctggagagtagagtgcttgatcggagaacatcttcacgcaggtatgagcaccttgttcctcgtgtacagcaacaaatgtcagaccccacttggcatggccagtggacacattcgcgactttcagatcacagcatctggccagtatggacaatgggccccaaagttggctcgcctccattactccggtagcataaatgcgtggtccactaaagaacctttcagctggattaaggtcgatcttcttgcccccatgatcatccacggcattaagacacagggagcgaggcagaaattctcctccctctacatctcacagttcattattatgtatagtttggacggcaagaagtggcaaacttatagaggtaacagtactggaacactcatggtgttcttcggcaacgttgatagctctggcatcaaacacaacatctttaatcctcccataatagctcggtacatcagattgcatccgacccactacagcattaggagtacactccgaatggagcttatgggttgcgacttgaattcctgttcaatgccactcggaatggagtctaaagccatctctgatgcacagataaccgccagtagctactttacgaacatgtttgctacgtggtcaccctctaaggcaaggcttcatttgcaaggccggtctaatgcctggagacctcaggtgaacaacccgaaagaatggctccaggtggactttcagaagaccatgaaagtaacaggtgtcactactcagggagttaagtccttgctcaccagcatgtatgtgaaggagttccttatttcctcatcacaagatggccaccagtggaccctcttctttcagaatggtaaggtcaaagtgtttcagggcaatcaagacagcttcacacccgtggtgaacagtcttgatcctccactcttgacacgataccttcgaatccatccacagtcttgggttcaccagattgcattgcgcatggaagtacttggatgcgaggctcaggacctctac

SEQ ID NO: 2474 - protein, 1457 aa, synthetic construct
  REGION 1..1457: note = Variant of human B-domain deleted Factor VIII
MQIELSTCFFLCLLRFCFSATRRYYLGAVELSWDYMQSDLGELPVDARFPPRVPKSFPFNTSVVYKKTLFVEFTDHLFNIAKPRPPWMGLLGPTIQAEVYDTVVITLKNMASHPVSLHAVGVSYWKASEGAEYDDQTSQREKEDDKVFPGGSHTYVWQVLKENGPMASDPLCLTYSYLSHVDLVKDLNSGLIGALLVCREGSLAKEKTQTLHKFILLFAVFDEGKSWHSETKNSLMQDRDAASARAWPKMHTVNGYVNRSLPGLIGCHRKSVYWHVIGMGTTPEVHSIFLEGHTFLVRNHRQASLEISPITFLTAQTLLMDLGQFLLFCHISSHQHDGMEAYVKVDSCPEEPQLRMKNNEEAEDYDDDLTDSEMDVVRFDDDNSPSFIQIRSVAKKHPKTWVHYIAAEEEDWDYAPLVLAPDDRSYKSQYLNNGPQRIGRKYKKVRFMAYTDETFKTREAIQHESGILGPLLYGEVGDTLLIIFKNQASRPYNIYPHGITDVRPLYSRRLPKGVKHLKDFPILPGEIFKYKWTVTVEDGPTKSDPRCLTRYYSSFVNMERDLASGLIGPLLICYKESVDQRGNQIMSDKRNVILFSVFDENRSWYLTENIQRFLPNPAGVQLEDPEFQASNIMHSINGYVFDSLQLSVCLHEVAYWYILSIGAQTDFLSVFFSGYTFKHKMVYEDTLTLFPFSGETVFMSMENPGLWILGCHNSDFRNRGMTALLKVSSCDKNTGDYYEDSYEDISAYLLSKNNAIEPRSFSQNPPVLKRHQREITRTTLQSDQEEIDYDDTISVEMKKMDFDIYDEDENQSPRSFQKKTRHYFIAAVERLWDYGMSSSPHVLRNRAQSGSVPQFKKVVFQEFTDGSFTQPLYRGELNEHLGLLGPYIRAEVEDNIMVTFRNQASRPYSFYSSLISYEEDQRQGAEPRKNFVKPNETKTYFWKVQHHMAPTKDEFDCKAWAYFSDVDLEKDVHSGLIGPLLVCHTNTLNPAHGRQVTVQEFALFFTIFDETKSWYFTENMERNCRAPCNIQMEDPTFKENYRFHAINGYIMDTLPGLVMAQDQRIRWYLLSMGSNENIHSIHFSGHVFTVRKKEEYKMALYNLYPGVFETVEMLPSKAGIWRVECLIGEHLHAGMSTLFLVYSNKCQTPLGMASGHIRDFQITASGQYGQWAPKLARLHYSGSINAWSTKEPFSWIKVDLLAPMIIHGIKTQGARQKFSSLYISQFIIMYSLDGKKWQTYRGNSTGTLMVFFGNVDSSGIKHNIFNPPIIARYIRLHPTHYSIRSTLRMELMGCDLNSCSMPLGMESKAISDAQITASSYFTNMFATWSPSKARLHLQGRSNAWRPQVNNPKEWLQVDFQKTMKVTGVTTQGVKSLLTSMYVKEFLISSSQDGHQWTLFFQNGKVKVFQGNQDSFTPVVNSLDPPLLTRYLRIHPQSWVHQIALRMEVLGCEAQDLY

SEQ ID NO: 2475 - DNA, 4371 bp, synthetic construct
  misc_feature 1..4371: note = Variant of human B-domain deleted Factor VIII
  source 1..4371: mol_type = other DNA
atgcagattgaactgtctacctgcttcttcctctgtttgctgaggttctgctttagcgccactagacggtactaccttggcgctgtggagctgtcctgggactatatgcagagtgatttgggagagcttcccgtcgacgcacgatttcctcctcgcgttccaaagtcatttcccttcaacacaagcgtggtgtacaagaagacgctcttcgtcgaattcaccgatcacctgttcaatatcgccaaacccagaccaccatggatgggtcttttggggcctaccatacaagcggaggtgtatgacacagttgttatcactctcaagaacatggcttctcatccggtaagtcttcacgcagtgggcgtgtcctactggaaagcttcagaaggagccgagtatgatgatcagacatcccagagggagaaagaagacgacaaggtatttccaggtgggtctcatacctatgtgtggcaagtgctcaaagagaatggccctatggcaagcgatccgctctgtttgacttacagctacctttcacacgttgacctcgtcaaggacctcaactccgggttgattggagccttgttggtatgcagggaaggatctcttgccaaagagaagacacagaccctccacaagtttatccttctctttgctgtgttcgatgagggcaaaagttggcatagcgaaacgaagaattccctcatgcaggatcgcgacgcagccagcgccagagcttggcccaagatgcacactgtgaacggatatgtcaataggtcacttcctggcttgattgggtgtcatcggaaaagtgtctactggcacgtgatcggaatggggacaacaccagaggtccactccatatttctcgaaggccataccttccttgttcgaaaccacagacaggcatccttggagatctctcccattacctttctcactgcccaaacgctccttatggacttgggtcagttccttctcttctgccatatcagctcacaccagcatgatggtatggaagcttatgtgaaagtcgacagttgtcctgaggagccacagttgcgcatgaagaataatgaagaagccgaggattacgacgacgatctcaccgattctgagatggacgtggtgaggtttgatgacgacaactctccctccttcattcaaatccggagcgtggcgaagaaacaccccaagacttgggtccactatatagcggcggaagaggaggattgggattacgctcctcttgtattggcaccagatgaccgctcatacaaaagccagtacctcaacaacggaccgcagagaattggccggaagtataagaaagtgcgatttatggcctatacagacgaaacctttaagacaagggaggccatccagcatgagagtgggattttgggacctcttctttacggcgaagttggtgataccctcctcatcatcttcaagaatcaagcttctcgcccctataacatttacccacacgggatcactgacgttaggcctttgtatagcagaagacttcccaaaggcgtgaagcatctcaaagacttccccattttgccaggcgagatctttaagtacaaatggaccgtcacagtggaagatggaccgactaaatcagaccctcgatgccttacgcggtactattcctccttcgtgaatatggagagagatttggcaagcggactcataggaccactcctcatctgttacaaggaatctgtagaccagaggggtaaccagattatgagtgataaacgcaatgtgatcctttttagcgtcttcgacgagaaccggtcctggtacttgaccgagaatatacaaaggttccttcccaaccccgcaggcgttcagttggaagaccctgagtttcaggccagcaatattatgcactcaatcaacggctatgtgtttgatagtctccagctttctgtttgcctccatgaagtagcctattggtacatcttgtcaattggtgctcaaacagacttcctctccgtcttcttctccggctacacctttaagcacaagatggtgtatgaggacactctcacactctttccattttctggagaaaccgtgttcatgagcatggagaatccaggcctttggatcttgggttgccacaacagtgattttcgcaatcggggaatgactgctctcctcaaagtcagcagctgtgataagaacacaggcgactattacgaagattcttacgaggacataagtgcctacttgcgttccaagaataacgccattgagcccagatcattctcccagaatcctcccgtgcttaaaaggcatcagcgcgaaatcaccagaactactcttcagtctgatcaagaggagattgactatgacgacaccataagcgtggaaatgaagaaggaggatttcgatatctatgacgaagatgagaaccagtctccgcggagctttcagaagaagacgcgacactacttcattgcagcagtcgaaaggctttgggactacggtatgtcatcatcccctcatgtgttgcgcaatagagctcagagtggaagtgttccacagttcaagaaagtcgtctttcaagagtttacagatggcagcttcacacagcctctctatcggggcgagcttaacgaacatttgggactccttggtccctatatccgagccgaagtggaggacaacattatggttacctttaggaatcaagcctctcgcccctacagcttctactcctccctcatcagttatgaggaggatcagagacaaggcgctgaaccacggaagaactttgtgaaaccgaatgagacgaagacctacttctggaaagtacagcaccacatggcccccacaaaagacgaattcgattgcaaagcatgggcgtatttttcagacgttgacttggagaaagatgtacattcaggacttattggtcctttgttggtgtgtcacactaacactctcaatccagcccatggcaggcaggtgacagtccaggaattcgctcttttctttaccatctttgatgagaccaagtcctggtacttcacggaaaacatggagcgcaattgcagagccccctgtaacatacagatggaggaccctacctttaaggaaaattatcggttccacgcaatcaacggatacattatggatacactccctggccttgtgatggctcaggaccaacgaatcaggtggtacctcctcagcatgggttctaatgagaacatacactccattcacttttcaggacatgtgttcactgtccggaagaaagaagagtataagatggccctctacaatttgtatccaggcgtgtttgagaccgttgaaatgcttccctctaaagctggcatctggagagtagagtgcttgatcggagaacatcttcacgcaggtatgagcaccttgttcctcgtgtacagcaacaaatgtcagaccccacttggcatggccagtggacacattcgcgactttcagatcacagcatctggccagtatggacaatgggccccaaagttggctcgcctccattactccggtagcataaatgcgtggtccactaaagaacctttcagctggattaaggtcgatcttcttgcccccatgatcatccacggcattaagacacagggagcgaggcagaaattctcctccctctacatctcacagttcattattatgtatagtttggacggcaagaagtggcaaacttatagaggtaacagtactggaacactcatggtgttcttcggcaacgttgatagctctggcatcaaacacaacatctttaatcctcccataatagctcggtacatcagattgcatccgacccactacagcattaggagtacactccgaatggagcttatgggttgcgacttgaattcctgttcaatgccactcggaatggagtctaaagccatctctgatgcacagataaccgccagtagctactttacgaacatgtttgctacgtggtcaccctctaaggcaaggcttcatttgcaaggccggtctaatgcctggagacctcaggtgaacaacccgaaagaatggctccaggtggactttcagaagaccatgaaagtaacaggtgtcactactcagggagttaagtccttgctcaccagcatgtatgtgaaggagttccttatttcctcatcacaagatggccaccagtggaccctcttctttcagaatggtaaggtcaaagtgtttcagggcaatcaagacagcttcacacccgtggtgaacagtcttgatcctccactcttgacacgataccttcgaatccatccacagtcttgggttcaccagattgcattgcgcatggaagtacttggatgcgaggctcaggacctctac

SEQ ID NO: 2476 - protein, 1457 aa, synthetic construct
  REGION 1..1457: note = Variant of human B-domain deleted Factor VIII
MQIELSTCFFLCLLRFCFSATRRYYLGAVELSWDYMQSDLGELPVDARFPPRVPKSFPFNTSVVYKKTLFVEFTDHLFNIAKPRPPWMGLLGPTIQAEVYDTVVITLKNMASHPVSLHAVGVSYWKASEGAEYDDQTSQREKEDDKVFPGGSHTYVWQVLKENGPMASDPLCLTYSYLSHVDLVKDLNSGLIGALLVCREGSLAKEKTQTLHKFILLFAVFDEGKSWHSETKNSLMQDRDAASARAWPKMHTVNGYVNRSLPGLIGCHRKSVYWHVIGMGTTPEVHSIFLEGHTFLVRNHRQASLEISPITFLTAQTLLMDLGQFLLFCHISSHQHDGMEAYVKVDSCPEEPQLRMKNNEEAEDYDDDLTDSEMDVVRFDDDNSPSFIQIRSVAKKHPKTWVHYIAAEEEDWDYAPLVLAPDDRSYKSQYLNNGPQRIGRKYKKVRFMAYTDETFKTREAIQHESGILGPLLYGEVGDTLLIIFKNQASRPYNIYPHGITDVRPLYSRRLPKGVKHLKDFPILPGEIFKYKWTVTVEDGPTKSDPRCLTRYYSSFVNMERDLASGLIGPLLICYKESVDQRGNQIMSDKRNVILFSVFDENRSWYLTENIQRFLPNPAGVQLEDPEFQASNIMHSINGYVFDSLQLSVCLHEVAYWYILSIGAQTDFLSVFFSGYTFKHKMVYEDTLTLFPFSGETVFMSMENPGLWILGCHNSDFRNRGMTALLKVSSCDKNTGDYYEDSYEDISAYLRSKNNAIEPRSFSQNPPVLKRHQREITRTTLQSDQEEIDYDDTISVEMKKEDFDIYDEDENQSPRSFQKKTRHYFIAAVERLWDYGMSSSPHVLRNRAQSGSVPQFKKVVFQEFTDGSFTQPLYRGELNEHLGLLGPYIRAEVEDNIMVTFRNQASRPYSFYSSLISYEEDQRQGAEPRKNFVKPNETKTYFWKVQHHMAPTKDEFDCKAWAYFSDVDLEKDVHSGLIGPLLVCHTNTLNPAHGRQVTVQEFALFFTIFDETKSWYFTENMERNCRAPCNIQMEDPTFKENYRFHAINGYIMDTLPGLVMAQDQRIRWYLLSMGSNENIHSIHFSGHVFTVRKKEEYKMALYNLYPGVFETVEMLPSKAGIWRVECLIGEHLHAGMSTLFLVYSNKCQTPLGMASGHIRDFQITASGQYGQWAPKLARLHYSGSINAWSTKEPFSWIKVDLLAPMIIHGIKTQGARQKFSSLYISQFIIMYSLDGKKWQTYRGNSTGTLMVFFGNVDSSGIKHNIFNPPIIARYIRLHPTHYSIRSTLRMELMGCDLNSCSMPLGMESKAISDAQITASSYFTNMFATWSPSKARLHLQGRSNAWRPQVNNPKEWLQVDFQKTMKVTGVTTQGVKSLLTSMYVKEFLISSSQDGHQWTLFFQNGKVKVFQGNQDSFTPVVNSLDPPLLTRYLRIHPQSWVHQIALRMEVLGCEAQDLY

SEQ ID NO: 2477 - DNA, 4371 bp, synthetic construct
  misc_feature 1..4371: note = Variant of human B-domain deleted Factor VIII
  source 1..4371: mol_type = other DNA
atgcagattgaactgtctacctgcttcttcctctgtttgctgaggttctgctttagcgccactagacggtactaccttggcgctgtggagctgtcctgggactatatgcagagtgatttgggagagcttcccgtcgacgcacgatttcctcctcgcgttccaaagtcatttcccttcaacacaagcgtggtgtacaagaagacgctcttcgtcgaattcaccgatcacctgttcaatatcgccaaacccagaccaccatggatgggtcttttggggcctaccatacaagcggaggtgtatgacacagttgttatcactctcaagaacatggcttctcatccggtaagtcttcacgcagtgggcgtgtcctactggaaagcttcagaaggagccgagtatgatgatcagacatcccagagggagaaagaagacgacaaggtatttccaggtgggtctcatacctatgtgtggcaagtgctcaaagagaatggccctatggcaagcgatccgctctgtttgacttacagctacctttcacacgttgacctcgtcaaggacctcaactccgggttgattggagccttgttggtatgcagggaaggatctcttgccaaagagaagacacagaccctccacaagtttatccttctctttgctgtgttcgatgagggcaaaagttggcatagcgaaacgaagaattccctcatgcaggatcgcgacgcagccagcgccagagcttggcccaagatgcacactgtgaacggatatgtcaataggtcacttcctggcttgattgggtgtcatcggaaaagtgtctactggcacgtgatcggaatggggacaacaccagaggtccactccatatttctcgaaggccataccttccttgttcgaaaccacagacaggcatccttggagatctctcccattacctttctcactgcccaaacgctccttatggacttgggtcagttccttctcttctgccatatcagctcacaccagcatgatggtatggaagcttatgtgaaagtcgacagttgtcctgaggagccacagttgcgcatgaagaataatgaagaagccgaggattacgacgacgatctcaccgattctgagatggacgtggtgaggtttgatgacgacaactctccctccttcattcaaatccggagcgtggcgaagaaacaccccaagacttgggtccactatatagcggcggaagaggaggattgggattacgctcctcttgtattggcaccagatgaccgctcatacaaaagccagtacctcaacaacggaccgcagagaattggccggaagtataagaaagtgcgatttatggcctatacagacgaaacctttaagacaagggaggccatccagcatgagagtgggattttgggacctcttctttacggcgaagttggtgataccctcctcatcatcttcaagaatcaagcttctcgcccctataacatttacccacacgggatcactgacgttaggcctttgtatagcagaagacttcccaaaggcgtgaagcatctcaaagacttccccattttgccaggcgagatctttaagtacaaatggaccgtcacagtggaagatggaccgactaaatcagaccctcgatgccttacgcggtactattcctccttcgtgaatatggagagagatttggcaagcggactcataggaccactcctcatctgttacaaggaatctgtagaccagaggggtaaccagattatgagtgataaacgcaatgtgatcctttttagcgtcttcgacgagaaccggtcctggtacttgaccgagaatatacaaaggttccttcccaaccccgcaggcgttcagttggaagaccctgagtttcaggccagcaatattatgcactcaatcaacggctatgtgtttgatagtctccagctttctgtttgcctccatgaagtagcctattggtacatcttgtcaattggtgctcaaacagacttcctctccgtcttcttctccggctacacctttaagcacaagatggtgtatgaggacactctcacactctttccattttctggagaaaccgtgttcatgagcatggagaatccaggcctttggatcttgggttgccacaacagtgattttcgcaatcggggaatgactgctctcctcaaagtcagcagctgtgataagaacacaggcgactattacgaagattcttacgaggacataagtgcctacttgttgtccaagaataacgccattgagcccagatcattctcccagaatcctcccgtgcttaaaaggcatcagcgcgaaatcaccagaactactcttcagtctgatcaagaggagattgactatgacgacaccataagcgtggaaatgaagaaggaggatttcgatatctatgacgaagatgagaaccagtctccgcggagctttcagaagaagacgcgacactacttcattgcagcagtcgaaaggctttgggactacggtatgtcatcatcccctcatgtgttgcgcaatagagctcagagtggaagtgttccacagttcaagaaagtcgtctttcaagagtttacagatggcagcttcacacagcctctctatcggggcgagcttaacgaacatttgggactccttggtccctatatccgagccgaagtggaggacaacattatggttacctttaggaatcaagcctctcgcccctacagcttctactcctccctcatcagttatgaggaggatcagagacaaggcgctgaaccacggaagaactttgtgaaaccgaatgagacgaagacctacttctggaaagtacagcaccacatggcccccacaaaagacgaattcgattgcaaagcatgggcgtatttttcagacgttgacttggagaaagatgtacattcaggacttattggtcctttgttggtgtgtcacactaacactctcaatccagcccatggcaggcaggtgacagtccaggaattcgctcttttctttaccatctttgatgagaccaagtcctggtacttcacggaaaacatggagcgcaattgcagagccccctgtaacatacagatggaggaccctacctttaaggaaaattatcggttccacgcaatcaacggatacattatggatacactccctggccttgtgatggctcaggaccaacgaatcaggtggtacctcctcagcatgggttctaatgagaacatacactccattcacttttcaggacatgtgttcactgtccggaagaaagaagagtataagatggccctctacaatttgtatccaggcgtgtttgagaccgttgaaatgcttccctctaaagctggcatctggagagtagagtgcttgatcggagaacatcttcacgcaggtatgagcaccttgttcctcgtgtacagcaacaaatgtcagaccccacttggcatggccagtggacacattcgcgactttcagatcacagcatctggccagtatggacaatgggccccaaagttggctcgcctccattactccggtagcataaatgcgtggtccactaaagaacctttcagctggattaaggtcgatcttcttgcccccatgatcatccacggcattaagacacagggagcgaggcagaaattctcctccctctacatctcacagttcattattatgtatagtttggacggcaagaagtggcaaacttatagaggtaacagtactggaacactcatggtgttcttcggcaacgttgatagctctggcatcaaacacaacatctttaatcctcccataatagctcggtacatcagattgcatccgacccactacagcattaggagtacactccgaatggagcttatgggttgcgacttgaattcctgttcaatgccactcggaatggagtctaaagccatctctgatgcacagataaccgccagtagctactttacgaacatgtttgctacgtggtcaccctctaaggcaaggcttcatttgcaaggccggtctaatgcctggagacctcaggtgaacaacccgaaagaatggctccaggtggactttcagaagaccatgaaagtaacaggtgtcactactcagggagttaagtccttgctcaccagcatgtatgtgaaggagttccttatttcctcatcacaagatggccaccagtggaccctcttctttcagaatggtaaggtcaaagtgtttcagggcaatcaagacagcttcacacccgtggtgaacagtcttgatcctccactcttgacacgataccttcgaatccatccacagtcttgggcgcaccagattgcattgcgcatggaagtacttggatgcgaggctcaggacctctac

SEQ ID NO: 2478 - protein, 1457 aa, synthetic construct
  REGION 1..1457: note = Variant of human B-domain deleted Factor VIII
MQIELSTCFFLCLLRFCFSATRRYYLGAVELSWDYMQSDLGELPVDARFPPRVPKSFPFNTSVVYKKTLFVEFTDHLFNIAKPRPPWMGLLGPTIQAEVYDTVVITLKNMASHPVSLHAVGVSYWKASEGAEYDDQTSQREKEDDKVFPGGSHTYVWQVLKENGPMASDPLCLTYSYLSHVDLVKDLNSGLIGALLVCREGSLAKEKTQTLHKFILLFAVFDEGKSWHSETKNSLMQDRDAASARAWPKMHTVNGYVNRSLPGLIGCHRKSVYWHVIGMGTTPEVHSIFLEGHTFLVRNHRQASLEISPITFLTAQTLLMDLGQFLLFCHISSHQHDGMEAYVKVDSCPEEPQLRMKNNEEAEDYDDDLTDSEMDVVRFDDDNSPSFIQIRSVAKKHPKTWVHYIAAEEEDWDYAPLVLAPDDRSYKSQYLNNGPQRIGRKYKKVRFMAYTDETFKTREAIQHESGILGPLLYGEVGDTLLIIFKNQASRPYNIYPHGITDVRPLYSRRLPKGVKHLKDFPILPGEIFKYKWTVTVEDGPTKSDPRCLTRYYSSFVNMERDLASGLIGPLLICYKESVDQRGNQIMSDKRNVILFSVFDENRSWYLTENIQRFLPNPAGVQLEDPEFQASNIMHSINGYVFDSLQLSVCLHEVAYWYILSIGAQTDFLSVFFSGYTFKHKMVYEDTLTLFPFSGETVFMSMENPGLWILGCHNSDFRNRGMTALLKVSSCDKNTGDYYEDSYEDISAYLLSKNNAIEPRSFSQNPPVLKRHQREITRTTLQSDQEEIDYDDTISVEMKKEDFDIYDEDENQSPRSFQKKTRHYFIAAVERLWDYGMSSSPHVLRNRAQSGSVPQFKKVVFQEFTDGSFTQPLYRGELNEHLGLLGPYIRAEVEDNIMVTFRNQASRPYSFYSSLISYEEDQRQGAEPRKNFVKPNETKTYFWKVQHHMAPTKDEFDCKAWAYFSDVDLEKDVHSGLIGPLLVCHTNTLNPAHGRQVTVQEFALFFTIFDETKSWYFTENMERNCRAPCNIQMEDPTFKENYRFHAINGYIMDTLPGLVMAQDQRIRWYLLSMGSNENIHSIHFSGHVFTVRKKEEYKMALYNLYPGVFETVEMLPSKAGIWRVECLIGEHLHAGMSTLFLVYSNKCQTPLGMASGHIRDFQITASGQYGQWAPKLARLHYSGSINAWSTKEPFSWIKVDLLAPMIIHGIKTQGARQKFSSLYISQFIIMYSLDGKKWQTYRGNSTGTLMVFFGNVDSSGIKHNIFNPPIIARYIRLHPTHYSIRSTLRMELMGCDLNSCSMPLGMESKAISDAQITASSYFTNMFATWSPSKARLHLQGRSNAWRPQVNNPKEWLQVDFQKTMKVTGVTTQGVKSLLTSMYVKEFLISSSQDGHQWTLFFQNGKVKVFQGNQDSFTPVVNSLDPPLLTRYLRIHPQSWAHQIALRMEVLGCEAQDLY

SEQ ID NO: 2479 - DNA, 4371 bp, synthetic construct
  misc_feature 1..4371: note = Variant of human B-domain deleted Factor VIII
  source 1..4371: mol_type = other DNA
atgcagattgaactgtctacctgcttcttcctctgtttgctgaggttctgctttagcgccactagacggtactaccttggcgctgtggagctgtcctgggactatatgcagagtgatttgggagagcttcccgtcgacgcacgatttcctcctcgcgttccaaagtcatttcccttcaacacaagcattgtgtacaagaagacgctcttcgtcgaattcaccgatcacctgttcaatatcgccaaacccagaccaccatggatgggtcttttggggcctaccatacaagcggaggtgtatgacacagttgttatcactctcaagaacatggcttctcatccggtaagtcttcacgcagtgggcgtgtcctactggaaagcttcagaaggagccgagtatgatgatcagacatcccagagggagaaagaagacgacaaggtatttccaggtgggtctcatacctatgtgtggcaagtgctcaaagagaatggccctatggcaagcgatccgctctgtttgacttacagctacctttcacacgttgacctcgtcaaggacctcaactccgggttgattggagccttgttggtatgcagggaaggatctcttgccaaagagaagacacagaccctccacaagtttatccttctctttgctgtgttcgatgagggcaaaagttggcatagcgaaacgaagaattccctcatgcaggatcgcgacgcagccagcgccagagcttggcccaagatgcacactgtgaacggatatgtcaataggtcacttcctggcttgattgggtgtcatcggaaaagtgtctactggcacgtgatcggaatggggacaacaccagaggtccactccatatttctcgaaggccataccttccttgttcgaaaccacagacaggcatccttggagatctctcccattacctttctcactgcccaaacgctccttatggacttgggtcagttccttctcttctgccatatcagctcacaccagcatgatggtatggaagcttatgtgaaagtcgacagttgtcctgaggagccacagttgcgcatgaagaataatgaagaagccgaggattacgacgacgatctcaccgattctgagatggacgtggtgaggtttgatgacgacaactctccctccttcattcaaatccggagcgtggcgaagaaacaccccaagacttgggtccactatatagcggcggaagaggaggattgggattacgctcctcttgtattggcaccagatgaccgctcatacaaaagccagtacctcaacaacggaccgcagagaattggccggaagtataagaaagtgcgatttatggcctatacagacgaaacctttaagacaagggaggccatccagcatgagagtgggattttgggacctcttctttacggcgaagttggtgataccctcctcatcatcttcaagaatcaagcttctcgcccctataacatttacccacacgggatcactgacgttaggcctttgtatagcagaagacttcccaaaggcgtgaagcatctcaaagacttccccattttgccaggcgagatctttaagtacaaatggaccgtcacagtggaagatggaccgactaaatcagaccctcgatgccttacgcggtactattcctccttcgtgaatatggagagagatttggcaagcggactcataggaccactcctcatctgttacaaggaatctgtagaccagaggggtaaccagattatgagtgataaacgcaatgtgatcctttttagcgtcttcgacgagaaccggtcctggtacttgaccgagaatatacaaaggttccttcccaaccccgcaggcgttcagttggaagaccctgagtttcaggccagcaatattatgcactcaatcaacggctatgtgtttgatagtctccagctttctgtttgcctccatgaagtagcctattggtacatcttgtcaattggtgctcaaacagacttcctctccgtcttcttctccggctacacctttaagcacaagatggtgtatgaggacactctcacactctttccattttctggagaaaccgtgttcatgagcatggagaatccaggcctttggatcttgggttgccacaacagtgattttcgcaatcggggaatgactgctctcctcaaagtcagcagctgtgataagaacacaggcgactattacgaagattcttacgaggacataagtgcctacttgttgtccaagaataacgccattgagcccagatcattctcccagaatcctcccgtgcttaaaaggcatcagcgcgaaatcaccagaactactcttcagtctgatcaagaggagattgactatgacgacaccataagcgtggaaatgaagaaggaggatttcgatatctatgacgaagatgagaaccagtctccgcggagctttcagaagaagacgcgacactacttcattgcagcagtcgaaaggctttgggactacggtatgtcatcatcccctcatgtgttgcgcaatagagctcagagtggaagtgttccacagttcaagaaagtcgtctttcaagagtttacagatggcagcttcacacagcctctctatcggggcgagcttaacgaacatttgggactccttggtccctatatccgagccgaagtggaggacaacattatggttacctttaggaatcaagcctctcgcccctacagcttctactcctccctcatcagttatgaggaggatcagagacaaggcgctgaaccacggaagaactttgtgaaaccgaatgagacgaagacctacttctggaaagtacagcaccacatggcccccacaaaagacgaattcgattgcaaagcatgggcgtatttttcagacgttgacttggagaaagatgtacattcaggacttattggtcctttgttggtgtgtcacactaacactctcaatccagcccatggcaggcaggtgacagtccaggaattcgctcttttctttaccatctttgatgagaccaagtcctggtacttcacggaaaacatggagcgcaattgcagagccccctgtaacatacagatggaggaccctacctttaaggaaaattatcggttccacgcaatcaacggatacattatggatacactccctggccttgtgatggctcaggaccaacgaatcaggtggtacctcctcagcatgggttctaatgagaacatacactccattcacttttcaggacatgtgttcactgtccggaagaaagaagagtataagatggccctctacaatttgtatccaggcgtgtttgagaccgttgaaatgcttccctctaaagctggcatctggagagtagagtgcttgatcggagaacatcttcacgcaggtatgagcaccttgttcctcgtgtacagcaacaaatgtcagaccccacttggcatggccagtggacacattcgcgactttcagatcacagcatctggccagtatggacaatgggccccaaagttggctcgcctccattactccggtagcataaatgcgtggtccactaaagaacctttcagctggattaaggtcgatcttcttgcccccatgatcatccacggcattaagacacagggagcgaggcagaaattctcctccctctacatctcacagttcattattatgtatagtttggacggcaagaagtggcaaacttatagaggtaacagtactggaacactcatggtgttcttcggcaacgttgatagctctggcatcaaacacaacatctttaatcctcccataatagctcggtacatcagattgcatccgacccactacagcattaggagtacactccgaatggagcttatgggttgcgacttgaattcctgttcaatgccactcggaatggagtctaaagccatctctgatgcacagataaccgccagtagctactttacgaacatgtttgctacgtggtcaccctctaaggcaaggcttcatttgcaaggccggtctaatgcctggagacctcaggtgaacaacccgaaagaatggctccaggtggactttcagaagaccatgaaagtaacaggtgtcactactcagggagttaagtccttgctcaccagcatgtatgtgaaggagttccttatttcctcatcacaagatggccaccagtggaccctcttctttcagaatggtaaggtcaaagtgtttcagggcaatcaagacagcttcacacccgtggtgaacagtcttgatcctccactcttgacacgataccttcgaatccatccacagtcttgggttcaccagattgcattgcgcatggaagtacttggatgcgaggctcaggacctctac

SEQ ID NO: 2480 - protein, 1457 aa, synthetic construct
  REGION 1..1457: note = Variant of human B-domain deleted Factor VIII
MQIELSTCFFLCLLRFCFSATRRYYLGAVELSWDYMQSDLGELPVDARFPPRVPKSFPFNTSIVYKKTLFVEFTDHLFNIAKPRPPWMGLLGPTIQAEVYDTVVITLKNMASHPVSLHAVGVSYWKASEGAEYDDQTSQREKEDDKVFPGGSHTYVWQVLKENGPMASDPLCLTYSYLSHVDLVKDLNSGLIGALLVCREGSLAKEKTQTLHKFILLFAVFDEGKSWHSETKNSLMQDRDAASARAWPKMHTVNGYVNRSLPGLIGCHRKSVYWHVIGMGTTPEVHSIFLEGHTFLVRNHRQASLEISPITFLTAQTLLMDLGQFLLFCHISSHQHDGMEAYVKVDSCPEEPQLRMKNNEEAEDYDDDLTDSEMDVVRFDDDNSPSFIQIRSVAKKHPKTWVHYIAAEEEDWDYAPLVLAPDDRSYKSQYLNNGPQRIGRKYKKVRFMAYTDETFKTREAIQHESGILGPLLYGEVGDTLLIIFKNQASRPYNIYPHGITDVRPLYSRRLPKGVKHLKDFPILPGEIFKYKWTVTVEDGPTKSDPRCLTRYYSSFVNMERDLASGLIGPLLICYKESVDQRGNQIMSDKRNVILFSVFDENRSWYLTENIQRFLPNPAGVQLEDPEFQASNIMHSINGYVFDSLQLSVCLHEVAYWYILSIGAQTDFLSVFFSGYTFKHKMVYEDTLTLFPFSGETVFMSMENPGLWILGCHNSDFRNRGMTALLKVSSCDKNTGDYYEDSYEDISAYLLSKNNAIEPRSFSQNPPVLKRHQREITRTTLQSDQEEIDYDDTISVEMKKEDFDIYDEDENQSPRSFQKKTRHYFIAAVERLWDYGMSSSPHVLRNRAQSGSVPQFKKVVFQEFTDGSFTQPLYRGELNEHLGLLGPYIRAEVEDNIMVTFRNQASRPYSFYSSLISYEEDQRQGAEPRKNFVKPNETKTYFWKVQHHMAPTKDEFDCKAWAYFSDVDLEKDVHSGLIGPLLVCHTNTLNPAHGRQVTVQEFALFFTIFDETKSWYFTENMERNCRAPCNIQMEDPTFKENYRFHAINGYIMDTLPGLVMAQDQRIRWYLLSMGSNENIHSIHFSGHVFTVRKKEEYKMALYNLYPGVFETVEMLPSKAGIWRVECLIGEHLHAGMSTLFLVYSNKCQTPLGMASGHIRDFQITASGQYGQWAPKLARLHYSGSINAWSTKEPFSWIKVDLLAPMIIHGIKTQGARQKFSSLYISQFIIMYSLDGKKWQTYRGNSTGTLMVFFGNVDSSGIKHNIFNPPIIARYIRLHPTHYSIRSTLRMELMGCDLNSCSMPLGMESKAISDAQITASSYFTNMFATWSPSKARLHLQGRSNAWRPQVNNPKEWLQVDFQKTMKVTGVTTQGVKSLLTSMYVKEFLISSSQDGHQWTLFFQNGKVKVFQGNQDSFTPVVNSLDPPLLTRYLRIHPQSWVHQIALRMEVLGCEAQDLY

SEQ ID NO: 2481 - DNA, 4371 bp, synthetic construct
  misc_feature 1..4371: note = Variant of human B-domain deleted Factor VIII
  source 1..4371: mol_type = other DNA
atgcagattgaactgtctacctgcttcttcctctgtttgctgaggttctgctttagcgccactagacggtactaccttggcgctgtggagctgtcctgggactatatgcagagtgatttgggagagcttcccgtcgacgcacgatttcctcctcgcgttccaaagtcatttcccttcaacacaagcgtggtgtacaagaagacgctcttcgtcgaattcaccgatcacctgttcaatatcgccaaacccagaccaccatggatgggtcttttggggcctaccatacaagcggaggtgtatgacacagttgttatcactctcaagaacatggcttctcatccggtaagtcttcacgcagtgggcgtgtcctactggaaagcttcagaaggagccgagtatgatgatcagacatcccagagggagaaagaagacgacaaggtatttccaggtgggtctcatacctatgtgtggcaagtgctcaaagagaatggccctatggcaagcgatccgctctgtttgacttacagctacctttcacacgttgacctcgtcaaggacctcaactccgggttgattggagccttgttggtatgcagggaaggatctcttgccaaagagaagacacagaccctccacaagtttatccttctctttgctgtgttcgatgagggcaaaagttggcatagcgaaacgaagaattccctcatgcaggatcgcgacgcagccagcgccagagcttggcccaagatgcacactgtgaacggatatgtcaataggtcacttcctggcttgattgggtgtcatcggaaaagtgtctactggcacgtgatcggaatggggacaacaccagaggtccactccatatttctcgaaggccataccttccttgttcgaaaccacagacaggcatccttggagatctctcccattacctttctcactgcccaaacgctccttatggacttgggtcagttccttctcttctgccatatcagctcacaccagcatgatggtatggaagcttatgtgaaagtcgacagttgtcctgaggagccacagttgcgcatgaagaataatgaagaagccgaggattacgacgacgatctcaccgattctgagatggacgtggtgaggtttgatgacgacaactctccctccttcattcaaatccggagccatgcgaagaaacaccccaagacttgggtccactatatagcggcggaagaggaggattgggattacgctcctcttgtattggcaccagatgaccgctcatacaaaagccagtacctcaacaacggaccgcagagaattggccggaagtataagaaagtgcgatttatggcctatacagacgaaacctttaagacaagggaggccatccagcatgagagtgggattttgggacctcttctttacggcgaagttggtgataccctcctcatcatcttcaagaatcaagcttctcgcccctataacatttacccacacgggatcactgacgttaggcctttgtatagcagaagacttcccaaaggcgtgaagcatctcaaagacttccccattttgccaggcgagatctttaagtacaaatggaccgtcacagtggaagatggaccgactaaatcagaccctcgatgccttacgcggtactattcctccttcgtgaatatggagagagatttggcaagcggactcataggaccactcctcatctgttacaaggaatctgtagaccagaggggtaaccagattatgagtgataaacgcaatgtgatcctttttagcgtcttcgacgagaaccggtcctggtacttgaccgagaatatacaaaggttccttcccaaccccgcaggcgttcagttggaagaccctgagtttcaggccagcaatattatgcactcaatcaacggctatgtgtttgatagtctccagctttctgtttgcctccatgaagtagcctattggtacatcttgtcaattggtgctcaaacagacttcctctccgtcttcttctccggctacacctttaagcacaagatggtgtatgaggacactctcacactctttccattttctggagaaaccgtgttcatgagcatggagaatccaggcctttggatcttgggttgccacaacagtgattttcgcaatcggggaatgactgctctcctcaaagtcagcagctgtgataagaacacaggcgactattacgaagattcttacgaggacataagtgcctacttgttgtccaagaataacgccattgagcccagatcattctcccagaatcctcccgtgcttaaaaggcatcagcgcgaaatcaccagaactactcttcagtctgatcaagaggagattgactatgacgacaccataagcgtggaaatgaagaaggaggatttcgatatctatgacgaagatgagaaccagtctccgcggagctttcagaagaagacgcgacactacttcattgcagcagtcgaaaggctttgggactacggtatgtcatcatcccctcatgtgttgcgcaatagagctcagagtggaagtgttccacagttcaagaaagtcgtctttcaagagtttacagatggcagcttcacacagcctctctatcggggcgagcttaacgaacatttgggactccttggtccctatatccgagccgaagtggaggacaacattatggttacctttaggaatcaagcctctcgcccctacagcttctactcctccctcatcagttatgaggaggatcagagacaaggcgctgaaccacggaagaactttgtgaaaccgaatgagacgaagacctacttctggaaagtacagcaccacatggcccccacaaaagacgaattcgattgcaaagcatgggcgtatttttcagacgttgacttggagaaagatgtacattcaggacttattggtcctttgttggtgtgtcacactaacactctcaatccagcccatggcaggcaggtgacagtccaggaattcgctcttttctttaccatctttgatgagaccaagtcctggtacttcacggaaaacatggagcgcaattgcagagccccctgtaacatacagatggaggaccctacctttaaggaaaattatcggttccacgcaatcaacggatacattatggatacactccctggccttgtgatggctcaggaccaacgaatcaggtggtacctcctcagcatgggttctaatgagaacatacactccattcacttttcaggacatgtgttcactgtccggaagaaagaagagtataagatggccctctacaatttgtatccaggcgtgtttgagaccgttgaaatgcttccctctaaagctggcatctggagagtagagtgcttgatcggagaacatcttcacgcaggtatgagcaccttgttcctcgtgtacagcaacaaatgtcagaccccacttggcatggccagtggacacattcgcgactttcagatcacagcatctggccagtatggacaatgggccccaaagttggctcgcctccattactccggtagcataaatgcgtggtccactaaagaacctttcagctggattaaggtcgatcttcttgcccccatgatcatccacggcattaagacacagggagcgaggcagaaattctcctccctctacatctcacagttcattattatgtatagtttggacggcaagaagtggcaaacttatagaggtaacagtactggaacactcatggtgttcttcggcaacgttgatagctctggcatcaaacacaacatctttaatcctcccataatagctcggtacatcagattgcatccgacccactacagcattaggagtacactccgaatggagcttatgggttgcgacttgaattcctgttcaatgccactcggaatggagtctaaagccatctctgatgcacagataaccgccagtagctactttacgaacatgtttgctacgtggtcaccctctaaggcaaggcttcatttgcaaggccggtctaatgcctggagacctcaggtgaacaacccgaaagaatggctccaggtggactttcagaagaccatgaaagtaacaggtgtcactactcagggagttaagtccttgctcaccagcatgtatgtgaaggagttccttatttcctcatcacaagatggccaccagtggaccctcttctttcagaatggtaaggtcaaagtgtttcagggcaatcaagacagcttcacacccgtggtgaacagtcttgatcctccactcttgacacgataccttcgaatccatccacagtcttgggttcaccagattgcattgcgcatggaagtacttggatgcgaggctcaggacctctac

SEQ ID NO: 2482 - protein, 1457 aa, synthetic construct
  REGION 1..1457: note = Variant of human B-domain deleted Factor VIII
MQIELSTCFFLCLLRFCFSATRRYYLGAVELSWDYMQSDLGELPVDARFPPRVPKSFPFNTSVVYKKTLFVEFTDHLFNIAKPRPPWMGLLGPTIQAEVYDTVVITLKNMASHPVSLHAVGVSYWKASEGAEYDDQTSQREKEDDKVFPGGSHTYVWQVLKENGPMASDPLCLTYSYLSHVDLVKDLNSGLIGALLVCREGSLAKEKTQTLHKFILLFAVFDEGKSWHSETKNSLMQDRDAASARAWPKMHTVNGYVNRSLPGLIGCHRKSVYWHVIGMGTTPEVHSIFLEGHTFLVRNHRQASLEISPITFLTAQTLLMDLGQFLLFCHISSHQHDGMEAYVKVDSCPEEPQLRMKNNEEAEDYDDDLTDSEMDVVRFDDDNSPSFIQIRSHAKKHPKTWVHYIAAEEEDWDYAPLVLAPDDRSYKSQYLNNGPQRIGRKYKKVRFMAYTDETFKTREAIQHESGILGPLLYGEVGDTLLIIFKNQASRPYNIYPHGITDVRPLYSRRLPKGVKHLKDFPILPGEIFKYKWTVTVEDGPTKSDPRCLTRYYSSFVNMERDLASGLIGPLLICYKESVDQRGNQIMSDKRNVILFSVFDENRSWYLTENIQRFLPNPAGVQLEDPEFQASNIMHSINGYVFDSLQLSVCLHEVAYWYILSIGAQTDFLSVFFSGYTFKHKMVYEDTLTLFPFSGETVFMSMENPGLWILGCHNSDFRNRGMTALLKVSSCDKNTGDYYEDSYEDISAYLLSKNNAIEPRSFSQNPPVLKRHQREITRTTLQSDQEEIDYDDTISVEMKKEDFDIYDEDENQSPRSFQKKTRHYFIAAVERLWDYGMSSSPHVLRNRAQSGSVPQFKKVVFQEFTDGSFTQPLYRGELNEHLGLLGPYIRAEVEDNIMVTFRNQASRPYSFYSSLISYEEDQRQGAEPRKNFVKPNETKTYFWKVQHHMAPTKDEFDCKAWAYFSDVDLEKDVHSGLIGPLLVCHTNTLNPAHGRQVTVQEFALFFTIFDETKSWYFTENMERNCRAPCNIQMEDPTFKENYRFHAINGYIMDTLPGLVMAQDQRIRWYLLSMGSNENIHSIHFSGHVFTVRKKEEYKMALYNLYPGVFETVEMLPSKAGIWRVECLIGEHLHAGMSTLFLVYSNKCQTPLGMASGHIRDFQITASGQYGQWAPKLARLHYSGSINAWSTKEPFSWIKVDLLAPMIIHGIKTQGARQKFSSLYISQFIIMYSLDGKKWQTYRGNSTGTLMVFFGNVDSSGIKHNIFNPPIIARYIRLHPTHYSIRSTLRMELMGCDLNSCSMPLGMESKAISDAQITASSYFTNMFATWSPSKARLHLQGRSNAWRPQVNNPKEWLQVDFQKTMKVTGVTTQGVKSLLTSMYVKEFLISSSQDGHQWTLFFQNGKVKVFQGNQDSFTPVVNSLDPPLLTRYLRIHPQSWVHQIALRMEVLGCEAQDLY

SEQ ID NO: 2483 - DNA, 4371 bp, synthetic construct
  misc_feature 1..4371: note = Variant of human B-domain deleted Factor VIII
  source 1..4371: mol_type = other DNA
atgcagattgaactgtctacctgcttcttcctctgtttgctgaggttctgctttagcgccactagacggtactaccttggcgctgtggagctgtcctgggactatatgcagagtgatttgggagagcttcccgtcgacgcacgatttcctcctcgcgttccaaagtcatttcccttcaacacaagcgtggtgtacaagaagacgctcttcgtcgaattcaccgatcacctgttcaatatcgccaaacccagaccaccatggatgggtcttttggggcctaccatacaagcggaggtgtatgacacagttgttatcactctcaagaacatggcttctcatccggtaagtcttcacgcagtgggcgtgtcctactggaaagcttcagaaggagccgagtatgatgatcagacatcccagagggagaaagaagacgacaaggtatttccaggtgggtctcatacctatgtgtggcaagtgctcaaagagaatggccctatggcaagcgatccgctctgtttgacttacagctacctttcacacgttgacctcgtcaaggacctcaactccgggttgattggagccttgttggtatgcagggaaggatctcttgccaaagagaagacacagaccctccacaagtttatccttctctttgctgtgttcgatgagggcaaaagttggcatagcgaaacgaagaattccctcatgcaggatcgcgacgcagccagcgccagagcttggcccaagatgcacactgtgaacggatatgtcaataggtcacttcctggcttgattgggtgtcatcggaaaagtgtctactggcacgtgatcggaatggggacaacaccagaggtccactccatatttctcgaaggccataccttccttgttcgaaaccacagacaggcatccttggagatctctcccattacctttctcactgcccaaacgctccttatggacttgggtcagttccttctcttctgccatatcagctcacaccagcatgatggtatggaagcttatgtgaaagtcgacagttgtcctgaggagccacagttgcgcatgaagaataatgaagaagccgaggattacgacgacgatctcaccgattctgagatggacgtggtgaggtttgatgacgacaactctccctccttcattcaaatccggagcgtggcgaagaaacaccccaagacttgggtccactatatagcggcggaagaggaggattgggattacgctcctcttgtattggcaccagatgaccgctcatacaaaagccagtacctcaacaacggaccgcagagaattggccggaagtataagaaagtgcgatttatggcctatacagacgaaacctttaagacaagggaggccatccagcatgagagtgggattttgggacctcttctttacggcgaagttggtgataccctcctcatcatcttcaagaatcaagcttctcgcccctataacatttacccacacgggatcactgacgttaggcctttgtatagcagaagacttcccaaaggcgtgaagcatctcaaagacttccccattttgccaggcgagatctttaagtacaaatggaccgtcacagtggaagatggaccgactaaatcagaccctcgatgccttacgcggtactattcctccttcgtgaatagggagagagatttggcaagcggactcataggaccactcctcatctgttacaaggaatctgtagaccagaggggtaaccagattatgagtgataaacgcaatgtgatcctttttagcgtcttcgacgagaaccggtcctggtacttgaccgagaatatacaaaggttccttcccaaccccgcaggcgttcagttggaagaccctgagtttcaggccagcaatattatgcactcaatcaacggctatgtgtttgatagtctccagctttctgtttgcctccatgaagtagcctattggtacatcttgtcaattggtgctcaaacagacttcctctccgtcttcttctccggctacacctttaagcacaagatggtgtatgaggacactctcacactctttccattttctggagaaaccgtgttcatgagcatggagaatccaggcctttggatcttgggttgccacaacagtgattttcgcaatcggggaatgactgctctcctcaaagtcagcagctgtgataagaacacaggcgactattacgaagattcttacgaggacataagtgcctacttgttgtccaagaataacgccattgagcccagatcattctcccagaatcctcccgtgcttaaaaggcatcagcgcgaaatcaccagaactactcttcagtctgatcaagaggagattgactatgacgacaccataagcgtggaaatgaagaaggaggatttcgatatctatgacgaagatgagaaccagtctccgcggagctttcagaagaagacgcgacactacttcattgcagcagtcgaaaggctttgggactacggtatgtcatcatcccctcatgtgttgcgcaatagagctcagagtggaagtgttccacagttcaagaaagtcgtctttcaagagtttacagatggcagcttcacacagcctctctatcggggcgagcttaacgaacatttgggactccttggtccctatatccgagccgaagtggaggacaacattatggttacctttaggaatcaagcctctcgcccctacagcttctactcctccctcatcagttatgaggaggatcagagacaaggcgctgaaccacggaagaactttgtgaaaccgaatgagacgaagacctacttctggaaagtacagcaccacatggcccccacaaaagacgaattcgattgcaaagcatgggcgtatttttcagacgttgacttggagaaagatgtacattcaggacttattggtcctttgttggtgtgtcacactaacactctcaatccagcccatggcaggcaggtgacagtccaggaattcgctcttttctttaccatctttgatgagaccaagtcctggtacttcacggaaaacatggagcgcaattgcagagccccctgtaacatacagatggaggaccctacctttaaggaaaattatcggttccacgcaatcaacggatacattatggatacactccctggccttgtgatggctcaggaccaacgaatcaggtggtacctcctcagcatgggttctaatgagaacatacactccattcacttttcaggacatgtgttcactgtccggaagaaagaagagtataagatggccctctacaatttgtatccaggcgtgtttgagaccgttgaaatgcttccctctaaagctggcatctggagagtagagtgcttgatcggagaacatcttcacgcaggtatgagcaccttgttcctcgtgtacagcaacaaatgtcagaccccacttggcatggccagtggacacattcgcgactttcagatcacagcatctggccagtatggacaatgggccccaaagttggctcgcctccattactccggtagcataaatgcgtggtccactaaagaacctttcagctggattaaggtcgatcttcttgcccccatgatcatccacggcattaagacacagggagcgaggcagaaattctcctccctctacatctcacagttcattattatgtatagtttggacggcaagaagtggcaaacttatagaggtaacagtactggaacactcatggtgttcttcggcaacgttgatagctctggcatcaaacacaacatctttaatcctcccataatagctcggtacatcagattgcatccgacccactacagcattaggagtacactccgaatggagcttatgggttgcgacttgaattcctgttcaatgccactcggaatggagtctaaagccatctctgatgcacagataaccgccagtagctactttacgaacatgtttgctacgtggtcaccctctaaggcaaggcttcatttgcaaggccggtctaatgcctggagacctcaggtgaacaacccgaaagaatggctccaggtggactttcagaagaccatgaaagtaacaggtgtcactactcagggagttaagtccttgctcaccagcatgtatgtgaaggagttccttatttcctcatcacaagatggccaccagtggaccctcttctttcagaatggtaaggtcaaagtgtttcagggcaatcaagacagcttcacacccgtggtgaacagtcttgatcctccactcttgacacgataccttcgaatccatccacagtcttgggttcaccagattgcattgcgcatggaagtacttggatgcgaggctcaggacctctac

SEQ ID NO: 2484 - protein, 1457 aa, synthetic construct
  REGION 1..1457: note = Variant of human B-domain deleted Factor VIII
MQIELSTCFFLCLLRFCFSATRRYYLGAVELSWDYMQSDLGELPVDARFPPRVPKSFPFNTSVVYKKTLFVEFTDHLFNIAKPRPPWMGLLGPTIQAEVYDTVVITLKNMASHPVSLHAVGVSYWKASEGAEYDDQTSQREKEDDKVFPGGSHTYVWQVLKENGPMASDPLCLTYSYLSHVDLVKDLNSGLIGALLVCREGSLAKEKTQTLHKFILLFAVFDEGKSWHSETKNSLMQDRDAASARAWPKMHTVNGYVNRSLPGLIGCHRKSVYWHVIGMGTTPEVHSIFLEGHTFLVRNHRQASLEISPITFLTAQTLLMDLGQFLLFCHISSHQHDGMEAYVKVDSCPEEPQLRMKNNEEAEDYDDDLTDSEMDVVRFDDDNSPSFIQIRSVAKKHPKTWVHYIAAEEEDWDYAPLVLAPDDRSYKSQYLNNGPQRIGRKYKKVRFMAYTDETFKTREAIQHESGILGPLLYGEVGDTLLIIFKNQASRPYNIYPHGITDVRPLYSRRLPKGVKHLKDFPILPGEIFKYKWTVTVEDGPTKSDPRCLTRYYSSFVNRERDLASGLIGPLLICYKESVDQRGNQIMSDKRNVILFSVFDENRSWYLTENIQRFLPNPAGVQLEDPEFQASNIMHSINGYVFDSLQLSVCLHEVAYWYILSIGAQTDFLSVFFSGYTFKHKMVYEDTLTLFPFSGETVFMSMENPGLWILGCHNSDFRNRGMTALLKVSSCDKNTGDYYEDSYEDISAYLLSKNNAIEPRSFSQNPPVLKRHQREITRTTLQSDQEEIDYDDTISVEMKKEDFDIYDEDENQSPRSFQKKTRHYFIAAVERLWDYGMSSSPHVLRNRAQSGSVPQFKKVVFQEFTDGSFTQPLYRGELNEHLGLLGPYIRAEVEDNIMVTFRNQASRPYSFYSSLISYEEDQRQGAEPRKNFVKPNETKTYFWKVQHHMAPTKDEFDCKAWAYFSDVDLEKDVHSGLIGPLLVCHTNTLNPAHGRQVTVQEFALFFTIFDETKSWYFTENMERNCRAPCNIQMEDPTFKENYRFHAINGYIMDTLPGLVMAQDQRIRWYLLSMGSNENIHSIHFSGHVFTVRKKEEYKMALYNLYPGVFETVEMLPSKAGIWRVECLIGEHLHAGMSTLFLVYSNKCQTPLGMASGHIRDFQITASGQYGQWAPKLARLHYSGSINAWSTKEPFSWIKVDLLAPMIIHGIKTQGARQKFSSLYISQFIIMYSLDGKKWQTYRGNSTGTLMVFFGNVDSSGIKHNIFNPPIIARYIRLHPTHYSIRSTLRMELMGCDLNSCSMPLGMESKAISDAQITASSYFTNMFATWSPSKARLHLQGRSNAWRPQVNNPKEWLQVDFQKTMKVTGVTTQGVKSLLTSMYVKEFLISSSQDGHQWTLFFQNGKVKVFQGNQDSFTPVVNSLDPPLLTRYLRIHPQSWVHQIALRMEVLGCEAQDLY

SEQ ID NO: 2485 - DNA, 4371 bp, synthetic construct
  misc_feature 1..4371: note = Variant of human B-domain deleted Factor VIII
  source 1..4371: mol_type = other DNA
atgcagattgaactgtctacctgcttcttcctctgtttgctgaggttctgctttagcgccactagacggtactaccttggcgctgtggagctgtcctgggactatatgcagagtgatttgggagagcttcccgtcgacgcacgatttcctcctcgcgttccaaagtcatttcccttcaacacaagcagtgtgtacaagaagacgctcttcgtcgaattcaccgatcacctgttcaatatcgccaaacccagaccaccatggatgggtcttttggggcctaccatacaagcggaggtgtatgacacagttgttatcactctcaagaacatggcttctcatccggtaagtcttcacgcagtgggcgtgtcctactggaaagcttcagaaggagccgagtatgatgatcagacatcccagagggagaaagaagacgacaaggtatttccaggtgggtctcatacctatgtgtggcaagtgctcaaagagaatggccctatggcaagcgatccgctctgtttgacttacagctacctttcacacgttgacctcgtcaaggacctcaactccgggttgattggagccttgttggtatgcagggaaggatctcttgccaaagagaagacacagaccctccacaagtttatccttctctttgctgtgttcgatgagggcaaaagttggcatagcgaaacgaagaattccctcatgcaggatcgcgacgcagccagcgccagagcttggcccaagatgcacactgtgaacggatatgtcaataggtcacttcctggcttgattgggtgtcatcggaaaagtgtctactggcacgtgatcggaatggggacaacaccagaggtccactccatatttctcgaaggccataccttccttgttcgaaaccacagacaggcatccttggagatctctcccattacctttctcactgcccaaacgctccttatggacttgggtcagttccttctcttctgccatatcagctcacaccagcatgatggtatggaagcttatgtgaaagtcgacagttgtcctgaggagccacagttgcgcatgaagaataatgaagaagccgaggattacgacgacgatctcaccgattctgagatggacgtggtgaggtttgatgacgacaactctccctccttcattcaaatccggagcgtggcgaagaaacaccccaagacttgggtccactatatagcggcggaagaggaggattgggattacgctcctcttgtattggcaccagatgaccgctcatacaaaagccagtacctcaacaacggaccgcagagaattggccggaagtataagaaagtgcgatttatggcctatacagacgaaacctttaagacaagggaggccatccagcatgagagtgggattttgggacctcttctttacggcgaagttggtgataccctcctcatcatcttcaagaatcaagcttctcgcccctataacatttacccacacgggatcactgacgttaggcctttgtatagcagaagacttcccaaaggcgtgaagcatctcaaagacttccccattttgccaggcgagatctttaagtacaaatggaccgtcacagtggaagatggaccgactaaatcagaccctcgatgccttacgcggtactattcctccttcgtgaatatggagagagatttggcaagcggactcataggaccactcctcatctgttacaaggaatctgtagaccagaggggtaaccagattatgagtgataaacgcaatgtgatcctttttagcgtcttcgacgagaaccggtcctggtacttgaccgagaatatacaaaggttccttcccaaccccgcaggcgttcagttggaagaccctgagtttcaggccagcaatattatgcactcaatcaacggctatgtgtttgatagtctccagctttctgtttgcctccatgaagtagcctattggtacatcttgtcaattggtgctcaaacagacttcctctccgtcttcttctccggctacacctttaagcacaagatggtgtatgaggacactctcacactctttccattttctggagaaaccgtgttcatgagcatggagaatccaggcctttggatcttgggttgccacaacagtgattttcgcaatcggggaatgactgctctcctcaaagtcagcagctgtgataagaacacaggcgactattacgaagattcttacgaggacataagtgcctacttgttgtccaagaataacgccattgagcccagatcattctcccagaatcctcccgtgcttaaaaggcatcagcgcgaaatcaccagaactactcttcagtctgatcaagaggagattgactatgacgacaccataagcgtggaaatgaagaaggaggatttcgatatctatgacgaagatgagaaccagtctccgcggagctttcagaagaagacgcgacactacttcattgcagcagtcgaaaggctttgggactacggtatgtcatcatcccctcatgtgttgcgcaatagagctcagagtggaagtgttccacagttcaagaaagtcgtctttcaagagtttacagatggcagcttcacacagcctctctatcggggcgagcttaacgaacatttgggactccttggtccctatatccgagccgaagtggaggacaacattatggttacctttaggaatcaagcctctcgcccctacagcttctactcctccctcatcagttatgaggaggatcagagacaaggcgctgaaccacggaagaactttgtgaaaccgaatgagacgaagacctacttctggaaagtacagcaccacatggcccccacaaaagacgaattcgattgcaaagcatgggcgtatttttcagacgttgacttggagaaagatgtacattcaggacttattggtcctttgttggtgtgtcacactaacactctcaatccagcccatggcaggcaggtgacagtccaggaattcgctcttttctttaccatctttgatgagaccaagtcctggtacttcacggaaaacatggagcgcaattgcagagccccctgtaacatacagatggaggaccctacctttaaggaaaattatcggttccacgcaatcaacggatacattatggatacactccctggccttgtgatggctcaggaccaacgaatcaggtggtacctcctcagcatgggttctaatgagaacatacactccattcacttttcaggacatgtgttcactgtccggaagaaagaagagtataagatggccctctacaatttgtatccaggcgtgtttgagaccgttgaaatgcttccctctaaagctggcatctggagagtagagtgcttgatcggagaacatcttcacgcaggtatgagcaccttgttcctcgtgtacagcaacaaatgtcagaccccacttggcatggccagtggacacattcgcgactttcagatcacagcatctggccagtatggacaatgggccccaaagttggctcgcctccattactccggtagcataaatgcgtggtccactaaagaacctttcagctggattaaggtcgatcttcttgcccccatgatcatccacggcattaagacacagggagcgaggcagaaattctcctccctctacatctcacagttcattattatgtatagtttggacggcaagaagtggcaaacttatagaggtaacagtactggaacactcatggtgttcttcggcaacgttgatagctctggcatcaaacacaacatctttaatcctcccataatagctcggtacatcagattgcatccgacccactacagcattaggagtacactccgaatggagcttatgggttgcgacttgaattcctgttcaatgccactcggaatggagtctaaagccatctctgatgcacagataaccgccagtagctactttacgaacatgtttgctacgtggtcaccctctaaggcaaggcttcatttgcaaggccggtctaatgcctggagacctcaggtgaacaacccgaaagaatggctccaggtggactttcagaagaccatgaaagtaacaggtgtcactactcagggagttaagtccttgctcaccagcatgtatgtgaaggagttccttatttcctcatcacaagatggccaccagtggaccctcttctttcagaatggtaaggtcaaagtgtttcagggcaatcaagacagcttcacacccgtggtgaacagtcttgatcctccactcttgacacgataccttcgaatccatccacagtcttgggttcaccagattgcattgcgcatggaagtacttggatgcgaggctcaggacctctac

SEQ ID NO: 2486 - protein, 1457 aa, synthetic construct
  REGION 1..1457: note = Variant of human B-domain deleted Factor VIII
MQIELSTCFFLCLLRFCFSATRRYYLGAVELSWDYMQSDLGELPVDARFPPRVPKSFPFNTSSVYKKTLFVEFTDHLFNIAKPRPPWMGLLGPTIQAEVYDTVVITLKNMASHPVSLHAVGVSYWKASEGAEYDDQTSQREKEDDKVFPGGSHTYVWQVLKENGPMASDPLCLTYSYLSHVDLVKDLNSGLIGALLVCREGSLAKEKTQTLHKFILLFAVFDEGKSWHSETKNSLMQDRDAASARAWPKMHTVNGYVNRSLPGLIGCHRKSVYWHVIGMGTTPEVHSIFLEGHTFLVRNHRQASLEISPITFLTAQTLLMDLGQFLLFCHISSHQHDGMEAYVKVDSCPEEPQLRMKNNEEAEDYDDDLTDSEMDVVRFDDDNSPSFIQIRSVAKKHPKTWVHYIAAEEEDWDYAPLVLAPDDRSYKSQYLNNGPQRIGRKYKKVRFMAYTDETFKTREAIQHESGILGPLLYGEVGDTLLIIFKNQASRPYNIYPHGITDVRPLYSRRLPKGVKHLKDFPILPGEIFKYKWTVTVEDGPTKSDPRCLTRYYSSFVNMERDLASGLIGPLLICYKESVDQRGNQIMSDKRNVILFSVFDENRSWYLTENIQRFLPNPAGVQLEDPEFQASNIMHSINGYVFDSLQLSVCLHEVAYWYILSIGAQTDFLSVFFSGYTFKHKMVYEDTLTLFPFSGETVFMSMENPGLWILGCHNSDFRNRGMTALLKVSSCDKNTGDYYEDSYEDISAYLLSKNNAIEPRSFSQNPPVLKRHQREITRTTLQSDQEEIDYDDTISVEMKKEDFDIYDEDENQSPRSFQKKTRHYFIAAVERLWDYGMSSSPHVLRNRAQSGSVPQFKKVVFQEFTDGSFTQPLYRGELNEHLGLLGPYIRAEVEDNIMVTFRNQASRPYSFYSSLISYEEDQRQGAEPRKNFVKPNETKTYFWKVQHHMAPTKDEFDCKAWAYFSDVDLEKDVHSGLIGPLLVCHTNTLNPAHGRQVTVQEFALFFTIFDETKSWYFTENMERNCRAPCNIQMEDPTFKENYRFHAINGYIMDTLPGLVMAQDQRIRWYLLSMGSNENIHSIHFSGHVFTVRKKEEYKMALYNLYPGVFETVEMLPSKAGIWRVECLIGEHLHAGMSTLFLVYSNKCQTPLGMASGHIRDFQITASGQYGQWAPKLARLHYSGSINAWSTKEPFSWIKVDLLAPMIIHGIKTQGARQKFSSLYISQFIIMYSLDGKKWQTYRGNSTGTLMVFFGNVDSSGIKHNIFNPPIIARYIRLHPTHYSIRSTLRMELMGCDLNSCSMPLGMESKAISDAQITASSYFTNMFATWSPSKARLHLQGRSNAWRPQVNNPKEWLQVDFQKTMKVTGVTTQGVKSLLTSMYVKEFLISSSQDGHQWTLFFQNGKVKVFQGNQDSFTPVVNSLDPPLLTRYLRIHPQSWVHQIALRMEVLGCEAQDLY

SEQ ID NO: 2487 - DNA, 4371 bp, synthetic construct
  misc_feature 1..4371: note = Variant of human B-domain deleted Factor VIII
  source 1..4371: mol_type = other DNA
atgcagattgaactgtctacctgcttcttcctctgtttgctgaggttctgctttagcgccactagacggtactaccttggcgctgtggagctgtcctgggactatatgcagagtgatttgggagagcttcccgtcgacgcacgatttcctcctcgcgttccaaagtcatttcccttcaacacaagcgtggtgtacaagaagacgctcttcgtcgaattcaccgatcacctgttcaatatcgccaaacccagaccaccatggatgggtcttttggggcctaccatacaagcggaggtgtatgacacagttgttatcactctcaagaacatggcttctcatccggtaagtcttcacgcagtgggcgtgtcctactggaaagcttcagaaggagccgagtatgatgatcagacatcccagagggagaaagaagacgacaaggtatttccaggtgggtctcatacctatgtgtggcaagtgctcaaagagaatggccctatggcaagcgatccgctctgtttgacttacagctacctttcacacgttgacctcgtcaaggacctcaactccgggttgattggagccttgttggtatgcagggaaggatctcttgccaaagagaagacacagaccctccacaagtttatccttctctttgctgtgttcgatgagggcaaaagttggcatagcgaaacgaagaattccctcatgcaggatcgcgacgcagccagcgccagagcttggcccaagatgcacactgtgaacggatatgtcaataggtcacttcctggcttgattgggtgtcatcggaaaagtgtctactggcacgtgatcggaatggggacaacaccagaggtccactccatatttctcgaaggccataccttccttgttcgaaaccacagacaggcatccttggagatctctcccattacctttctcactgcccaaacgctccttatggacttgggtcagttccttctcttctgccatatcagctcacaccagcatgatggtatggaagcttatgtgaaagtcgacagttgtcctgaggagccacagttgcgcatgaagaataatgaagaagccgaggattacgacgacgatctcaccgattctgagatggacgtggtgaggtttgatgacgacaactctccctccttcattcaaatccggagcgtggcgaagaaacaccccaagacttgggtccactatatagcggcggaagaggaggattgggattacgctcctcttgtattggcaccagatgaccgctcatacaaaagccagtacctcaacaacggaccgcagagaattggccggaagtataagaaagtgcgatttatggcctatacagacgaaacctttaagacaagggaggccatccagcatgagagtgggattttgggacctcttctttacggcgaagttggtgataccctcctcatcatcttcaagaatcaagcttctcgcccctataacatttacccacacgggatcactgacgttaggcctttgtatagcagaagacttcccaaaggcgtgaagcatctcaaagacttccccattttgccaggcgagatctttaagtacaaatggaccgtcacagtggaagatggaccgactaaatcagaccctcgatgccttacgcggtactattcctccttcgtgaatactgagagagatttggcaagcggactcataggaccactcctcatctgttacaaggaatctgtagaccagaggggtaaccagattatgagtgataaacgcaatgtgatcctttttagcgtcttcgacgagaaccggtcctggtacttgaccgagaatatacaaaggttccttcccaaccccgcaggcgttcagttggaagaccctgagtttcaggccagcaatattatgcactcaatcaacggctatgtgtttgatagtctccagctttctgtttgcctccatgaagtagcctattggtacatcttgtcaattggtgctcaaacagacttcctctccgtcttcttctccggctacacctttaagcacaagatggtgtatgaggacactctcacactctttccattttctggagaaaccgtgttcatgagcatggagaatccaggcctttggatcttgggttgccacaacagtgattttcgcaatcggggaatgactgctctcctcaaagtcagcagctgtgataagaacacaggcgactattacgaagattcttacgaggacataagtgcctacttgttgtccaagaataacgccattgagcccagatcattctcccagaatcctcccgtgcttaaaaggcatcagcgcgaaatcaccagaactactcttcagtctgatcaagaggagattgactatgacgacaccataagcgtggaaatgaagaaggaggatttcgatatctatgacgaagatgagaaccagtctccgcggagctttcagaagaagacgcgacactacttcattgcagcagtcgaaaggctttgggactacggtatgtcatcatcccctcatgtgttgcgcaatagagctcagagtggaagtgttccacagttcaagaaagtcgtctttcaagagtttacagatggcagcttcacacagcctctctatcggggcgagcttaacgaacatttgggactccttggtccctatatccgagccgaagtggaggacaacattatggttacctttaggaatcaagcctctcgcccctacagcttctactcctccctcatcagttatgaggaggatcagagacaaggcgctgaaccacggaagaactttgtgaaaccgaatgagacgaagacctacttctggaaagtacagcaccacatggcccccacaaaagacgaattcgattgcaaagcatgggcgtatttttcagacgttgacttggagaaagatgtacattcaggacttattggtcctttgttggtgtgtcacactaacactctcaatccagcccatggcaggcaggtgacagtccaggaattcgctcttttctttaccatctttgatgagaccaagtcctggtacttcacggaaaacatggagcgcaattgcagagccccctgtaacatacagatggaggaccctacctttaaggaaaattatcggttccacgcaatcaacggatacattatggatacactccctggccttgtgatggctcaggaccaacgaatcaggtggtacctcctcagcatgggttctaatgagaacatacactccattcacttttcaggacatgtgttcactgtccggaagaaagaagagtataagatggccctctacaatttgtatccaggcgtgtttgagaccgttgaaatgcttccctctaaagctggcatctggagagtagagtgcttgatcggagaacatcttcacgcaggtatgagcaccttgttcctcgtgtacagcaacaaatgtcagaccccacttggcatggccagtggacacattcgcgactttcagatcacagcatctggccagtatggacaatgggccccaaagttggctcgcctccattactccggtagcataaatgcgtggtccactaaagaacctttcagctggattaaggtcgatcttcttgcccccatgatcatccacggcattaagacacagggagcgaggcagaaattctcctccctctacatctcacagttcattattatgtatagtttggacggcaagaagtggcaaacttatagaggtaacagtactggaacactcatggtgttcttcggcaacgttgatagctctggcatcaaacacaacatctttaatcctcccataatagctcggtacatcagattgcatccgacccactacagcattaggagtacactccgaatggagcttatgggttgcgacttgaattcctgttcaatgccactcggaatggagtctaaagccatctctgatgcacagataaccgccagtagctactttacgaacatgtttgctacgtggtcaccctctaaggcaaggcttcatttgcaaggccggtctaatgcctggagacctcaggtgaacaacccgaaagaatggctccaggtggactttcagaagaccatgaaagtaacaggtgtcactactcagggagttaagtccttgctcaccagcatgtatgtgaaggagttccttatttcctcatcacaagatggccaccagtggaccctcttctttcagaatggtaaggtcaaagtgtttcagggcaatcaagacagcttcacacccgtggtgaacagtcttgatcctccactcttgacacgataccttcgaatccatccacagtcttgggttcaccagattgcattgcgcatggaagtacttggatgcgaggctcaggacctctac

SEQ ID NO: 2488 - protein, 1457 aa, synthetic construct
  REGION 1..1457: note = Variant of human B-domain deleted Factor VIII
MQIELSTCFFLCLLRFCFSATRRYYLGAVELSWDYMQSDLGELPVDARFPPRVPKSFPFNTSVVYKKTLFVEFTDHLFNIAKPRPPWMGLLGPTIQAEVYDTVVITLKNMASHPVSLHAVGVSYWKASEGAEYDDQTSQREKEDDKVFPGGSHTYVWQVLKENGPMASDPLCLTYSYLSHVDLVKDLNSGLIGALLVCREGSLAKEKTQTLHKFILLFAVFDEGKSWHSETKNSLMQDRDAASARAWPKMHTVNGYVNRSLPGLIGCHRKSVYWHVIGMGTTPEVHSIFLEGHTFLVRNHRQASLEISPITFLTAQTLLMDLGQFLLFCHISSHQHDGMEAYVKVDSCPEEPQLRMKNNEEAEDYDDDLTDSEMDVVRFDDDNSPSFIQIRSVAKKHPKTWVHYIAAEEEDWDYAPLVLAPDDRSYKSQYLNNGPQRIGRKYKKVRFMAYTDETFKTREAIQHESGILGPLLYGEVGDTLLIIFKNQASRPYNIYPHGITDVRPLYSRRLPKGVKHLKDFPILPGEIFKYKWTVTVEDGPTKSDPRCLTRYYSSFVNTERDLASGLIGPLLICYKESVDQRGNQIMSDKRNVILFSVFDENRSWYLTENIQRFLPNPAGVQLEDPEFQASNIMHSINGYVFDSLQLSVCLHEVAYWYILSIGAQTDFLSVFFSGYTFKHKMVYEDTLTLFPFSGETVFMSMENPGLWILGCHNSDFRNRGMTALLKVSSCDKNTGDYYEDSYEDISAYLLSKNNAIEPRSFSQNPPVLKRHQREITRTTLQSDQEEIDYDDTISVEMKKEDFDIYDEDENQSPRSFQKKTRHYFIAAVERLWDYGMSSSPHVLRNRAQSGSVPQFKKVVFQEFTDGSFTQPLYRGELNEHLGLLGPYIRAEVEDNIMVTFRNQASRPYSFYSSLISYEEDQRQGAEPRKNFVKPNETKTYFWKVQHHMAPTKDEFDCKAWAYFSDVDLEKDVHSGLIGPLLVCHTNTLNPAHGRQVTVQEFALFFTIFDETKSWYFTENMERNCRAPCNIQMEDPTFKENYRFHAINGYIMDTLPGLVMAQDQRIRWYLLSMGSNENIHSIHFSGHVFTVRKKEEYKMALYNLYPGVFETVEMLPSKAGIWRVECLIGEHLHAGMSTLFLVYSNKCQTPLGMASGHIRDFQITASGQYGQWAPKLARLHYSGSINAWSTKEPFSWIKVDLLAPMIIHGIKTQGARQKFSSLYISQFIIMYSLDGKKWQTYRGNSTGTLMVFFGNVDSSGIKHNIFNPPIIARYIRLHPTHYSIRSTLRMELMGCDLNSCSMPLGMESKAISDAQITASSYFTNMFATWSPSKARLHLQGRSNAWRPQVNNPKEWLQVDFQKTMKVTGVTTQGVKSLLTSMYVKEFLISSSQDGHQWTLFFQNGKVKVFQGNQDSFTPVVNSLDPPLLTRYLRIHPQSWVHQIALRMEVLGCEAQDLY

SEQ ID NO: 2489 - DNA, 4371 bp, synthetic construct
  misc_feature 1..4371: note = Variant of human B-domain deleted Factor VIII
  source 1..4371: mol_type = other DNA
atgcagattgaactgtctacctgcttcttcctctgtttgctgaggttctgctttagcgccactagacggtactaccttggcgctgtggagctgtcctgggactatatgcagagtgatttgggagagcttcccgtcgacgcacgatttcctcctcgcgttccaaagtcatttcccttcaacacaagcgtggtgtacaagaagacgctcttcgtcgaattcaccgatcacctgttcaatatcgccaaacccagaccaccatggatgggtcttttggggcctaccatacaagcggaggtgtatgacacagttgttatcactctcaagaacatggcttctcatccggtaagtcttcacgcagtgggcgtgtcctactggaaagcttcagaaggagccgagtatgatgatcagacatcccagagggagaaagaagacgacaaggtatttccaggtgggtctcatacctatgtgtggcaagtgctcaaagagaatggccctatggcaagcgatccgctctgtttgacttacagctacctttcacacgttgacctcgtcaaggacctcaactccgggttgattggagccttgttggtatgcagggaaggatctcttgccaaagagaagacacagaccctccacaagtttatccttctctttgctgtgttcgatgagggcaaaagttggcatagcgaaacgaagaattccctcatgcaggatcgcgacgcagccagcgccagagcttggcccaagatgcacactgtgaacggatatgtcaataggtcacttcctggcttgattgggtgtcatcggaaaagtgtctactggcacgtgatcggaatggggacaacaccagaggtccactccatatttctcgaaggccataccttccttgttcgaaaccacagacaggcatccttggagatctctcccattacctttctcactgcccaaacgctccttatggacttgggtcagttccttctcttctgccatatcgcttcacaccagcatgatggtatggaagcttatgtgaaagtcgacagttgtcctgaggagccacagttgcgcatgaagaataatgaagaagccgaggattacgacgacgatctcaccgattctgagatggacgtggtgaggtttgatgacgacaactctccctccttcattcaaatccggagcgtggcgaagaaacaccccaagacttgggtccactatatagcggcggaagaggaggattgggattacgctcctcttgtattggcaccagatgaccgctcatacaaaagccagtacctcaacaacggaccgcagagaattggccggaagtataagaaagtgcgatttatggcctatacagacgaaacctttaagacaagggaggccatccagcatgagagtgggattttgggacctcttctttacggcgaagttggtgataccctcctcatcatcttcaagaatcaagcttctcgcccctataacatttacccacacgggatcactgacgttaggcctttgtatagcagaagacttcccaaaggcgtgaagcatctcaaagacttccccattttgccaggcgagatctttaagtacaaatggaccgtcacagtggaagatggaccgactaaatcagaccctcgatgccttacgcggtactattcctccttcgtgaatatggagagagatttggcaagcggactcataggaccactcctcatctgttacaaggaatctgtagaccagaggggtaaccagattatgagtgataaacgcaatgtgatcctttttagcgtcttcgacgagaaccggtcctggtacttgaccgagaatatacaaaggttccttcccaaccccgcaggcgttcagttggaagaccctgagtttcaggccagcaatattatgcactcaatcaacggctatgtgtttgatagtctccagctttctgtttgcctccatgaagtagcctattggtacatcttgtcaattggtgctcaaacagacttcctctccgtcttcttctccggctacacctttaagcacaagatggtgtatgaggacactctcacactctttccattttctggagaaaccgtgttcatgagcatggagaatccaggcctttggatcttgggttgccacaacagtgattttcgcaatcggggaatgactgctctcctcaaagtcagcagctgtgataagaacacaggcgactattacgaagattcttacgaggacataagtgcctacttgttgtccaagaataacgccattgagcccagatcattctcccagaatcctcccgtgcttaaaaggcatcagcgcgaaatcaccagaactactcttcagtctgatcaagaggagattgactatgacgacaccataagcgtggaaatgaagaaggaggatttcgatatctatgacgaagatgagaaccagtctccgcggagctttcagaagaagacgcgacactacttcattgcagcagtcgaaaggctttgggactacggtatgtcatcatcccctcatgtgttgcgcaatagagctcagagtggaagtgttccacagttcaagaaagtcgtctttcaagagtttacagatggcagcttcacacagcctctctatcggggcgagcttaacgaacatttgggactccttggtccctatatccgagccgaagtggaggacaacattatggttacctttaggaatcaagcctctcgcccctacagcttctactcctccctcatcagttatgaggaggatcagagacaaggcgctgaaccacggaagaactttgtgaaaccgaatgagacgaagacctacttctggaaagtacagcaccacatggcccccacaaaagacgaattcgattgcaaagcatgggcgtatttttcagacgttgacttggagaaagatgtacattcaggacttattggtcctttgttggtgtgtcacactaacactctcaatccagcccatggcaggcaggtgacagtccaggaattcgctcttttctttaccatctttgatgagaccaagtcctggtacttcacggaaaacatggagcgcaattgcagagccccctgtaacatacagatggaggaccctacctttaaggaaaattatcggttccacgcaatcaacggatacattatggatacactccctggccttgtgatggctcaggaccaacgaatcaggtggtacctcctcagcatgggttctaatgagaacatacactccattcacttttcaggacatgtgttcactgtccggaagaaagaagagtataagatggccctctacaatttgtatccaggcgtgtttgagaccgttgaaatgcttccctctaaagctggcatctggagagtagagtgcttgatcggagaacatcttcacgcaggtatgagcaccttgttcctcgtgtacagcaacaaatgtcagaccccacttggcatggccagtggacacattcgcgactttcagatcacagcatctggccagtatggacaatgggccccaaagttggctcgcctccattactccggtagcataaatgcgtggtccactaaagaacctttcagctggattaaggtcgatcttcttgcccccatgatcatccacggcattaagacacagggagcgaggcagaaattctcctccctctacatctcacagttcattattatgtatagtttggacggcaagaagtggcaaacttatagaggtaacagtactggaacactcatggtgttcttcggcaacgttgatagctctggcatcaaacacaacatctttaatcctcccataatagctcggtacatcagattgcatccgacccactacagcattaggagtacactccgaatggagcttatgggttgcgacttgaattcctgttcaatgccactcggaatggagtctaaagccatctctgatgcacagataaccgccagtagctactttacgaacatgtttgctacgtggtcaccctctaaggcaaggcttcatttgcaaggccggtctaatgcctggagacctcaggtgaacaacccgaaagaatggctccaggtggactttcagaagaccatgaaagtaacaggtgtcactactcagggagttaagtccttgctcaccagcatgtatgtgaaggagttccttatttcctcatcacaagatggccaccagtggaccctcttctttcagaatggtaaggtcaaagtgtttcagggcaatcaagacagcttcacacccgtggtgaacagtcttgatcctccactcttgacacgataccttcgaatccatccacagtcttgggttcaccagattgcattgcgcatggaagtacttggatgcgaggctcaggacctctac

SEQ ID NO: 2490 - protein, 1457 aa, synthetic construct
  REGION 1..1457: note = Variant of human B-domain deleted Factor VIII
MQIELSTCFFLCLLRFCFSATRRYYLGAVELSWDYMQSDLGELPVDARFPPRVPKSFPFNTSVVYKKTLFVEFTDHLFNIAKPRPPWMGLLGPTIQAEVYDTVVITLKNMASHPVSLHAVGVSYWKASEGAEYDDQTSQREKEDDKVFPGGSHTYVWQVLKENGPMASDPLCLTYSYLSHVDLVKDLNSGLIGALLVCREGSLAKEKTQTLHKFILLFAVFDEGKSWHSETKNSLMQDRDAASARAWPKMHTVNGYVNRSLPGLIGCHRKSVYWHVIGMGTTPEVHSIFLEGHTFLVRNHRQASLEISPITFLTAQTLLMDLGQFLLFCHIASHQHDGMEAYVKVDSCPEEPQLRMKNNEEAEDYDDDLTDSEMDVVRFDDDNSPSFIQIRSVAKKHPKTWVHYIAAEEEDWDYAPLVLAPDDRSYKSQYLNNGPQRIGRKYKKVRFMAYTDETFKTREAIQHESGILGPLLYGEVGDTLLIIFKNQASRPYNIYPHGITDVRPLYSRRLPKGVKHLKDFPILPGEIFKYKWTVTVEDGPTKSDPRCLTRYYSSFVNMERDLASGLIGPLLICYKESVDQRGNQIMSDKRNVILFSVFDENRSWYLTENIQRFLPNPAGVQLEDPEFQASNIMHSINGYVFDSLQLSVCLHEVAYWYILSIGAQTDFLSVFFSGYTFKHKMVYEDTLTLFPFSGETVFMSMENPGLWILGCHNSDFRNRGMTALLKVSSCDKNTGDYYEDSYEDISAYLLSKNNAIEPRSFSQNPPVLKRHQREITRTTLQSDQEEIDYDDTISVEMKKEDFDIYDEDENQSPRSFQKKTRHYFIAAVERLWDYGMSSSPHVLRNRAQSGSVPQFKKVVFQEFTDGSFTQPLYRGELNEHLGLLGPYIRAEVEDNIMVTFRNQASRPYSFYSSLISYEEDQRQGAEPRKNFVKPNETKTYFWKVQHHMAPTKDEFDCKAWAYFSDVDLEKDVHSGLIGPLLVCHTNTLNPAHGRQVTVQEFALFFTIFDETKSWYFTENMERNCRAPCNIQMEDPTFKENYRFHAINGYIMDTLPGLVMAQDQRIRWYLLSMGSNENIHSIHFSGHVFTVRKKEEYKMALYNLYPGVFETVEMLPSKAGIWRVECLIGEHLHAGMSTLFLVYSNKCQTPLGMASGHIRDFQITASGQYGQWAPKLARLHYSGSINAWSTKEPFSWIKVDLLAPMIIHGIKTQGARQKFSSLYISQFIIMYSLDGKKWQTYRGNSTGTLMVFFGNVDSSGIKHNIFNPPIIARYIRLHPTHYSIRSTLRMELMGCDLNSCSMPLGMESKAISDAQITASSYFTNMFATWSPSKARLHLQGRSNAWRPQVNNPKEWLQVDFQKTMKVTGVTTQGVKSLLTSMYVKEFLISSSQDGHQWTLFFQNGKVKVFQGNQDSFTPVVNSLDPPLLTRYLRIHPQSWVHQIALRMEVLGCEAQDLY

SEQ ID NO: 2491 - DNA, 4371 bp, synthetic construct
  misc_feature 1..4371: note = Variant of human B-domain deleted Factor VIII
  source 1..4371: mol_type = other DNA
atgcagattgaactgtctacctgcttcttcctctgtttgctgaggttctgctttagcgccactagacggtactaccttggcgctgtggagctgtcctgggactatatgcagagtgatttgggagagcttcccgtcgacgcacgatttcctcctcgcgttccaaagtcatttcccttcaacacaagcgtggtgtacaagaagacgctcttcgtcgaattcaccgatcacctgttcaatatcgccaaacccagaccaccatggatgggtcttttggggcctaccatacaagcggaggtgtatgacacagttgttatcactctcaagaacatggcttctcatccggtaagtcttcacgcagtgggcgtgtcctactggaaagcttcagaaggagccgagtatgatgatcagacatcccagagggagaaagaagacgacaaggtatttccaggtgggtctcatacctatgtgtggcaagtgctcaaagagaatggccctatggcaagcgatccgctctgtttgacttacagctacctttcacacgttgacctcgtcaaggacctcaactccgggttgattggagccttgttggtatgcagggaaggatctcttgccaaagagaagacacagaccctccacaagtttatccttctctttgctgtgttcgatgagggcaaaagttggcatagcgaaacgaagaattccctcatgcaggatcgcgacgcagccagcgccagagcttggcccaagatgcacactgtgaacggatatgtcaataggtcacttcctggcttgattgggtgtcatcggaaaagtgtctactggcacgtgatcggaatggggacaacaccagaggtccactccatatttctcgaaggccataccttccttgttcgaaaccacagacaggcatccttggagatctctcccattacctttctcactgcccaaacgctccttatggacttgggtcagttccttctcttctgccatatcagctcacaccagcatgatggtatggaagcttatgtgaaagtcgacagttgtcctgaggagccacagttgcgcatgaagaataatgaagaagccgaggattacgacgacgatctcaccgattctgagatggacgtggtgaggtttgatgacgacaactctccctccttcattcaaatccggagcgtggcgaagaaacaccccaagacttgggtccactatatagcggcggaagaggaggattgggattacgctcctcttgtattggcaccagatgaccgctcatacaaaagccagtacctcaacaacggaccgcagagaattggccggaagtataagaaagtgcgatttatggcctatacagacgaaacctttaagacaagggaggccatccagcatgagagtgggattttgggacctcttctttacggcgaagttggtgataccctcctcatcatcttcaagaatcaagcttctcgcccctataacatttacccacacgggatcactgacgttaggcctttgtatagcagaagacttcccaaaggcgtgaagcatctcaaagacttccccattttgccaggcgagatctttaagtacaaatggaccgtcacagtggaagatggaccgactaaatcagaccctcgatgccttacgcggtactattcctccttcgtgaatatggagagagatttggcaagcggactcataggaccactcctcatctgttacaaggaatctgtagaccagaggggtaaccagattatgagtgataaacgcaatgtgatcctttttagcgtcttcgacgagaaccggtcctggtacttgaccgagaatatacaaaggttccttcccaaccccgcaggcgttcagttggaagaccctgagtttcaggccagcaatattatgcactcaatcaacggctatgtgtttgatagtctccagctttctgtttgcctccatgaagtagcctattggtacatcttgtcaattggtgctcaaacagacttcctctccgtcttcttctccggctacacctttaagcacaagatggtgtatgaggacactctcacactctttccattttctggagaaaccgtgttcatgagcatggagaatccaggcctttggatcttgggttgccacaacagtgattttcgcaatcggggaatgactgctctcctcaaagtcagcagctgtgataagaacacaggcgactattacgaagattcttacgaggacataagtgcctacttgttgtccaagaataacgccattgagcccagatcattctcccagaatcctcccgtgcttaaaaggcatcagcgcgaaatcaccagaactactcttcagtctgatcaagaggagattgactatgacgacaccataagcgtggaaatgaagaaggaggatttcgatatctgtgacgaagatgagaaccagtctccgcggagctttcagaagaagacgcgacactacttcattgcagcagtcgaaaggctttgggactacggtatgtcatcatcccctcatgtgttgcgcaatagagctcagagtggaagtgttccacagttcaagaaagtcgtctttcaagagtttacagatggcagcttcacacagcctctctatcggggcgagcttaacgaacatttgggactccttggtccctatatccgagccgaagtggaggacaacattatggttacctttaggaatcaagcctctcgcccctacagcttctactcctccctcatcagttatgaggaggatcagagacaaggcgctgaaccacggaagaactttgtgaaaccgaatgagacgaagacctacttctggaaagtacagcaccacatggcccccacaaaagacgaattcgattgcaaagcatgggcgtatttttcagacgttgacttggagaaagatgtacattcaggacttattggtcctttgttggtgtgtcacactaacactctcaatccagcccatggcaggcaggtgacagtccaggaattcgctcttttctttaccatctttgatgagaccaagtcctggtacttcacggaaaacatggagcgcaattgcagagccccctgtaacatacagatggaggaccctacctttaaggaaaattatcggttccacgcaatcaacggatacattatggatacactccctggccttgtgatggctcaggaccaacgaatcaggtggtacctcctcagcatgggttctaatgagaacatacactccattcacttttcaggacatgtgttcactgtccggaagaaagaagagtataagatggccctctacaatttgtatccaggcgtgtttgagaccgttgaaatgcttccctctaaagctggcatctggagagtagagtgcttgatcggagaacatcttcacgcaggtatgagcaccttgttcctcgtgtacagcaacaaatgtcagaccccacttggcatggccagtggacacattcgcgactttcagatcacagcatctggccagtatggacaatgggccccaaagttggctcgcctccattactccggtagcataaatgcgtggtccactaaagaacctttcagctggattaaggtcgatcttcttgcccccatgatcatccacggcattaagacacagggagcgaggcagaaattctcctccctctacatctcacagttcattattatgtatagtttggacggcaagaagtggcaaacttatagaggtaacagtactggaacactcatggtgttcttcggcaacgttgatagctctggcatcaaacacaacatctttaatcctcccataatagctcggtacatcagattgcatccgacccactacagcattaggagtacactccgaatggagcttatgggttgcgacttgaattcctgttcaatgccactcggaatggagtctaaagccatctctgatgcacagataaccgccagtagctactttacgaacatgtttgctacgtggtcaccctctaaggcaaggcttcatttgcaaggccggtctaatgcctggagacctcaggtgaacaacccgaaagaatggctccaggtggactttcagaagaccatgaaagtaacaggtgtcactactcagggagttaagtccttgctcaccagcatgtatgtgaaggagttccttatttcctcatcacaagatggccaccagtggaccctcttctttcagaatggtaaggtcaaagtgtttcagggcaatcaagacagcttcacacccgtggtgaacagtcttgatcctccactcttgacacgataccttcgaatccatccacagtcttgggttcaccagattgcattgcgcatggaagtacttggatgcgaggctcaggacctctac

SEQ ID NO: 2492 - protein, 1457 aa, synthetic construct
  REGION 1..1457: note = Variant of human B-domain deleted Factor VIII
MQIELSTCFFLCLLRFCFSATRRYYLGAVELSWDYMQSDLGELPVDARFPPRVPKSFPFNTSVVYKKTLFVEFTDHLFNIAKPRPPWMGLLGPTIQAEVYDTVVITLKNMASHPVSLHAVGVSYWKASEGAEYDDQTSQREKEDDKVFPGGSHTYVWQVLKENGPMASDPLCLTYSYLSHVDLVKDLNSGLIGALLVCREGSLAKEKTQTLHKFILLFAVFDEGKSWHSETKNSLMQDRDAASARAWPKMHTVNGYVNRSLPGLIGCHRKSVYWHVIGMGTTPEVHSIFLEGHTFLVRNHRQASLEISPITFLTAQTLLMDLGQFLLFCHISSHQHDGMEAYVKVDSCPEEPQLRMKNNEEAEDYDDDLTDSEMDVVRFDDDNSPSFIQIRSVAKKHPKTWVHYIAAEEEDWDYAPLVLAPDDRSYKSQYLNNGPQRIGRKYKKVRFMAYTDETFKTREAIQHESGILGPLLYGEVGDTLLIIFKNQASRPYNIYPHGITDVRPLYSRRLPKGVKHLKDFPILPGEIFKYKWTVTVEDGPTKSDPRCLTRYYSSFVNMERDLASGLIGPLLICYKESVDQRGNQIMSDKRNVILFSVFDENRSWYLTENIQRFLPNPAGVQLEDPEFQASNIMHSINGYVFDSLQLSVCLHEVAYWYILSIGAQTDFLSVFFSGYTFKHKMVYEDTLTLFPFSGETVFMSMENPGLWILGCHNSDFRNRGMTALLKVSSCDKNTGDYYEDSYEDISAYLLSKNNAIEPRSFSQNPPVLKRHQREITRTTLQSDQEEIDYDDTISVEMKKEDFDICDEDENQSPRSFQKKTRHYFIAAVERLWDYGMSSSPHVLRNRAQSGSVPQFKKVVFQEFTDGSFTQPLYRGELNEHLGLLGPYIRAEVEDNIMVTFRNQASRPYSFYSSLISYEEDQRQGAEPRKNFVKPNETKTYFWKVQHHMAPTKDEFDCKAWAYFSDVDLEKDVHSGLIGPLLVCHTNTLNPAHGRQVTVQEFALFFTIFDETKSWYFTENMERNCRAPCNIQMEDPTFKENYRFHAINGYIMDTLPGLVMAQDQRIRWYLLSMGSNENIHSIHFSGHVFTVRKKEEYKMALYNLYPGVFETVEMLPSKAGIWRVECLIGEHLHAGMSTLFLVYSNKCQTPLGMASGHIRDFQITASGQYGQWAPKLARLHYSGSINAWSTKEPFSWIKVDLLAPMIIHGIKTQGARQKFSSLYISQFIIMYSLDGKKWQTYRGNSTGTLMVFFGNVDSSGIKHNIFNPPIIARYIRLHPTHYSIRSTLRMELMGCDLNSCSMPLGMESKAISDAQITASSYFTNMFATWSPSKARLHLQGRSNAWRPQVNNPKEWLQVDFQKTMKVTGVTTQGVKSLLTSMYVKEFLISSSQDGHQWTLFFQNGKVKVFQGNQDSFTPVVNSLDPPLLTRYLRIHPQSWVHQIALRMEVLGCEAQDLY

SEQ ID NO: 2493 - DNA, 4371 bp, synthetic construct
  misc_feature 1..4371: note = Variant of human B-domain deleted Factor VIII
  source 1..4371: mol_type = other DNA
atgcagattgaactgtctacctgcttcttcctctgtttgctgaggttctgctttagcgccactagacggtactaccttggcgctgtggagctgtcctgggactatatgcagagtgatttgggagagcttcccgtcgacgcacgatttcctcctcgcgttccaaagtcatttcccttcaacacaagcgtggtgtacaagaagacgctcttcgtcgaattcaccgatcacctgttcaatatcgccaaacccagaccaccatggatgggtcttttggggcctaccatacaagcggaggtgtatgacacagttgttatcactctcaagaacatggcttctcatccggtaagtcttcacgcagtgggcgtgtcctactggaaagcttcagaaggagccgagtatgatgatcagacatcccagagggagaaagaagacgacaaggtatttccaggtgggtctcatacctatgtgtggcaagtgctcaaagagaatggccctatggcaagcgatccgctctgtttgacttacagctacctttcacacgttgacctcgtcaaggacctcaactccgggttgattggagccttgttggtatgcagggaaggatctcttgccaaagagaagacacagaccctccacaagtttatccttctctttgctgtgttcgatgagggcaaaagttggcatagcgaaacgaagaattccctcatgcaggatcgcgacgcagccagcgccagagcttggcccaagatgcacactgtgaacggatatgtcaataggtcacttcctggcttgattgggtgtcatcggaaaagtgtctactggcacgtgatcggaatggggacaacaccagaggtccactccatatttctcgaaggccataccttccttgttcgaaaccacagacaggcatccttggagatctctcccattacctttctcactgcccaaacgctccttatggacttgggtcagttccttctcttctgccatatcagctcacaccagcatgatggtatggaagcttatgtgaaagtcgacagttgtcctgaggagccacagttgcgcatgaagaataatgaagaagccgaggattacgacgacgatctcaccgattctgagatggacgtggtgaggtttgatgacgacaactctccctccttcattcaaatccggagcgtggcgaagaaacaccccaagacttgggtccactatatagcggcggaagaggaggattgggattacgctcctcttgtattggcaccagatgaccgctcatacaaaagccagtacctcaacaacggaccgcagagaattggccggaagtataagaaagtgcgatttatggcctatacagacgaaacctttaagacaagggaggccatccagcatgagagtgggattttgggacctcttctttacggcgaagttggtgataccctcctcatcatcttcaagaatcaagcttctcgcccctataacatttacccacacgggatcactgacgttaggcctttgtatagcagaagacttcccaaaggcgtgaagcatctcaaagacttccccattttgccaggcgagatctttaagtacaaatggaccgtcacagtggaagatggaccgactaaatcagaccctcgatgccttacgcggtactattcctccttcgtgaatatggagagagatttggcaagcggactcataggaccactcctcatctgttacaaggaatctgtagaccagaggggtaaccagattatgagtgataaacgcaatgtgatcctttttagcgtcttcgacgagaaccggtcctggtacttgaccgagaatatacaaaggttccttcccaaccccgcaggcgttcagttggaagaccctgagtttcaggccagcaatattatgcactcaatcaacggctatgtgtttgatagtctccagctttctgtttgcctccatgaagtagcctattggtacatcttgtcaattggtgctcaaacagacttcctctccgtcttcttctccggctacacctttaagcacaagatggtgtatgaggacactctcacactctttccattttctggagaaaccgtgttcatgagcatggagaatccaggcctttggatcttgggttgccacaacagtgattttcgcaatcggggaatgactgctctcctcaaagtcagcagctgtgataagaacacaggcgactattacgaagattcttacgaggacataagtgcctactttttgtccaagaataacgccattgagcccagatcattctcccagaatcctcccgtgcttaaaaggcatcagcgcgaaatcaccagaactactcttcagtctgatcaagaggagattgactatgacgacaccataagcgtggaaatgaagaaggaggatttcgatatctatgacgaagatgagaaccagtctccgcggagctttcagaagaagacgcgacactacttcattgcagcagtcgaaaggctttgggactacggtatgtcatcatcccctcatgtgttgcgcaatagagctcagagtggaagtgttccacagttcaagaaagtcgtctttcaagagtttacagatggcagcttcacacagcctctctatcggggcgagcttaacgaacatttgggactccttggtccctatatccgagccgaagtggaggacaacattatggttacctttaggaatcaagcctctcgcccctacagcttctactcctccctcatcagttatgaggaggatcagagacaaggcgctgaaccacggaagaactttgtgaaaccgaatgagacgaagacctacttctggaaagtacagcaccacatggcccccacaaaagacgaattcgattgcaaagcatgggcgtatttttcagacgttgacttggagaaagatgtacattcaggacttattggtcctttgttggtgtgtcacactaacactctcaatccagcccatggcaggcaggtgacagtccaggaattcgctcttttctttaccatctttgatgagaccaagtcctggtacttcacggaaaacatggagcgcaattgcagagccccctgtaacatacagatggaggaccctacctttaaggaaaattatcggttccacgcaatcaacggatacattatggatacactccctggccttgtgatggctcaggaccaacgaatcaggtggtacctcctcagcatgggttctaatgagaacatacactccattcacttttcaggacatgtgttcactgtccggaagaaagaagagtataagatggccctctacaatttgtatccaggcgtgtttgagaccgttgaaatgcttccctctaaagctggcatctggagagtagagtgcttgatcggagaacatcttcacgcaggtatgagcaccttgttcctcgtgtacagcaacaaatgtcagaccccacttggcatggccagtggacacattcgcgactttcagatcacagcatctggccagtatggacaatgggccccaaagttggctcgcctccattactccggtagcataaatgcgtggtccactaaagaacctttcagctggattaaggtcgatcttcttgcccccatgatcatccacggcattaagacacagggagcgaggcagaaattctcctccctctacatctcacagttcattattatgtatagtttggacggcaagaagtggcaaacttatagaggtaacagtactggaacactcatggtgttcttcggcaacgttgatagctctggcatcaaacacaacatctttaatcctcccataatagctcggtacatcagattgcatccgacccactacagcattaggagtacactccgaatggagcttatgggttgcgacttgaattcctgttcaatgccactcggaatggagtctaaagccatctctgatgcacagataaccgccagtagctactttacgaacatgtttgctacgtggtcaccctctaaggcaaggcttcatttgcaaggccggtctaatgcctggagacctcaggtgaacaacccgaaagaatggctccaggtggactttcagaagaccatgaaagtaacaggtgtcactactcagggagttaagtccttgctcaccagcatgtatgtgaaggagttccttatttcctcatcacaagatggccaccagtggaccctcttctttcagaatggtaaggtcaaagtgtttcagggcaatcaagacagcttcacacccgtggtgaacagtcttgatcctccactcttgacacgataccttcgaatccatccacagtcttgggttcaccagattgcattgcgcatggaagtacttggatgcgaggctcaggacctctac

SEQ ID NO: 2494 - protein, 1457 aa, synthetic construct
  REGION 1..1457: note = Variant of human B-domain deleted Factor VIII
MQIELSTCFFLCLLRFCFSATRRYYLGAVELSWDYMQSDLGELPVDARFPPRVPKSFPFNTSVVYKKTLFVEFTDHLFNIAKPRPPWMGLLGPTIQAEVYDTVVITLKNMASHPVSLHAVGVSYWKASEGAEYDDQTSQREKEDDKVFPGGSHTYVWQVLKENGPMASDPLCLTYSYLSHVDLVKDLNSGLIGALLVCREGSLAKEKTQTLHKFILLFAVFDEGKSWHSETKNSLMQDRDAASARAWPKMHTVNGYVNRSLPGLIGCHRKSVYWHVIGMGTTPEVHSIFLEGHTFLVRNHRQASLEISPITFLTAQTLLMDLGQFLLFCHISSHQHDGMEAYVKVDSCPEEPQLRMKNNEEAEDYDDDLTDSEMDVVRFDDDNSPSFIQIRSVAKKHPKTWVHYIAAEEEDWDYAPLVLAPDDRSYKSQYLNNGPQRIGRKYKKVRFMAYTDETFKTREAIQHESGILGPLLYGEVGDTLLIIFKNQASRPYNIYPHGITDVRPLYSRRLPKGVKHLKDFPILPGEIFKYKWTVTVEDGPTKSDPRCLTRYYSSFVNMERDLASGLIGPLLICYKESVDQRGNQIMSDKRNVILFSVFDENRSWYLTENIQRFLPNPAGVQLEDPEFQASNIMHSINGYVFDSLQLSVCLHEVAYWYILSIGAQTDFLSVFFSGYTFKHKMVYEDTLTLFPFSGETVFMSMENPGLWILGCHNSDFRNRGMTALLKVSSCDKNTGDYYEDSYEDISAYFLSKNNAIEPRSFSQNPPVLKRHQREITRTTLQSDQEEIDYDDTISVEMKKEDFDIYDEDENQSPRSFQKKTRHYFIAAVERLWDYGMSSSPHVLRNRAQSGSVPQFKKVVFQEFTDGSFTQPLYRGELNEHLGLLGPYIRAEVEDNIMVTFRNQASRPYSFYSSLISYEEDQRQGAEPRKNFVKPNETKTYFWKVQHHMAPTKDEFDCKAWAYFSDVDLEKDVHSGLIGPLLVCHTNTLNPAHGRQVTVQEFALFFTIFDETKSWYFTENMERNCRAPCNIQMEDPTFKENYRFHAINGYIMDTLPGLVMAQDQRIRWYLLSMGSNENIHSIHFSGHVFTVRKKEEYKMALYNLYPGVFETVEMLPSKAGIWRVECLIGEHLHAGMSTLFLVYSNKCQTPLGMASGHIRDFQITASGQYGQWAPKLARLHYSGSINAWSTKEPFSWIKVDLLAPMIIHGIKTQGARQKFSSLYISQFIIMYSLDGKKWQTYRGNSTGTLMVFFGNVDSSGIKHNIFNPPIIARYIRLHPTHYSIRSTLRMELMGCDLNSCSMPLGMESKAISDAQITASSYFTNMFATWSPSKARLHLQGRSNAWRPQVNNPKEWLQVDFQKTMKVTGVTTQGVKSLLTSMYVKEFLISSSQDGHQWTLFFQNGKVKVFQGNQDSFTPVVNSLDPPLLTRYLRIHPQSWVHQIALRMEVLGCEAQDLY

SEQ ID NO: 2495 - DNA, 4371 bp, synthetic construct
  misc_feature 1..4371: note = Variant of human B-domain deleted Factor VIII
  source 1..4371: mol_type = other DNA
atgcagattgaactgtctacctgcttcttcctctgtttgctgaggttctgctttagcgccactagacggtactaccttggcgctgtggagctgtcctgggactatatgcagagtgatttgggagagcttcccgtcgacgcacgatttcctcctcgcgttccaaagtcatttcccttcaacacaagcgtggtgtacaagaagacgctcttcgtcgaattcaccgatcacctgttcaatatcgccaaacccagaccaccatggatgggtcttttggggcctaccatacaagcggaggtgtatgacacagttgttatcactctcaagaacatggcttctcatccggtaagtcttcacgcagtgggcgtgtcctactggaaagcttcagaaggagccgagtatgatgatcagacatcccagagggagaaagaagacgacaaggtatttccaggtgggtctcatacctatgtgtggcaagtgctcaaagagaatggccctatggcaagcgatccgctctgtttgacttacagctacctttcacacgttgacctcgtcaaggacctcaactccgggttgattggagccttgttggtatgcagggaaggatctcttgccaaagagaagacacagaccctcgctaagtttatccttctctttgctgtgttcgatgagggcaaaagttggcatagcgaaacgaagaattccctcatgcaggatcgcgacgcagccagcgccagagcttggcccaagatgcacactgtgaacggatatgtaaataggtcacttcctggcttgattgggtgtcatcggaaaagtgtctactggcacgtgatcggaatggggacaacaccagaggtccactccatatttctcgaaggccataccttccttgttcgaaaccacagacaggcatccttggagatctctcccattacctttctcactgcccaaacgctccttatggacttgggtcagttccttctcttctgccatatcagctcacaccagcatgatggtatggaagcttatgtgaaagtcgacagttgtcctgaggagccacagttgcgcatgaagaataatgaagaagccgaggattacgacgacgatctcaccgattctgagatggacgtggtgaggtttgatgacgacaactctccctccttcattcaaatccggagcgtggcgaagaaacaccccaagacttgggtccactatatagcggcggaagaggaggattgggattacgctcctcttgtattggcaccagatgaccgctcatacaaaagccagtacctcaacaacggaccgcagagaattggccggaagtataagaaagtgcgatttatggcctatacagacgaaacctttaagacaagggaggccatccagcatgagagtgggattttgggacctcttctttacggcgaagttggtgataccctcctcatcatcttcaagaatcaagcttctcgcccctataacatttacccacacgggatcactgacgttaggcctttgtatagcagaagacttcccaaaggcgtgaagcatctcaaagacttccccattttgccaggcgagatctttaagtacaaatggaccgtcacagtggaagatggaccgactaaatcagaccctcgatgccttacgcggtactattcctccttcgtgaatatggagagagatttggcaagcggactcataggaccactcctcatctgttacaaggaatctgtagaccagaggggtaaccagattatgagtgataaacgcaatgtgatcctttttagcgtcttcgacgagaaccggtcctggtacttgaccgagaatatacaaaggttccttcccaaccccgcaggcgttcagttggaagaccctgagtttcaggccagcaatattatgcactcaatcaacggctatgtgtttgatagtctccagctttctgtttgcctccatgaagtagcctattggtacatcttgtcaattggtgctcaaacagacttcctctccgtcttcttctccggctacacctttaagcacaagatggtgtatgaggacactctcacactctttccattttctggagaaaccgtgttcatgagcatggagaatccaggcctttggatcttgggttgccacaacagtgattttcgcaatcggggaatgactgctctactcaaagtcagcagctgtgataagaacacaggcgactattacgaagattcttacgaggacataagtgcctacttgttgtccaagaataacgccattgagcccagatcattctcccagaatcctcccgtgcttaaaaggcatcagcgcgaaatcaccagaactactcttcagtctgatcaagaggagattgactatgacgacaccataagcgtggaaatgaagaaggaggatttcgatatctatgacgaagatgagaaccagtctccgcggagctttcagaagaagacgcgacactacttcattgcagcagtcgaaaggctttgggactacggtatgtcatcatcccctcatgtgttgcgcaatagagctcagagtggaagtgttccacagttcaagaaagtcgtctttcaagagtttacagatggcagcttcacacagcctctctatcggggcgagcttaacgaacatttgggactccttggtccctatatccgagccgaagtggaggacaacattatggttacctttaggaatcaagcctctcgcccctacagcttctactcctccctcatcagttatgaggaggatcagagacaaggcgctgaaccacggaagaactttgtgaaaccgaatgagacgaagacctacttctggaaagtacagcaccacatggcccccacaaaagacgaattcgattgcaaagcatgggcgtatttttcagacgttgacttggagaaagatgtacattcaggacttattggtcctttgttggtgtgtcacactaacactctcaatccagcccatggcaggcaggtgacagtccaggaattcgctcttttctttaccatctttgatgagaccaagtcctggtacttcacggaaaacatggagcgcaattgcagagccccctgtaacatacagatggaggaccctacctttaaggaaaattatcggttccacgcaatcaacggatacattatggatacactccctggccttgtgatggctcaggaccaacgaatcaggtggtacctcctcagcatgggttctaatgagaacatacactccattcacttttcaggacatgtgttcactgtccggaagaaagaagagtataagatggccctctacaatttgtatccaggcgtgtttgagaccgttgaaatgcttccctctaaagctggcatctggagagtagagtgcttgatcggagaacatcttcacgcaggtatgagcaccttgttcctcgtgtacagcaacaaatgtcagaccccacttggcatggccagtggacacattcgcgactttcagatcacagcatctggccagtatggacaatgggccccaaagttggctcgcctccattactccggtagcataaatgcgtggtccactaaagaacctttcagctggattaaggtcgatcttcttgcccccatgatcatccacggcattaagacacagggagcgaggcagaaattctcctccctctacatctcacagttcattattatgtatagtttggacggcaagaagtggcaaacttatagaggtaacagtactggaacactcatggtgttcttcggcaacgttgatagctctggcatcaaacacaacatctttaatcctcccataatagctcggtacatcagattgcatccgacccactacagcattaggagtacactccgaatggagcttatgggttgcgacttgaattcctgttcaatgccactcggaatggagtctaaagccatctctgatgcacagataaccgccagtagctactttacgaacatgtttgctacgtggtcaccctctaaggcaaggcttcatttgcaaggccggtctaatgcctggagacctcaggtgaacaacccgaaagaatggctccaggtggactttcagaagaccatgaaagtaacaggtgtcactactcagggagttaagtccttgctcaccagcatgtatgtgaaggagttccttatttcctcatcacaagatggccaccagtggaccctcttctttcagaatggtaaggtcaaagtgtttcagggcaatcaagacagcttcacacccgtggtgaacagtcttgatcctccactcttgacacgataccttcgaatccatccacagtcttgggttcaccagattgcattgcgcatggaagtacttggatgcgaggctcaggacctctac

SEQ ID NO: 2496 - protein, 1457 aa, synthetic construct
  REGION 1..1457: note = Variant of human B-domain deleted Factor VIII
MQIELSTCFFLCLLRFCFSATRRYYLGAVELSWDYMQSDLGELPVDARFPPRVPKSFPFNTSVVYKKTLFVEFTDHLFNIAKPRPPWMGLLGPTIQAEVYDTVVITLKNMASHPVSLHAVGVSYWKASEGAEYDDQTSQREKEDDKVFPGGSHTYVWQVLKENGPMASDPLCLTYSYLSHVDLVKDLNSGLIGALLVCREGSLAKEKTQTLAKFILLFAVFDEGKSWHSETKNSLMQDRDAASARAWPKMHTVNGYVNRSLPGLIGCHRKSVYWHVIGMGTTPEVHSIFLEGHTFLVRNHRQASLEISPITFLTAQTLLMDLGQFLLFCHISSHQHDGMEAYVKVDSCPEEPQLRMKNNEEAEDYDDDLTDSEMDVVRFDDDNSPSFIQIRSVAKKHPKTWVHYIAAEEEDWDYAPLVLAPDDRSYKSQYLNNGPQRIGRKYKKVRFMAYTDETFKTREAIQHESGILGPLLYGEVGDTLLIIFKNQASRPYNIYPHGITDVRPLYSRRLPKGVKHLKDFPILPGEIFKYKWTVTVEDGPTKSDPRCLTRYYSSFVNMERDLASGLIGPLLICYKESVDQRGNQIMSDKRNVILFSVFDENRSWYLTENIQRFLPNPAGVQLEDPEFQASNIMHSINGYVFDSLQLSVCLHEVAYWYILSIGAQTDFLSVFFSGYTFKHKMVYEDTLTLFPFSGETVFMSMENPGLWILGCHNSDFRNRGMTALLKVSSCDKNTGDYYEDSYEDISAYLLSKNNAIEPRSFSQNPPVLKRHQREITRTTLQSDQEEIDYDDTISVEMKKEDFDIYDEDENQSPRSFQKKTRHYFIAAVERLWDYGMSSSPHVLRNRAQSGSVPQFKKVVFQEFTDGSFTQPLYRGELNEHLGLLGPYIRAEVEDNIMVTFRNQASRPYSFYSSLISYEEDQRQGAEPRKNFVKPNETKTYFWKVQHHMAPTKDEFDCKAWAYFSDVDLEKDVHSGLIGPLLVCHTNTLNPAHGRQVTVQEFALFFTIFDETKSWYFTENMERNCRAPCNIQMEDPTFKENYRFHAINGYIMDTLPGLVMAQDQRIRWYLLSMGSNENIHSIHFSGHVFTVRKKEEYKMALYNLYPGVFETVEMLPSKAGIWRVECLIGEHLHAGMSTLFLVYSNKCQTPLGMASGHIRDFQITASGQYGQWAPKLARLHYSGSINAWSTKEPFSWIKVDLLAPMIIHGIKTQGARQKFSSLYISQFIIMYSLDGKKWQTYRGNSTGTLMVFFGNVDSSGIKHNIFNPPIIARYIRLHPTHYSIRSTLRMELMGCDLNSCSMPLGMESKAISDAQITASSYFTNMFATWSPSKARLHLQGRSNAWRPQVNNPKEWLQVDFQKTMKVTGVTTQGVKSLLTSMYVKEFLISSSQDGHQWTLFFQNGKVKVFQGNQDSFTPVVNSLDPPLLTRYLRIHPQSWVHQIALRMEVLGCEAQDLY

SEQ ID NO: 2497 - DNA, 4371 bp, synthetic construct
  misc_feature 1..4371: note = Variant of human B-domain deleted Factor VIII
  source 1..4371: mol_type = other DNA
atgcagattgaactgtctacctgcttcttcctctgtttgctgaggttctgctttagcgccactagacggtactaccttggcgctgtggagctgtcctgggactatatgcagagtgatttgggagagcttcccgtcgacgcacgatttcctcctcgcgttccaaagtcatttcccttcaacacaagcgtggtgtacaagaagacgctcttcgtcgaattcaccgatcacctgttcaatatcgccaaacccagaccaccatggatgggtcttttggggcctaccatacaagcggaggtgtatgacacagttgttatcactctcaagaacatggcttctcatccggtaagtcttcacgcagtgggcgtgtcctactggaaagcttcagaaggagccgagtatgatgatcagacatcccagagggagaaagaagacgacaaggtatttccaggtgggtctcatacctatgtgtggcaagtgctcaaagagaatggccctatggcaagcgatccgctctgtttgacttacagctacctttcacacgttgacctcgtcaaggacctcaactccgggttgattggagccttgttggtatgcagggaaggatctcttgccaaagagaagacacagaccctccacaagtttatccttctctttgctgtgttcgatgagggcaaaagttggcatagcgaaacgaagaattccctcatgcaggatcgcgacgcagccagcgccagagcttggcccaagatgcacactgtgaacggatatgtcaataggtcacttcctggcttgattgggtgtcatcggaaaagtgtctactggcacgtgatcggaatggggacaacaccagaggtccactccatatttctcgaaggccataccttccttgttcgaaaccacagacaggcatccttggagatctctcccattacctttctcactgcccaaacgctccttatggacttgggtcagttccttctcttctgccatatcagctcacaccagcatgatggtatggaagcttatgtgaaagtcgacagttgtcctgaggagccacagttgcgcatgaagaataatgaagaagccgaggattacgacgacgatctcaccgattctgagatggacgtggtgaggtttgatgacgacaactctccctccttcattcaaatccggagcgtggcgaagaaacaccccaagacttgggtccactatatagcggcggaagaggaggattgggattacgctcctcttgtattggcaccagatgaccgctcatacaaaagccagtacctcaacaacggaccgcagagaattggccggaagtataagaaagtgcgatttatggcctatacagacgaaacctttaagacaagggaggccatccagcatgagagtgggattttgggacctcttctttacggcgaagttggtgataccctcctcatcatcttcaagaatcaagcttctcgcccctataacatttacccacacgggatcactgacgttaggcctttgtatagcagaagacttcccaaaggcgtgaagcatctcaaagacttccccattttgccaggcgagatctttaagtacaaatggaccgtcacagtggaagatggaccgactaaatcagaccctcgatgccttacgcggtactattcctccttcgtgaatatggagagagatttggcaagcggactcataggaccactcctcatctgttacaaggaatctgtagaccagaggggtaaccagattatgagtgataaacgcaatgtgatcctttttagcgtcttcgacgagaaccggtcctggtacttgaccgagaatatacaaaggttccttcccaaccccgcaggcgttcagttggaagaccctgagtttcaggccagcaatattatgcactcaatcaacggctatgtgtttgatagtctccagctttctgtttgcctccatgaagtagcctattggtacatcttgtcaattggtgctcaaacagacttcctctccgtcttcttctccggctacacctttaagcacaagatggtgtatgaggacactctcacactctttccattttctggagaaaccgtgttcatgagcatggagaatccaggcctttggatcttgggttgccacaacagtgattttcgcaatcggggaatgactgctctcctcaaagtcagcagctgtgataagaacacaggcgactattacgaagattcttacgaggacataagtgcctacgctttgtccaagaataacgccattgagcccagatcattctcccagaatcctcccgtgcttaaaaggcatcagcgcgaaatcaccagaactactcttcagtctgatcaagaggagattgactatgacgacaccataagcgtggaaatgaagaaggaggatttcgatatctatgacgaagatgagaaccagtctccgcggagctttcagaagaagacgcgacactacttcattgcagcagtcgaaaggctttgggactacggtatgtcatcatcccctcatgtgttgcgcaatagagctcagagtggaagtgttccacagttcaagaaagtcgtctttcaagagtttacagatggcagcttcacacagcctctctatcggggcgagcttaacgaacatttgggactccttggtccctatatccgagccgaagtggaggacaacattatggttacctttaggaatcaagcctctcgcccctacagcttctactcctccctcatcagttatgaggaggatcagagacaaggcgctgaaccacggaagaactttgtgaaaccgaatgagacgaagacctacttctggaaagtacagcaccacatggcccccacaaaagacgaattcgattgcaaagcatgggcgtatttttcagacgttgacttggagaaagatgtacattcaggacttattggtcctttgttggtgtgtcacactaacactctcaatccagcccatggcaggcaggtgacagtccaggaattcgctcttttctttaccatctttgatgagaccaagtcctggtacttcacggaaaacatggagcgcaattgcagagccccctgtaacatacagatggaggaccctacctttaaggaaaattatcggttccacgcaatcaacggatacattatggatacactccctggccttgtgatggctcaggaccaacgaatcaggtggtacctcctcagcatgggttctaatgagaacatacactccattcacttttcaggacatgtgttcactgtccggaagaaagaagagtataagatggccctctacaatttgtatccaggcgtgtttgagaccgttgaaatgcttccctctaaagctggcatctggagagtagagtgcttgatcggagaacatcttcacgcaggtatgagcaccttgttcctcgtgtacagcaacaaatgtcagaccccacttggcatggccagtggacacattcgcgactttcagatcacagcatctggccagtatggacaatgggccccaaagttggctcgcctccattactccggtagcataaatgcgtggtccactaaagaacctttcagctggattaaggtcgatcttcttgcccccatgatcatccacggcattaagacacagggagcgaggcagaaattctcctccctctacatctcacagttcattattatgtatagtttggacggcaagaagtggcaaacttatagaggtaacagtactggaacactcatggtgttcttcggcaacgttgatagctctggcatcaaacacaacatctttaatcctcccataatagctcggtacatcagattgcatccgacccactacagcattaggagtacactccgaatggagcttatgggttgcgacttgaattcctgttcaatgccactcggaatggagtctaaagccatctctgatgcacagataaccgccagtagctactttacgaacatgtttgctacgtggtcaccctctaaggcaaggcttcatttgcaaggccggtctaatgcctggagacctcaggtgaacaacccgaaagaatggctccaggtggactttcagaagaccatgaaagtaacaggtgtcactactcagggagttaagtccttgctcaccagcatgtatgtgaaggagttccttatttcctcatcacaagatggccaccagtggaccctcttctttcagaatggtaaggtcaaagtgtttcagggcaatcaagacagcttcacacccgtggtgaacagtcttgatcctccactcttgacacgataccttcgaatccatccacagtcttgggttcaccagattgcattgcgcatggaagtacttggatgcgaggctcaggacctctac

SEQ ID NO: 2498 - protein, 1457 aa, synthetic construct
  REGION 1..1457: note = Variant of human B-domain deleted Factor VIII
MQIELSTCFFLCLLRFCFSATRRYYLGAVELSWDYMQSDLGELPVDARFPPRVPKSFPFNTSVVYKKTLFVEFTDHLFNIAKPRPPWMGLLGPTIQAEVYDTVVITLKNMASHPVSLHAVGVSYWKASEGAEYDDQTSQREKEDDKVFPGGSHTYVWQVLKENGPMASDPLCLTYSYLSHVDLVKDLNSGLIGALLVCREGSLAKEKTQTLHKFILLFAVFDEGKSWHSETKNSLMQDRDAASARAWPKMHTVNGYVNRSLPGLIGCHRKSVYWHVIGMGTTPEVHSIFLEGHTFLVRNHRQASLEISPITFLTAQTLLMDLGQFLLFCHISSHQHDGMEAYVKVDSCPEEPQLRMKNNEEAEDYDDDLTDSEMDVVRFDDDNSPSFIQIRSVAKKHPKTWVHYIAAEEEDWDYAPLVLAPDDRSYKSQYLNNGPQRIGRKYKKVRFMAYTDETFKTREAIQHESGILGPLLYGEVGDTLLIIFKNQASRPYNIYPHGITDVRPLYSRRLPKGVKHLKDFPILPGEIFKYKWTVTVEDGPTKSDPRCLTRYYSSFVNMERDLASGLIGPLLICYKESVDQRGNQIMSDKRNVILFSVFDENRSWYLTENIQRFLPNPAGVQLEDPEFQASNIMHSINGYVFDSLQLSVCLHEVAYWYILSIGAQTDFLSVFFSGYTFKHKMVYEDTLTLFPFSGETVFMSMENPGLWILGCHNSDFRNRGMTALLKVSSCDKNTGDYYEDSYEDISAYALSKNNAIEPRSFSQNPPVLKRHQREITRTTLQSDQEEIDYDDTISVEMKKEDFDIYDEDENQSPRSFQKKTRHYFIAAVERLWDYGMSSSPHVLRNRAQSGSVPQFKKVVFQEFTDGSFTQPLYRGELNEHLGLLGPYIRAEVEDNIMVTFRNQASRPYSFYSSLISYEEDQRQGAEPRKNFVKPNETKTYFWKVQHHMAPTKDEFDCKAWAYFSDVDLEKDVHSGLIGPLLVCHTNTLNPAHGRQVTVQEFALFFTIFDETKSWYFTENMERNCRAPCNIQMEDPTFKENYRFHAINGYIMDTLPGLVMAQDQRIRWYLLSMGSNENIHSIHFSGHVFTVRKKEEYKMALYNLYPGVFETVEMLPSKAGIWRVECLIGEHLHAGMSTLFLVYSNKCQTPLGMASGHIRDFQITASGQYGQWAPKLARLHYSGSINAWSTKEPFSWIKVDLLAPMIIHGIKTQGARQKFSSLYISQFIIMYSLDGKKWQTYRGNSTGTLMVFFGNVDSSGIKHNIFNPPIIARYIRLHPTHYSIRSTLRMELMGCDLNSCSMPLGMESKAISDAQITASSYFTNMFATWSPSKARLHLQGRSNAWRPQVNNPKEWLQVDFQKTMKVTGVTTQGVKSLLTSMYVKEFLISSSQDGHQWTLFFQNGKVKVFQGNQDSFTPVVNSLDPPLLTRYLRIHPQSWVHQIALRMEVLGCEAQDLY

SEQ ID NO: 2499 - DNA, 4371 bp, synthetic construct
  misc_feature 1..4371: note = Variant of human B-domain deleted Factor VIII
  source 1..4371: mol_type = other DNA
atgcagattgaactgtctacctgcttcttcctctgtttgctgaggttctgctttagcgccactagacggtactaccttggcgctgtggagctgtcctgggactatatgcagagtgatttgggagagcttcccgtcgacgcacgatttcctcctcgcgttccaaagtcatttcccttcaacacaagcgtggtgtacaagaagacgctcttcgtcgaattcaccgatcacctgttcaatatcgccaaacccagaccaccatggatgggtcttttggggcctaccatacaagcggaggtgtatgacacagttgttatcactctcaagaacatggcttctcatccggtaagtcttcacgcagtgggcgtgtcctactggaaagcttcagaaggagccgagtatgatgatcagacatcccagagggagaaagaagacgacaaggtatttccaggtgggtctcatacctatgtgtggcaagtgctcaaagagaatggccctatggcaagcgatccgctctgtttgacttacagctacctttcacacgttgacctcgtcaaggacctcaactccgggttgattggagccttgttggtatgcagggaaggatctcttgccaaagagaagacacagaccctccacaagtttatccttctctttgctgtgttcgatgagggcaaaagttggcatagcgaaacgaagaattccctcatgcaggatcgcgacgcagccagcgccagagcttggcccaagatgcacactgtgaacggatatgtcaataggtcacttcctggcttgattgggtgtcatcggaaaagtgtctactggcacgtgatcggaatggggacaacaccagaggtccactccatatttctcgaaggccataccttccttgttcgaaaccacagacaggcatccttggagatctctcccattacctttctcactgcccaaacgctccttatggacttgggtcagttccttctcttctgccatatcagctcacaccagcatgatggtatggaagcttatgtgaaagtcgacagttgtcctgaggagccacagttgcgcatgaagaataatgaagaagccgaggattacgacgacgatctcaccgattctgagatggacgtggtgaggtttgatgacgacaactctccctccttcattcaaatccggagcgtggcgaagaaacaccccaagacttgggtccactatatagcggcggaagaggaggattgggattacgctcctcttgtattggcaccagatgaccgctcatacaaaagccagtacctcaacaacggaccgcagagaattggccggaagtataagaaagtgcgatttatggcctatacagacgaaacctttaagacaagggaggccatccagcatgagagtgggattttgggacctcttctttacggcgaagttggtgataccctcctcatcatcttcaagaatcaagcttctcgcccctataacatttacccacacgggatcactgacgttaggcctttgtatagcagaagacttcccaaaggcgtgaagcatctcaaagacttccccattttgccaggcgagatctttaagtacaaatggaccgtcacagtggaagatggaccgactaaatcagaccctcgatgccttacgcggtactattcctccttcgtgaatatggagagagatttggcaagcggactcataggaccactcctcatctgttacaaggaatctgtagaccagaggggtaaccagattatgagtgataaacgcaatgtgatcctttttagcgtcttcgacgagaaccggtcctggtacttgaccgagaatatacaaaggttccttcccaaccccgcaggcgttcagttggaagaccctgagtttcaggccagcaatattatgcactcaatcaacggctatgtgtttgatagtctccagctttctgtttgcctccatgaagtagcctattggtacatcttgtcaattggtgctcaaacagacttcctctccgtcttcttctccggctacacctttaagcacaagatggtgtatgaggacactctcacactctttccattttctggagaaaccgtgttcatgagcatggagaatccaggcctttggatcttgggttgccacaacagtgattttcgcaatcggggaatgactgctctcctcaaagtcagcagctgtgataagaacacaggcgactattacgaagattcttacgaggacataagtgcctacttgttgtcccttaataacgccattgagcccagatcattctcccagaatcctcccgtgcttaaaaggcatcagcgcgaaatcaccagaactactcttcagtctgatcaagaggagattgactatgacgacaccataagcgtggaaatgaagaaggaggatttcgatatctatgacgaagatgagaaccagtctccgcggagctttcagaagaagacgcgacactacttcattgcagcagtcgaaaggctttgggactacggtatgtcatcatcccctcatgtgttgcgcaatagagctcagagtggaagtgttccacagttcaagaaagtcgtctttcaagagtttacagatggcagcttcacacagcctctctatcggggcgagcttaacgaacatttgggactccttggtccctatatccgagccgaagtggaggacaacattatggttacctttaggaatcaagcctctcgcccctacagcttctactcctccctcatcagttatgaggaggatcagagacaaggcgctgaaccacggaagaactttgtgaaaccgaatgagacgaagacctacttctggaaagtacagcaccacatggcccccacaaaagacgaattcgattgcaaagcatgggcgtatttttcagacgttgacttggagaaagatgtacattcaggacttattggtcctttgttggtgtgtcacactaacactctcaatccagcccatggcaggcaggtgacagtccaggaattcgctcttttctttaccatctttgatgagaccaagtcctggtacttcacggaaaacatggagcgcaattgcagagccccctgtaacatacagatggaggaccctacctttaaggaaaattatcggttccacgcaatcaacggatacattatggatacactccctggccttgtgatggctcaggaccaacgaatcaggtggtacctcctcagcatgggttctaatgagaacatacactccattcacttttcaggacatgtgttcactgtccggaagaaagaagagtataagatggccctctacaatttgtatccaggcgtgtttgagaccgttgaaatgcttccctctaaagctggcatctggagagtagagtgcttgatcggagaacatcttcacgcaggtatgagcaccttgttcctcgtgtacagcaacaaatgtcagaccccacttggcatggccagtggacacattcgcgactttcagatcacagcatctggccagtatggacaatgggccccaaagttggctcgcctccattactccggtagcataaatgcgtggtccactaaagaacctttcagctggattaaggtcgatcttcttgcccccatgatcatccacggcattaagacacagggagcgaggcagaaattctcctccctctacatctcacagttcattattatgtatagtttggacggcaagaagtggcaaacttatagaggtaacagtactggaacactcatggtgttcttcggcaacgttgatagctctggcatcaaacacaacatctttaatcctcccataatagctcggtacatcagattgcatccgacccactacagcattaggagtacactccgaatggagcttatgggttgcgacttgaattcctgttcaatgccactcggaatggagtctaaagccatctctgatgcacagataaccgccagtagctactttacgaacatgtttgctacgtggtcaccctctaaggcaaggcttcatttgcaaggccggtctaatgcctggagacctcaggtgaacaacccgaaagaatggctccaggtggactttcagaagaccatgaaagtaacaggtgtcactactcagggagttaagtccttgctcaccagcatgtatgtgaaggagttccttatttcctcatcacaagatggccaccagtggaccctcttctttcagaatggtaaggtcaaagtgtttcagggcaatcaagacagcttcacacccgtggtgaacagtcttgatcctccactcttgacacgataccttcgaatccatccacagtcttgggttcaccagattgcattgcgcatggaagtacttggatgcgaggctcaggacctctac

SEQ ID NO: 2500 - protein, 1457 aa, synthetic construct
  REGION 1..1457: note = Variant of human B-domain deleted Factor VIII
MQIELSTCFFLCLLRFCFSATRRYYLGAVELSWDYMQSDLGELPVDARFPPRVPKSFPFNTSVVYKKTLFVEFTDHLFNIAKPRPPWMGLLGPTIQAEVYDTVVITLKNMASHPVSLHAVGVSYWKASEGAEYDDQTSQREKEDDKVFPGGSHTYVWQVLKENGPMASDPLCLTYSYLSHVDLVKDLNSGLIGALLVCREGSLAKEKTQTLHKFILLFAVFDEGKSWHSETKNSLMQDRDAASARAWPKMHTVNGYVNRSLPGLIGCHRKSVYWHVIGMGTTPEVHSIFLEGHTFLVRNHRQASLEISPITFLTAQTLLMDLGQFLLFCHISSHQHDGMEAYVKVDSCPEEPQLRMKNNEEAEDYDDDLTDSEMDVVRFDDDNSPSFIQIRSVAKKHPKTWVHYIAAEEEDWDYAPLVLAPDDRSYKSQYLNNGPQRIGRKYKKVRFMAYTDETFKTREAIQHESGILGPLLYGEVGDTLLIIFKNQASRPYNIYPHGITDVRPLYSRRLPKGVKHLKDFPILPGEIFKYKWTVTVEDGPTKSDPRCLTRYYSSFVNMERDLASGLIGPLLICYKESVDQRGNQIMSDKRNVILFSVFDENRSWYLTENIQRFLPNPAGVQLEDPEFQASNIMHSINGYVFDSLQLSVCLHEVAYWYILSIGAQTDFLSVFFSGYTFKHKMVYEDTLTLFPFSGETVFMSMENPGLWILGCHNSDFRNRGMTALLKVSSCDKNTGDYYEDSYEDISAYLLSLNNAIEPRSFSQNPPVLKRHQREITRTTLQSDQEEIDYDDTISVEMKKEDFDIYDEDENQSPRSFQKKTRHYFIAAVERLWDYGMSSSPHVLRNRAQSGSVPQFKKVVFQEFTDGSFTQPLYRGELNEHLGLLGPYIRAEVEDNIMVTFRNQASRPYSFYSSLISYEEDQRQGAEPRKNFVKPNETKTYFWKVQHHMAPTKDEFDCKAWAYFSDVDLEKDVHSGLIGPLLVCHTNTLNPAHGRQVTVQEFALFFTIFDETKSWYFTENMERNCRAPCNIQMEDPTFKENYRFHAINGYIMDTLPGLVMAQDQRIRWYLLSMGSNENIHSIHFSGHVFTVRKKEEYKMALYNLYPGVFETVEMLPSKAGIWRVECLIGEHLHAGMSTLFLVYSNKCQTPLGMASGHIRDFQITASGQYGQWAPKLARLHYSGSINAWSTKEPFSWIKVDLLAPMIIHGIKTQGARQKFSSLYISQFIIMYSLDGKKWQTYRGNSTGTLMVFFGNVDSSGIKHNIFNPPIIARYIRLHPTHYSIRSTLRMELMGCDLNSCSMPLGMESKAISDAQITASSYFTNMFATWSPSKARLHLQGRSNAWRPQVNNPKEWLQVDFQKTMKVTGVTTQGVKSLLTSMYVKEFLISSSQDGHQWTLFFQNGKVKVFQGNQDSFTPVVNSLDPPLLTRYLRIHPQSWVHQIALRMEVLGCEAQDLY

SEQ ID NO: 2501 - DNA, 4371 bp, synthetic construct
  misc_feature 1..4371: note = Variant of human B-domain deleted Factor VIII
  source 1..4371: mol_type = other DNA
atgcagattgaactgtctacctgcttcttcctctgtttgctgaggttctgctttagcgccactagacggtactaccttggcgctgtggagctgtcctgggactatatgcagagtgatttgggagagcttcccgtcgacgcacgatttcctcctcgcgttccaaagtcatttcccttcaacacaagcgtggtgtacaagaagacgctcttcgtcgaattcaccgatcacctgttcaatatcgccaaacccagaccaccatggatgggtcttttggggcctaccatacaagcggaggtgtatgacacagttgttatcactctcaagaacatggcttctcatccggtaagtcttcacgcagtgggcgtgtcctactggaaagcttcagaaggagccgagtatgatgatcagacatcccagagggagaaagaagacgacaaggtatttccaggtgggtctcatacctatgtgtggcaagtgctcaaagagaatggccctatggcaagcgatccgctctgtttgacttacagctacctttcacacgttgacctcgtcaaggacctcaactccgggttgattggagccttgttggtatgcagggaaggatctcttgccaaagagaagacacagaccctccacaagtttatccttctctttgctgtgttcgatgagggcaaaagttggcatagcgaaacgaagaattccctcatgcaggatcgcgacgcagccagcgccagagcttggcccaagatgcacactgtgaacggatatgtcaataggtcacttcctggcttgattgggtgtcatcggaaaagtgtctactggcacgtgatcggaatggggacaacaccagaggtccactccatatttctcgaaggccataccttccttgttcgaaaccacagacaggcatccttggagatctctcccattacctttctcactgcccaaacgctccttatggacttgggtcagttccttctcttctgccatatcagctcacaccagcatgatggtatggaagcttatgtgaaagtcgacagttgtcctgaggagccacagttgcgcatgaagaataatgaagaagccgaggattacgacgacgatctcaccgattctgagatggacgtggtgaggtttgatgacgacaactctccctccttcattcaaatccggagcgtggcgaagaaacaccccaagacttgggtccactatatagcggcggaagaggaggattgggattacgctcctcttgtattggcaccagatgaccgctcatacaaaagccagtacctcaacaacggaccgcagagaattggccggaagtataagaaagtgcgatttatggcctatacagacgaaacctttaagacaagggaggccatccagcatgagagtgggattttgggacctcttctttacggcgaagttggtgataccctcctcatcatcttcaagaatcaagcttctcgcccctataacatttacccacacgggatcactgacgttaggcctttgtatagcagaagacttcccaaaggcgtgaagcatctcaaagacttccccattttgccaggcgagatctttaagtacaaatggaccgtcacagtggaagatggaccgactaaatcagaccctcgatgccttacgcggtactattcctccttcgtgaatatggagagagatttggcaagcggactcataggaccactcctcatctgttacaaggaatctgtagaccagaggggtaaccagattatgagtgataaacgcaatgtgatcctttttagcgtcttcgacgagaaccggtcctggtacttgaccgagaatatacaaaggttccttcccaaccccgcaggcgttcagttggaagaccctgagtttcaggccagcaatattatgcactcaatcaacggctatgtgtttgatagtctccagctttctgtttgcctccatgaagtagcctattggtacatcttgtcaattggtgctcaaacagacttcctctccgtcttcttctccggctacacctttaagcacaagatggtgtatgaggacactctcacactctttccattttctggagaaaccgtgttcatgagcatggagaatccaggcctttggatcttgggttgccacaacagtgattttcgcaatcggggaatgactgctctcctcaaagtcagcagctgtgataagaacacaggcgactattacgaagattcttacgaggacataagtgcctacttgttgtccaagaataacgccattgagcccagatcattctcccagaatcctcccgtgcttaaaaggcatcagcgcgaaatcaccagaactactcttcagtctgatcaagaggagattgactatgacgacaccataagcgtggaaatgaagaaggaggatttcgatatctatgacgaagatgagaaccagtctccgcggagctttcagaagaagacgcgacactacttcattgcagcagtcgaaaggctttgggactacggtatgtcatcatcccctcatgtgttgcgcaatagagctcagagtggaagtgttccacagttcaagaaagtcgtctttcaagagtttacagatggcagcttcacacagcctctctatcggggcgagcttaacgaacatttgggactccttggtccctatatccgagccgaagtggaggacaacattatggttacctttaggaatcaagcctctcgcccctacagcttctactcctccctcatcagttatgaggaggatcagagacaaggcgctgaaccacggaagaactttgtgaaaccgaatgagacgaagacctacttctggaaagtacagcaccacatggcccccacaaaagacgaattcgattgcaaagcatgggcgtatttttcagacgttgacttggagaaagatgtacattcaggacttattggtcctttgttggtgtgtcacactaacactctcaatccagcccatggcaggcaggtgacagtccaggaattcgctcttttctttaccatctttgatgagaccaagtcctggtacttcacggaaaacatggagcgcaattgcagagccccctgtaacatacagatggaggaccctacctttaaggaaaattatcggttccacgcaatcaacggatacattatggatacactccctggccttgtgatggctcaggaccaacgaatcaggtggtacctcctcagcatgggttctaatgagaacatacactccattcacttttcaggacatgtgttcactgtccggaagaaagaagagtataagatggccctctacaatttgtatccaggcgtgtttgagaccgttgaaatgcttccctctaaagctggcatctggagagtagagtgcttgatcggagaacatcttcacgcaggtatgagcaccttgttcctcgtgtacagcaacaaatgtcagaccccacttggcatggccagtggacacattcgcgactttcagatcacagcatctggccagtatggacaatgggccccaaagttggctcgcctccattactccggtagcataaatgcgtggtccactaaagaacctttcagctggattaaggtcgatcttcttgcccccatgatcatccacggcattaagacacagggagcgaggcagaaattctcctccctctacatctcacagttcattattatgtatagtttggacggcaagaagtggcaaacttatagaggtaacagtactggaacaattatggtgttcttcggcaacgttgatagctctggcatcaaacacaacatctttaatcctcccataatagctcggtacatcagattgcatccgacccactacagcattaggagtacactccgaatggagcttatgggttgcgacttgaattcctgttcaatgccactcggaatggagtctaaagccatctctgatgcacagataaccgccagtagctactttacgaacatgtttgctacgtggtcaccctctaaggcaaggcttcatttgcaaggccggtctaatgcctggagacctcaggtgaacaacccgaaagaatggctccaggtggactttcagaagaccatgaaagtaacaggtgtcactactcagggagttaagtccttgctcaccagcatgtatgtgaaggagttccttatttcctcatcacaagatggccaccagtggaccctcttctttcagaatggtaaggtcaaagtgtttcagggcaatcaagacagcttcacacccgtggtgaacagtcttgatcctccactcttgacacgataccttcgaatccatccacagtcttgggttcaccagattgcattgcgcatggaagtacttggatgcgaggctcaggacctctac

SEQ ID NO: 2502 - protein, 1457 aa, synthetic construct
  REGION 1..1457: note = Variant of human B-domain deleted Factor VIII
MQIELSTCFFLCLLRFCFSATRRYYLGAVELSWDYMQSDLGELPVDARFPPRVPKSFPFNTSVVYKKTLFVEFTDHLFNIAKPRPPWMGLLGPTIQAEVYDTVVITLKNMASHPVSLHAVGVSYWKASEGAEYDDQTSQREKEDDKVFPGGSHTYVWQVLKENGPMASDPLCLTYSYLSHVDLVKDLNSGLIGALLVCREGSLAKEKTQTLHKFILLFAVFDEGKSWHSETKNSLMQDRDAASARAWPKMHTVNGYVNRSLPGLIGCHRKSVYWHVIGMGTTPEVHSIFLEGHTFLVRNHRQASLEISPITFLTAQTLLMDLGQFLLFCHISSHQHDGMEAYVKVDSCPEEPQLRMKNNEEAEDYDDDLTDSEMDVVRFDDDNSPSFIQIRSVAKKHPKTWVHYIAAEEEDWDYAPLVLAPDDRSYKSQYLNNGPQRIGRKYKKVRFMAYTDETFKTREAIQHESGILGPLLYGEVGDTLLIIFKNQASRPYNIYPHGITDVRPLYSRRLPKGVKHLKDFPILPGEIFKYKWTVTVEDGPTKSDPRCLTRYYSSFVNMERDLASGLIGPLLICYKESVDQRGNQIMSDKRNVILFSVFDENRSWYLTENIQRFLPNPAGVQLEDPEFQASNIMHSINGYVFDSLQLSVCLHEVAYWYILSIGAQTDFLSVFFSGYTFKHKMVYEDTLTLFPFSGETVFMSMENPGLWILGCHNSDFRNRGMTALLKVSSCDKNTGDYYEDSYEDISAYLLSKNNAIEPRSFSQNPPVLKRHQREITRTTLQSDQEEIDYDDTISVEMKKEDFDIYDEDENQSPRSFQKKTRHYFIAAVERLWDYGMSSSPHVLRNRAQSGSVPQFKKVVFQEFTDGSFTQPLYRGELNEHLGLLGPYIRAEVEDNIMVTFRNQASRPYSFYSSLISYEEDQRQGAEPRKNFVKPNETKTYFWKVQHHMAPTKDEFDCKAWAYFSDVDLEKDVHSGLIGPLLVCHTNTLNPAHGRQVTVQEFALFFTIFDETKSWYFTENMERNCRAPCNIQMEDPTFKENYRFHAINGYIMDTLPGLVMAQDQRIRWYLLSMGSNENIHSIHFSGHVFTVRKKEEYKMALYNLYPGVFETVEMLPSKAGIWRVECLIGEHLHAGMSTLFLVYSNKCQTPLGMASGHIRDFQITASGQYGQWAPKLARLHYSGSINAWSTKEPFSWIKVDLLAPMIIHGIKTQGARQKFSSLYISQFIIMYSLDGKKWQTYRGNSTGTIMVFFGNVDSSGIKHNIFNPPIIARYIRLHPTHYSIRSTLRMELMGCDLNSCSMPLGMESKAISDAQITASSYFTNMFATWSPSKARLHLQGRSNAWRPQVNNPKEWLQVDFQKTMKVTGVTTQGVKSLLTSMYVKEFLISSSQDGHQWTLFFQNGKVKVFQGNQDSFTPVVNSLDPPLLTRYLRIHPQSWVHQIALRMEVLGCEAQDLY

SEQ ID NO: 2503 - DNA, 4371 bp, synthetic construct
  misc_feature 1..4371: note = Variant of human B-domain deleted Factor VIII
  source 1..4371: mol_type = other DNA
atgcagattgaactgtctacctgcttcttcctctgtttgctgaggttctgctttagcgccactagacggtactaccttggcgctgtggagctgtcctgggactatatgcagagtgatttgggagagcttcccgtcgacgcacgatttcctcctcgcgttccaaagtcatttcccttcaacacaagcgtggtgtacaagaagacgctcttcgtcgaattcaccgatcacctgttcaatatcgccaaacccagaccaccatggatgggtcttttggggcctaccatacaagcggaggtgtatgacacagttgttatcactctcaagaacatggcttctcatccggtaagtcttcacgcagtgggcgtgtcctactggaaagcttcagaaggagccgagtatgatgatcagacatcccagagggagaaagaagacgacaaggtatttccaggtgggtctcatacctatgtgtggcaagtgctcaaagagaatggccctatggcaagcgatccgctctgtttgacttacagctacctttcacacgttgacctcgtcaaggacctcaactccgggttgattggagccttgttggtatgcagggaaggatctcttgccaaagagaagacacagaccctccacaagtttatccttctctttgctgtgttcgatgagggcaaaagttggcatagcgaaacgaagaattccctcatgcaggatcgcgacgcagccagcgccagagcttggcccaagatgcacactgtgaacggatatgtcaataggtcacttcctggcttgattgggtgtcatcggaaaagtgtctactggcacgtgatcggaatggggacaacaccagaggtccactccatatttctcgaaggccataccttccttgttcgaaaccacagacaggcatccttggagatctctcccattacctttctcactgcccaaacgctccttatggacttgggtcagttccttctcttctgccatatcagctcacaccagcatgatggtatggaagcttatgtgaaagtcgacagttgtcctgaggagccacagttgcgcatgaagaataatgaagaagccgaggattacgacgacgatctcaccgattctgagatggacgtggtgaggtttgatgacgacaactctccctccttcattcaaatccggagcgtggcgaagaaacaccccaagacttgggtccactatatagcggcggaagaggaggattgggattacgctcctcttgtattggcaccagatgaccgctcatacaaaagccagtacctcaacaacggaccgcagagaattggccggaagtataagaaagtgcgatttatggcctatacagacgaaacctttaagacaagggaggccatccagcatgagagtgggattttgggacctcttctttacggcgaagttggtgataccctcctcatcatcttcaagaatcaagcttctcgcccctataacatttacccacacgggatcactgacgttaggcctttgtatagcagaagacttcccaaaggcgtgaagcatctcaaagacttccccattttgccaggcgagatctttaagtacaaatggaccgtcacagtggaagatggaccgactaaatcagaccctcgatgccttacgcggtactattcctccttcgtgaatatggagagagatttggcaagcggactcataggaccactcctcatctgttacaaggaatctgtagaccagaggggtaaccagattatgagtgataaacgcaatgtgatcctttttagcgtcttcgacgagaaccggtcctggtacttgaccgagaatatacaaaggttccttcccaaccccgcaggcgttcagttggaagaccctgagtttcaggccagcaatattatgcactcaatcaacggctatgtgtttgatagtctccagctttctgtttgcctccatgaagtagcctattggtacatcttgtcaattggtgctcaaacagacttcctctccgtcttcttctccggctacacctttaagcacaaggcggtgtatgaggacactctcacactctttccattttctggagaaaccgtgttcatgagcatggagaatccaggcctttggatcttgggttgccacaacagtgattttcgcaatcggggaatgactgctctcctcaaagtcagcagctgtgataagaacacaggcgactattacgaagattcttacgaggacataagtgcctacttgttgtccaagaataacgccattgagcccagatcattctcccagaatcctcccgtgcttaaaaggcatcagcgcgaaatcaccagaactactcttcagtctgatcaagaggagattgactatgacgacaccataagcgtggaaatgaagaaggaggatttcgatatctatgacgaagatgagaaccagtctccgcggagctttcagaagaagacgcgacactacttcattgcagcagtcgaaaggctttgggactacggtatgtcatcatcccctcatgtgttgcgcaatagagctcagagtggaagtgttccacagttcaagaaagtcgtctttcaagagtttacagatggcagcttcacacagcctctctatcggggcgagcttaacgaacatttgggactccttggtccctatatccgagccgaagtggaggacaacattatggttacctttaggaatcaagcctctcgcccctacagcttctactcctccctcatcagttatgaggaggatcagagacaaggcgctgaaccacggaagaactttgtgaaaccgaatgagacgaagacctacttctggaaagtacagcaccacatggcccccacaaaagacgaattcgattgcaaagcatgggcgtatttttcagacgttgacttggagaaagatgtacattcaggacttattggtcctttgttggtgtgtcacactaacactctcaatccagcccatggcaggcaggtgacagtccaggaattcgctcttttctttaccatctttgatgagaccaagtcctggtacttcacggaaaacatggagcgcaattgcagagccccctgtaacatacagatggaggaccctacctttaaggaaaattatcggttccacgcaatcaacggatacattatggatacactccctggccttgtgatggctcaggaccaacgaatcaggtggtacctcctcagcatgggttctaatgagaacatacactccattcacttttcaggacatgtgttcactgtccggaagaaagaagagtataagatggccctctacaatttgtatccaggcgtgtttgagaccgttgaaatgcttccctctaaagctggcatctggagagtagagtgcttgatcggagaacatcttcacgcaggtatgagcaccttgttcctcgtgtacagcaacaaatgtcagaccccacttggcatggccagtggacacattcgcgactttcagatcacagcatctggccagtatggacaatgggccccaaagttggctcgcctccattactccggtagcataaatgcgtggtccactaaagaacctttcagctggattaaggtcgatcttcttgcccccatgatcatccacggcattaagacacagggagcgaggcagaaattctcctccctctacatctcacagttcattattatgtatagtttggacggcaagaagtggcaaacttatagaggtaacagtactggaacactcatggtgttcttcggcaacgttgatagctctggcatcaaacacaacatctttaatcctcccataatagctcggtacatcagattgcatccgacccactacagcattaggagtacactccgaatggagcttatgggttgcgacttgaattcctgttcaatgccactcggaatggagtctaaagccatctctgatgcacagataaccgccagtagctactttacgaacatgtttgctacgtggtcaccctctaaggcaaggcttcatttgcaaggccggtctaatgcctggagacctcaggtgaacaacccgaaagaatggctccaggtggactttcagaagaccatgaaagtaacaggtgtcactactcagggagttaagtccttgctcaccagcatgtatgtgaaggagttccttatttcatcatcacaagatggccaccagtggaccctcttctttcagaatggtaaggtcaaagtgtttcagggcaatcaagacagcttcacacccgtggtgaacagtcttgatcctccactcttgacacgataccttcgaatccatccacagtcttgggttcaccagattgcattgcgcatggaagtacttggatgcgaggctcaggacctctac

SEQ ID NO: 2504 - protein, 1457 aa, synthetic construct
  REGION 1..1457: note = Variant of human B-domain deleted Factor VIII
MQIELSTCFFLCLLRFCFSATRRYYLGAVELSWDYMQSDLGELPVDARFPPRVPKSFPFNTSVVYKKTLFVEFTDHLFNIAKPRPPWMGLLGPTIQAEVYDTVVITLKNMASHPVSLHAVGVSYWKASEGAEYDDQTSQREKEDDKVFPGGSHTYVWQVLKENGPMASDPLCLTYSYLSHVDLVKDLNSGLIGALLVCREGSLAKEKTQTLHKFILLFAVFDEGKSWHSETKNSLMQDRDAASARAWPKMHTVNGYVNRSLPGLIGCHRKSVYWHVIGMGTTPEVHSIFLEGHTFLVRNHRQASLEISPITFLTAQTLLMDLGQFLLFCHISSHQHDGMEAYVKVDSCPEEPQLRMKNNEEAEDYDDDLTDSEMDVVRFDDDNSPSFIQIRSVAKKHPKTWVHYIAAEEEDWDYAPLVLAPDDRSYKSQYLNNGPQRIGRKYKKVRFMAYTDETFKTREAIQHESGILGPLLYGEVGDTLLIIFKNQASRPYNIYPHGITDVRPLYSRRLPKGVKHLKDFPILPGEIFKYKWTVTVEDGPTKSDPRCLTRYYSSFVNMERDLASGLIGPLLICYKESVDQRGNQIMSDKRNVILFSVFDENRSWYLTENIQRFLPNPAGVQLEDPEFQASNIMHSINGYVFDSLQLSVCLHEVAYWYILSIGAQTDFLSVFFSGYTFKHKAVYEDTLTLFPFSGETVFMSMENPGLWILGCHNSDFRNRGMTALLKVSSCDKNTGDYYEDSYEDISAYLLSKNNAIEPRSFSQNPPVLKRHQREITRTTLQSDQEEIDYDDTISVEMKKEDFDIYDEDENQSPRSFQKKTRHYFIAAVERLWDYGMSSSPHVLRNRAQSGSVPQFKKVVFQEFTDGSFTQPLYRGELNEHLGLLGPYIRAEVEDNIMVTFRNQASRPYSFYSSLISYEEDQRQGAEPRKNFVKPNETKTYFWKVQHHMAPTKDEFDCKAWAYFSDVDLEKDVHSGLIGPLLVCHTNTLNPAHGRQVTVQEFALFFTIFDETKSWYFTENMERNCRAPCNIQMEDPTFKENYRFHAINGYIMDTLPGLVMAQDQRIRWYLLSMGSNENIHSIHFSGHVFTVRKKEEYKMALYNLYPGVFETVEMLPSKAGIWRVECLIGEHLHAGMSTLFLVYSNKCQTPLGMASGHIRDFQITASGQYGQWAPKLARLHYSGSINAWSTKEPFSWIKVDLLAPMIIHGIKTQGARQKFSSLYISQFIIMYSLDGKKWQTYRGNSTGTLMVFFGNVDSSGIKHNIFNPPIIARYIRLHPTHYSIRSTLRMELMGCDLNSCSMPLGMESKAISDAQITASSYFTNMFATWSPSKARLHLQGRSNAWRPQVNNPKEWLQVDFQKTMKVTGVTTQGVKSLLTSMYVKEFLISSSQDGHQWTLFFQNGKVKVFQGNQDSFTPVVNSLDPPLLTRYLRIHPQSWVHQIALRMEVLGCEAQDLY

SEQ ID NO: 2505 - DNA, 4371 bp, synthetic construct
  misc_feature 1..4371: note = Variant of human B-domain deleted Factor VIII
  source 1..4371: mol_type = other DNA
atgcagattgaactgtctacctgcttcttcctctgtttgctgaggttctgctttagcgccactagacggtactaccttggcgctgtggagctgtcctgggactatatgcagagtgatttgggagagcttcccgtcgacgcacgatttcctcctcgcgttccaaagtcatttcccttcaacacaagcgtggtgtacaagaagacgctcttcgtcgaattcaccgatcacctgttcaatatcgccaaacccagaccaccatggatgggtcttttggggcctaccatacaagcggaggtgtatgacacagttgttatcactctcaagaacatggcttctcatccggtaagtcttcacgcagtgggcgtgtcctactggaaagcttcagaaggagccgagtatgatgatcagacatcccagagggagaaagaagacgacaaggtatttccaggtgggtctcatacctatgtgtggcaagtgctcaaagagaatggccctatggcaagcgatccgcggtgtttgacttacagctacctttcacacgttgacctcgtcaaggacctcaactccgggttgattggagccttgttggtatgcagggaaggatctcttgccaaagagaagacacagaccctccacaagtttatccttctctttgctgtgttcgatgagggcaaaagttggcatagcgaaacgaagaattccctcatgcaggatcgcgacgcagccagcgccagagcttggcccaagatgcacactgtgaacggatatgtcaataggtcacttcctggcttgattgggtgtcatcggaaaagtgtctactggcacgtgatcggaatggggacaacaccagaggtccactccatatttctcgaaggccataccttccttgttcgaaaccacagacaggcatccttggagatctctcccattacctttctcactgcccaaacgctccttatggacttgggtcagttccttctcttctgccatatcagctcacaccagcatgatggtatggaagcttatgtgaaagtcgacagttgtcctgaggagccacagttgcgcatgaagaataatgaagaagccgaggattacgacgacgatctcaccgattctgagatggacgtggtgaggtttgatgacgacaactctccctccttcattcaaatccggagcgtggcgaagaaacaccccaagacttgggtccactatatagcggcggaagaggaggattgggattacgctcctcttgtattggcaccagatgaccgctcatacaaaagccagtacctcaacaacggaccgcagagaattggccggaagtataagaaagtgcgatttatggcctatacagacgaaacctttaagacaagggaggccatccagcatgagagtgggattttgggacctcttctttacggcgaagttggtgataccctcctcatcatcttcaagaatcaagcttctcgcccctataacatttacccacacgggatcactgacgttaggcctttgtatagcagaagacttcccaaaggcgtgaagcatctcaaagacttccccattttgccaggcgagatctttaagtacaaatggaccgtcacagtggaagatggaccgactaaatcagaccctcgatgccttacgcggtactattcctccttcgtgaatatggagagagatttggcaagcggactcataggaccactcctcatctgttacaaggaatctgtagaccagaggggtaaccagattatgagtgataaacgcaatgtgatcctttttagcgtcttcgacgagaaccggtcctggtacttgaccgagaatatacaaaggttccttcccaaccccgcaggcgttcagttggaagaccctgagtttcaggccagcaatattatgcactcaatcaacggctatgtgtttgatagtctccagctttctgtttgcctccatgaagtagcctattggtacatcttgtcaattggtgctcaaacagacttcctctccgtcttcttctccggctacacctttaagcacaagatggtgtatgaggacactctcacactctttccattttctggagaaaccgtgttcatgagcatggagaatccaggcctttggatcttgggttgccacaacagtgattttcgcaatcggggaatgactgctctcctcaaagtcagcagctgtgataagaacacaggcgactattacgaagattcttacgaggacataagtgcctacttgttgtccaagaataacgccattgagcccagatcattctcccagaatcctcccgtgcttaaaaggcatcagcgcgaaatcaccagaactactcttcagtctgatcaagaggagattgactatgacgacaccataagcgtggaaatgaagaaggaggatttcgatatctatgacgaagatgagaaccagtctccgcggagctttcagaagaagacgcgacactacttcattgcagcagtcgaaaggctttgggactacggtatgtcatcatcccctcatgtgttgcgcaatagagctcagagtggaagtgttccacagttcaagaaagtcgtctttcaagagtttacagatggcagcttcacacagcctctctatcggggcgagcttaacgaacatttgggactccttggtccctatatccgagccgaagtggaggacaacattatggttacctttaggaatcaagcctctcgcccctacagcttctactcctccctcatcagttatgaggaggatcagagacaaggcgctgaaccacggaagaactttgtgaaaccgaatgagacgaagacctacttctggaaagtacagcaccacatggcccccacaaaagacgaattcgattgcaaagcatgggcgtatttttcagacgttgacttggagaaagatgtacattcaggacttattggtcctttgttggtgtgtcacactaacactctcaatccagcccatggcaggcaggtgacagtccaggaattcgctcttttctttaccatctttgatgagaccaagtcctggtacttcacggaaaacatggagcgcaattgcagagccccctgtaacatacagatggaggaccctacctttaaggaaaattatcggttccacgcaatcaacggatacattatggatacactccctggccttgtgatggctcaggaccaacgaatcaggtggtacctcctcagcatgggttctaatgagaacatacactccattcacttttcaggacatgtgttcactgtccggaagaaagaagagtataagatggccctctacaatttgtatccaggcgtgtttgagaccgttgaaatgcttccctctaaagctggcatctggagagtagagtgcttgatcggagaacatcttcacgcaggtatgagcaccttgttcctcgtgtacagcaacaaatgtcagaccccacttggcatggccagtggacacattcgcgactttcagatcacagcatctggccagtatggacaatgggccccaaagttggctcgcctccattactccggtagcataaatgcgtggtccactaaagaacctttcagctggattaaggtcgatcttcttgcccccatgatcatccacggcattaagacacagggagcgaggcagaaattctcctccctctacatctcacagttcattattatgtatagtttggacggcaagaagtggcaaacttatagaggtaacagtactggaacactcatggtgttcttcggcaacgttgatagctctggcatcaaacacaacatctttaatcctcccataatagctcggtacatcagattgcatccgacccactacagcattaggagtacactccgaatggagcttatgggttgcgacttgaattcctgttcaatgccactcggaatggagtctaaagccatctctgatgcacagataaccgccagtagctactttacgaacatgtttgctacgtggtcaccctctaaggcaaggcttcatttgcaaggccggtctaatgcctggagacctcaggtgaacaacccgaaagaatggctccaggtggactttcagaagaccatgaaagtaacaggtgtcactactcagggagttaagtccttgctcaccagcatgtatgtgaaggagttccttatttcctcatcacaagatggccaccagtggaccctcttctttcagaatggtaaggtcaaagtgtttcagggcaatcaagacagcttcacacccgtggtgaacagtcttgatcctccactcttgacacgataccttcgaatccatccacagtcttgggttcaccagattgcattgcgcatggaagtacttggatgcgaggctcaggacctctac

SEQ ID NO: 2506 - protein, 1457 aa, synthetic construct
  REGION 1..1457: note = Variant of human B-domain deleted Factor VIII
MQIELSTCFFLCLLRFCFSATRRYYLGAVELSWDYMQSDLGELPVDARFPPRVPKSFPFNTSVVYKKTLFVEFTDHLFNIAKPRPPWMGLLGPTIQAEVYDTVVITLKNMASHPVSLHAVGVSYWKASEGAEYDDQTSQREKEDDKVFPGGSHTYVWQVLKENGPMASDPRCLTYSYLSHVDLVKDLNSGLIGALLVCREGSLAKEKTQTLHKFILLFAVFDEGKSWHSETKNSLMQDRDAASARAWPKMHTVNGYVNRSLPGLIGCHRKSVYWHVIGMGTTPEVHSIFLEGHTFLVRNHRQASLEISPITFLTAQTLLMDLGQFLLFCHISSHQHDGMEAYVKVDSCPEEPQLRMKNNEEAEDYDDDLTDSEMDVVRFDDDNSPSFIQIRSVAKKHPKTWVHYIAAEEEDWDYAPLVLAPDDRSYKSQYLNNGPQRIGRKYKKVRFMAYTDETFKTREAIQHESGILGPLLYGEVGDTLLIIFKNQASRPYNIYPHGITDVRPLYSRRLPKGVKHLKDFPILPGEIFKYKWTVTVEDGPTKSDPRCLTRYYSSFVNMERDLASGLIGPLLICYKESVDQRGNQIMSDKRNVILFSVFDENRSWYLTENIQRFLPNPAGVQLEDPEFQASNIMHSINGYVFDSLQLSVCLHEVAYWYILSIGAQTDFLSVFFSGYTFKHKMVYEDTLTLFPFSGETVFMSMENPGLWILGCHNSDFRNRGMTALLKVSSCDKNTGDYYEDSYEDISAYLLSKNNAIEPRSFSQNPPVLKRHQREITRTTLQSDQEEIDYDDTISVEMKKEDFDIYDEDENQSPRSFQKKTRHYFIAAVERLWDYGMSSSPHVLRNRAQSGSVPQFKKVVFQEFTDGSFTQPLYRGELNEHLGLLGPYIRAEVEDNIMVTFRNQASRPYSFYSSLISYEEDQRQGAEPRKNFVKPNETKTYFWKVQHHMAPTKDEFDCKAWAYFSDVDLEKDVHSGLIGPLLVCHTNTLNPAHGRQVTVQEFALFFTIFDETKSWYFTENMERNCRAPCNIQMEDPTFKENYRFHAINGYIMDTLPGLVMAQDQRIRWYLLSMGSNENIHSIHFSGHVFTVRKKEEYKMALYNLYPGVFETVEMLPSKAGIWRVECLIGEHLHAGMSTLFLVYSNKCQTPLGMASGHIRDFQITASGQYGQWAPKLARLHYSGSINAWSTKEPFSWIKVDLLAPMIIHGIKTQGARQKFSSLYISQFIIMYSLDGKKWQTYRGNSTGTLMVFFGNVDSSGIKHNIFNPPIIARYIRLHPTHYSIRSTLRMELMGCDLNSCSMPLGMESKAISDAQITASSYFTNMFATWSPSKARLHLQGRSNAWRPQVNNPKEWLQVDFQKTMKVTGVTTQGVKSLLTSMYVKEFLISSSQDGHQWTLFFQNGKVKVFQGNQDSFTPVVNSLDPPLLTRYLRIHPQSWVHQIALRMEVLGCEAQDLY

SEQ ID NO: 2507 - DNA, 4371 bp, synthetic construct
  misc_feature 1..4371: note = Variant of human B-domain deleted Factor VIII
  source 1..4371: mol_type = other DNA
atgcagattgaactgtctacctgcttcttcctctgtttgctgaggttctgctttagcgccactagacggtactaccttggcgctgtggagctgtcctgggactatatgcagagtgatttgggagagcttcccgtcgacgcacgatttcctcctcgcgttccaaagtcatttcccttcaacacaagcgtggtgtacaagaagacgctcttcgtcgaattcaccgatcacctgttcaatatcgccaaacccagaccaccatggatgggtcttttggggcctaccatacaagcggaggtgtatgacacagttgttatcactctcaagaacatggcttctcatccggtaagtcttcacgcagtgggcgtgtcctactggaaagcttcagaaggagccgagtatgatgatcagacatcccagagggagaaagaagacgacaaggtatttccaggtgggtctcatacctatgtgtggcaagtgctcaaagagaatggccctatggcaagcgatccgctctgtttgacttacagctacctttcacacgttgacctcgtcaaggacctcaactccgggttgattggagccttgttggtatgcagggaaggatctcttgccaaagagaagacacagaccctccacaagtttatccttctctttgctgtgttcgatgagggcaaaagttggcatagcgaaacgaagaattccctcatgcaggatcgcgacgcagccagcgccagagcttggcccaagatgcacactgtgaacggatatgtcaataggtcacttcctggcttgattgggtgtcatcggaaaagtgtctactggcacgtgatcggaatggggacaacaccagaggtccactccatatttctcgaaggccataccttccttgttcgaaaccacagacaggcatccttggagatctctcccattacctttctcactgcccaaacgctccttatggacttgggtcagttccttctcttctgccatatcagctcacaccagcatgatggtatggaagcttatgtgaaagtcgacagttgtcctgaggagccacagttgcgcatgaagaataatgaagaagccgaggattacgacgacgatctcaccgattctgagatggacgtggtgaggtttgatgacgacaactctccctccttcattcaaatccggagcgtggcgaagaaacaccccaagacttgggtccactatatagcggcggaagaggaggattgggattacgctcctcttgtattggcaccagatgaccgctcatacaaaagccagtacctcaacaacggaccgcagagaattggccggaagtataagaaagtgcgatttatggcctatacagacgaaacctttaagacaagggaggccatccagcatgagagtgggattttgggacctcttctttacggcgaagttggtgataccctcctcatcatcttcaagaatcaagcttctcgcccctataacatttacccacacgggatcactgacgttaggcctttgtatagcagaagacttcccaaaggcgtgaagcatctcaaagacttccccattttgccaggcgagatctttaagtacaaatggaccgtcacagtggaagatggaccgactaaatcagaccctcgatgccttacgcggtactattcctccttcgtgaatatggagagagatttggcaagcggactcataggaccactcctcatctgttacaaggaatctgtagaccagaggggtaaccagattatgagtgataaacgcaatgtgatcctttttagcgtcttcgacgagaaccggtcctggtacttgaccgagaatatacaaaggttccttcccaaccccgcaggcgttcagttggaagaccctgagtttcaggccagcaatattatgcactcaatcaacggctatgtgtttgatagtctccagctttctgtttgcctccatgaagtagcctattggtacatcttgtcaattggtgctcaaacagacttcctctccgtcttcttctccggctacacctttaagcacaagatggtgtatgaggacactctcacactctttccattttctggagaaaccgtgttcatgagcatggagaatccaggcctttggatcttgggttgccacaacagtgattttcgcaatcggggaatgactgctctcctcaaagtcagcagctgtgataagaacacaggcgactattacgaagattcttacgaggacataagtgcctacttgttgtccaagaataacgccattgagcccagatcattctcccagaatcctcccgtgcttaaaaggcatcagcgcgaaaataccagaactactcttcagtctgatcaagaggagattgactatgacgacaccataagcgtggaaatgaagaaggaggatttcgatatctatgacgaagatgagaaccagtctccgcggagctttcagaagaagacgcgacactacttcattgcagcagtcgaaaggctttgggactacggtatgtcatcatcccctcatgtgttgcgcaatagagctcagagtggaagtgttccacagttcaagaaagtcgtctttcaagagtttacagatggcagcttcacacagcctctctatcggggcgagcttaacgaacatttgggactccttggtccctatatccgagccgaagtggaggacaacattatggttacctttaggaatcaagcctctcgcccctacagcttctactcctccctcatcagttatgaggaggatcagagacaaggcgctgaaccacggaagaactttgtgaaaccgaatgagacgaagacctacttctggaaagtacagcaccacatggcccccacaaaagacgaattcgattgcaaagcatgggcgtatttttcagacgttgacttggagaaagatgtacattcaggacttattggtcctttgttggtgtgtcacactaacactctcaatccagcccatggcaggcaggtgacagtccaggaattcgctcttttctttaccatctttgatgagaccaagtcctggtacttcacggaaaacatggagcgcaattgcagagccccctgtaacatacagatggaggaccctacctttaaggaaaattatcggttccacgcaatcaacggatacattatggatacactccctggccttgtgatggctcaggaccaacgaatcaggtggtacctcctcagcatgggttctaatgagaacatacactccattcacttttcaggacatgtgttcactgtccggaagaaagaagagtataagatggccctctacaatttgtatccaggcgtgtttgagaccgttgaaatgcttccctctaaagctggcatctggagagtagagtgcttgatcggagaacatcttcacgcaggtatgagcaccttgttcctcgtgtacagcaacaaatgtcagaccccacttggcatggccagtggacacattcgcgactttcagatcacagcatctggccagtatggacaatgggccccaaagttggctcgcctccattactccggtagcataaatgcgtggtccactaaagaacctttcagctggattaaggtcgatcttcttgcccccatgatcatccacggcattaagacacagggagcgaggcagaaattctcctccctctacatctcacagttcattattatgtatagtttggacggcaagaagtggcaaacttatagaggtaacagtactggaacactcatggtgttcttcggcaacgttgatagctctggcatcaaacacaacatctttaatcctcccataatagctcggtacatcagattgcatccgacccactacagcattaggagtacactccgaatggagcttatgggttgcgacttgaattcctgttcaatgccactcggaatggagtctaaagccatctctgatgcacagataaccgccagtagctactttacgaacatgtttgctacgtggtcaccctctaaggcaaggcttcatttgcaaggccggtctaatgcctggagacctcaggtgaacaacccgaaagaatggctccaggtggactttcagaagaccatgaaagtaacaggtgtcactactcagggagttaagtccttgctcaccagcatgtatgtgaaggagttccttatttcctcatcacaagatggccaccagtggaccctcttctttcagaatggtaaggtcaaagtgtttcagggcaatcaagacagcttcacacccgtggtgaacagtcttgatcctccactcttgacacgataccttcgaatccatccacagtcttgggttcaccagattgcattgcgcatggaagtacttggatgcgaggctcaggacctctac

SEQ ID NO: 2508 - protein, 1457 aa, synthetic construct
  REGION 1..1457: note = Variant of human B-domain deleted Factor VIII
MQIELSTCFFLCLLRFCFSATRRYYLGAVELSWDYMQSDLGELPVDARFPPRVPKSFPFNTSVVYKKTLFVEFTDHLFNIAKPRPPWMGLLGPTIQAEVYDTVVITLKNMASHPVSLHAVGVSYWKASEGAEYDDQTSQREKEDDKVFPGGSHTYVWQVLKENGPMASDPLCLTYSYLSHVDLVKDLNSGLIGALLVCREGSLAKEKTQTLHKFILLFAVFDEGKSWHSETKNSLMQDRDAASARAWPKMHTVNGYVNRSLPGLIGCHRKSVYWHVIGMGTTPEVHSIFLEGHTFLVRNHRQASLEISPITFLTAQTLLMDLGQFLLFCHISSHQHDGMEAYVKVDSCPEEPQLRMKNNEEAEDYDDDLTDSEMDVVRFDDDNSPSFIQIRSVAKKHPKTWVHYIAAEEEDWDYAPLVLAPDDRSYKSQYLNNGPQRIGRKYKKVRFMAYTDETFKTREAIQHESGILGPLLYGEVGDTLLIIFKNQASRPYNIYPHGITDVRPLYSRRLPKGVKHLKDFPILPGEIFKYKWTVTVEDGPTKSDPRCLTRYYSSFVNMERDLASGLIGPLLICYKESVDQRGNQIMSDKRNVILFSVFDENRSWYLTENIQRFLPNPAGVQLEDPEFQASNIMHSINGYVFDSLQLSVCLHEVAYWYILSIGAQTDFLSVFFSGYTFKHKMVYEDTLTLFPFSGETVFMSMENPGLWILGCHNSDFRNRGMTALLKVSSCDKNTGDYYEDSYEDISAYLLSKNNAIEPRSFSQNPPVLKRHQRENTRTTLQSDQEEIDYDDTISVEMKKEDFDIYDEDENQSPRSFQKKTRHYFIAAVERLWDYGMSSSPHVLRNRAQSGSVPQFKKVVFQEFTDGSFTQPLYRGELNEHLGLLGPYIRAEVEDNIMVTFRNQASRPYSFYSSLISYEEDQRQGAEPRKNFVKPNETKTYFWKVQHHMAPTKDEFDCKAWAYFSDVDLEKDVHSGLIGPLLVCHTNTLNPAHGRQVTVQEFALFFTIFDETKSWYFTENMERNCRAPCNIQMEDPTFKENYRFHAINGYIMDTLPGLVMAQDQRIRWYLLSMGSNENIHSIHFSGHVFTVRKKEEYKMALYNLYPGVFETVEMLPSKAGIWRVECLIGEHLHAGMSTLFLVYSNKCQTPLGMASGHIRDFQITASGQYGQWAPKLARLHYSGSINAWSTKEPFSWIKVDLLAPMIIHGIKTQGARQKFSSLYISQFIIMYSLDGKKWQTYRGNSTGTLMVFFGNVDSSGIKHNIFNPPIIARYIRLHPTHYSIRSTLRMELMGCDLNSCSMPLGMESKAISDAQITASSYFTNMFATWSPSKARLHLQGRSNAWRPQVNNPKEWLQVDFQKTMKVTGVTTQGVKSLLTSMYVKEFLISSSQDGHQWTLFFQNGKVKVFQGNQDSFTPVVNSLDPPLLTRYLRIHPQSWVHQIALRMEVLGCEAQDLY

SEQ ID NO: 2509 - DNA, 4371 bp, synthetic construct
  misc_feature 1..4371: note = Variant of human B-domain deleted Factor VIII
  source 1..4371: mol_type = other DNA
atgcagattgaactgtctacctgcttcttcctctgtttgctgaggttctgctttagcgccactagacggtactaccttggcgctgtggagctgtcctgggactatatgcagagtgatttgggagagcttcccgtcgacgcacgatttcctcctcgcgttccaaagtcatttcccttcaacacaagcgtggtgtacaagaagacgctcttcgtcgaattcaccgatcacctgttcaatatcgccaaacccagaccaccatggatgggtcttttggggcctaccatacaagcggaggtgtatgacacagttgttatcactctcaagaacatggcttctcatccggtaagtcttcacgcagtgggcgtgtcctactggaaagcttcagaaggagccgagtatgatgatcagacatcccagagggagaaagaagacgacaaggtatttccaggtgggtctcatacctatgtgtggcaagtgctcaaagagaatggccctatggcaagcgatccgctctgtttgacttacagctacctttcacacgttgacctcgtcaaggacctcaactccgggttgattggagccttgttggtatgcagggaaggatctcttgccaaagagaagacacagaccctccacaagtttatccttctctttgctgtgttcgatgagggcaaaagttggcatagcgaaacgaagaattccctcatgcaggatcgcgacgcagccagcgccagagcttggcccaagatgcacactgtgaacggatatgtcaataggtcacttcctggcttgattgggtgtcatcggaaaagtgtctactggcacgtgatcggaatggggacaacaccagaggtccactccatatttctcgaaggccataccttccttgttcgaaaccacagacaggcatccttggagatctctcccattacctttctcactgcccaaacgctccttatggacttgggtcagttccttctcttctgccatatcagctcacaccagcatgatggtatggaagcttatgtgaaagtcgacagttgtcctgaggagccacagttgcgcatgaagaataatgaagaagccgaggattacgacgacgatctcaccgattctgagatggacgtggtgaggtttgatgacgacaactctccctccttgattcaaatccggagcgtggcgaagaaacaccccaagacttgggtccactatatagcggcggaagaggaggattgggattacgctcctcttgtattggcaccagatgaccgctcatacaaaagccagtacctcaacaacggaccgcagagaattggccggaagtataagaaagtgcgatttatggcctatacagacgaaacctttaagacaagggaggccatccagcatgagagtgggattttgggacctcttctttacggcgaagttggtgataccctcctcatcatcttcaagaatcaagcttctcgcccctataacatttacccacacgggatcactgacgttaggcctttgtatagcagaagacttcccaaaggcgtgaagcatctcaaagacttccccattttgccaggcgagatctttaagtacaaatggaccgtcacagtggaagatggaccgactaaatcagaccctcgatgccttacgcggtactattcctccttcgtgaatatggagagagatttggcaagcggactcataggaccactcctcatctgttacaaggaatctgtagaccagaggggtaaccagattatgagtgataaacgcaatgtgatcctttttagcgtcttcgacgagaaccggtcctggtacttgaccgagaatatacaaaggttccttcccaaccccgcaggcgttcagttggaagaccctgagtttcaggccagcaatattatgcactcaatcaacggctatgtgtttgatagtctccagctttctgtttgcctccatgaagtagcctattggtacatcttgtcaattggtgctcaaacagacttcctctccgtcttcttctccggctacacctttaagcacaagatggtgtatgaggacactctcacactctttccattttctggagaaaccgtgttcatgagcatggagaatccaggcctttggatcttgggttgccacaacagtgattttcgcaatcggggaatgactgctctcctcaaagtcagcagctgtgataagaacacaggcgactattacgaagattcttacgaggacataagtgcctacttgttgtccaagaataacgccattgagcccagatcattctcccagaatcctcccgtgcttaaaaggcatcagcgcgaaatcaccagaactactcttcagtctgatcaagaggagattgactatgacgacaccataagcgtggaaatgaagaaggaggatttcgatatctatgacgaagatgagaaccagtctccgcggagctttcagaagaagacgcgacactacttcattgcagcagtcgaaaggctttgggactacggtatgtcatcatcccctcatgtgttgcgcaatagagctcagagtggaagtgttccacagttcaagaaagtcgtctttcaagagtttacagatggcagcttcacacagcctctctatcggggcgagcttaacgaacatttgggactccttggtccctatatccgagccgaagtggaggacaacattatggttacctttaggaatcaagcctctcgcccctacagcttctactcctccctcatcagttatgaggaggatcagagacaaggcgctgaaccacggaagaactttgtgaaaccgaatgagacgaagacctacttctggaaagtacagcaccacatggcccccacaaaagacgaattcgattgcaaagcatgggcgtatttttcagacgttgacttggagaaagatgtacattcaggacttattggtcctttgttggtgtgtcacactaacactctcaatccagcccatggcaggcaggtgacagtccaggaattcgctcttttctttaccatctttgatgagaccaagtcctggtacttcacggaaaacatggagcgcaattgcagagccccctgtaacatacagatggaggaccctacctttaaggaaaattatcggttccacgcaatcaacggatacattatggatacactccctggccttgtgatggctcaggaccaacgaatcaggtggtacctcctcagcatgggttctaatgagaacatacactccattcacttttcaggacatgtgttcactgtccggaagaaagaagagtataagatggccctctacaatttgtatccaggcgtgtttgagaccgttgaaatgcttccctctaaagctggcatctggagagtagagtgcttgatcggagaacatcttcacgcaggtatgagcaccttgttcctcgtgtacagcaacaaatgtcagaccccacttggcatggccagtggacacattcgcgactttcagatcacagcatctggccagtatggacaatgggccccaaagttggctcgcctccattactccggtagcataaatgcgtggtccactaaagaacctttcagctggattaaggtcgatcttcttgcccccatgatcatccacggcattaagacacagggagcgaggcagaaattctcctccctctacatctcacagttcattattatgtatagtttggacggcaagaagtggcaaacttatagaggtaacagtactggaacactcatggtgttcttcggcaacgttgatagctctggcatcaaacacaacatctttaatcctcccataatagctcggtacatcagattgcatccgacccactacagcattaggagtacactccgaatggagcttatgggttgcgacttgaattcctgttcaatgccactcggaatggagtctaaagccatctctgatgcacagataaccgccagtagctactttacgaacatgtttgctacgtggtcaccctctaaggcaaggcttcatttgcaaggccggtctaatgcctggagacctcaggtgaacaacccgaaagaatggctccaggtggactttcagaagaccatgaaagtaacaggtgtcactactcagggagttaagtccttgctcaccagcatgtatgtgaaggagttccttatttcctcatcacaagatggccaccagtggaccctcttctttcagaatggtaaggtcaaagtgtttcagggcaatcaagacagcttcacacccgtggtgaacagtcttgatcctccactcttgacacgataccttcgaatccatccacagtcttgggttcaccagattgcattgcgcatggaagtacttggatgcgaggctcaggacctctac

SEQ ID NO: 2510 - protein, 1457 aa, synthetic construct
  REGION 1..1457: note = Variant of human B-domain deleted Factor VIII
MQIELSTCFFLCLLRFCFSATRRYYLGAVELSWDYMQSDLGELPVDARFPPRVPKSFPFNTSVVYKKTLFVEFTDHLFNIAKPRPPWMGLLGPTIQAEVYDTVVITLKNMASHPVSLHAVGVSYWKASEGAEYDDQTSQREKEDDKVFPGGSHTYVWQVLKENGPMASDPLCLTYSYLSHVDLVKDLNSGLIGALLVCREGSLAKEKTQTLHKFILLFAVFDEGKSWHSETKNSLMQDRDAASARAWPKMHTVNGYVNRSLPGLIGCHRKSVYWHVIGMGTTPEVHSIFLEGHTFLVRNHRQASLEISPITFLTAQTLLMDLGQFLLFCHISSHQHDGMEAYVKVDSCPEEPQLRMKNNEEAEDYDDDLTDSEMDVVRFDDDNSPSLIQIRSVAKKHPKTWVHYIAAEEEDWDYAPLVLAPDDRSYKSQYLNNGPQRIGRKYKKVRFMAYTDETFKTREAIQHESGILGPLLYGEVGDTLLIIFKNQASRPYNIYPHGITDVRPLYSRRLPKGVKHLKDFPILPGEIFKYKWTVTVEDGPTKSDPRCLTRYYSSFVNMERDLASGLIGPLLICYKESVDQRGNQIMSDKRNVILFSVFDENRSWYLTENIQRFLPNPAGVQLEDPEFQASNIMHSINGYVFDSLQLSVCLHEVAYWYILSIGAQTDFLSVFFSGYTFKHKMVYEDTLTLFPFSGETVFMSMENPGLWILGCHNSDFRNRGMTALLKVSSCDKNTGDYYEDSYEDISAYLLSKNNAIEPRSFSQNPPVLKRHQREITRTTLQSDQEEIDYDDTISVEMKKEDFDIYDEDENQSPRSFQKKTRHYFIAAVERLWDYGMSSSPHVLRNRAQSGSVPQFKKVVFQEFTDGSFTQPLYRGELNEHLGLLGPYIRAEVEDNIMVTFRNQASRPYSFYSSLISYEEDQRQGAEPRKNFVKPNETKTYFWKVQHHMAPTKDEFDCKAWAYFSDVDLEKDVHSGLIGPLLVCHTNTLNPAHGRQVTVQEFALFFTIFDETKSWYFTENMERNCRAPCNIQMEDPTFKENYRFHAINGYIMDTLPGLVMAQDQRIRWYLLSMGSNENIHSIHFSGHVFTVRKKEEYKMALYNLYPGVFETVEMLPSKAGIWRVECLIGEHLHAGMSTLFLVYSNKCQTPLGMASGHIRDFQITASGQYGQWAPKLARLHYSGSINAWSTKEPFSWIKVDLLAPMIIHGIKTQGARQKFSSLYISQFIIMYSLDGKKWQTYRGNSTGTLMVFFGNVDSSGIKHNIFNPPIIARYIRLHPTHYSIRSTLRMELMGCDLNSCSMPLGMESKAISDAQITASSYFTNMFATWSPSKARLHLQGRSNAWRPQVNNPKEWLQVDFQKTMKVTGVTTQGVKSLLTSMYVKEFLISSSQDGHQWTLFFQNGKVKVFQGNQDSFTPVVNSLDPPLLTRYLRIHPQSWVHQIALRMEVLGCEAQDLY

SEQ ID NO: 2511 - DNA, 4371 bp, synthetic construct
  misc_feature 1..4371: note = Variant of human B-domain deleted Factor VIII
  source 1..4371: mol_type = other DNA
atgcagattgaactgtctacctgcttcttcctctgtttgctgaggttctgctttagcgccactagacggtactaccttggcgctgtggagctgtcctgggactatatgcagagtgatttgggagagcttcccgtcgacgcacgatttcctcctcgcgttccaaagtcatttcccttcaacacaagcgtggtgtacaagaagacgctcttcgtcgaattcaccgatcacctgttcaatatcgccaaacccagaccaccatggatgggtcttttggggcctaccatacaagcggaggtgtatgacacagttgttatcactctcaagaacatggcttctcatccggtaagtcttcacgcagtgggcgtgtcctactggaaagcttcagaaggagccgagtatgatgatcagacatcccagagggagaaagaagacgacaaggtatttccaggtgggtctcatacctatgtgtggcaagtgctcaaagagaatggccctatggcaagcgatccgctctgtttgacttacagctacctttcacacgttgacctcgtcaaggacctcaactccgggttgattggagccttgttggtatgcagggaaggatctcttgccaaagagaagacacagaccctccacaagtttatccttctctttgctgtgttcgatgagggcaaaagttggcatagcgaaacgaagaattccctcatgcaggatcgcgacgcagccagcgccagagcttggcccaagatgcacactgtgaacggatatgtcaataggtcacttcctggcttgattgggtgtcatcggaaaagtgtctactggcacgtgatcggaatggggacaacaccagaggtccactccatatttctcgaaggccataccttccttgttcgaaaccacagacaggcatccttggagatctctcccattacctttctcactgcccaaacgctccttatggacttgggtcagttccttctcttctgccatatcagctcacaccagcatgatggtatggaagcttatgtgaaagtcgacagttgtcctgaggagccacagttgcgcatgaagaataatgaagaagccgaggattacgacgacgatctcaccgattctgagatggacgtggtgaggtttgatgacgacaactctccctccttcattcaaatccggagcgtggcgaagaaacaccccaagacttgggtccactatatagcggcggaagaggaggattgggattacgctcctcttgtattggcaccagatgaccgctcatacaaaagccagtacctcaacaacggaccgcagagaattggccggaagtataagaaagtgcgatttatggcctatacagacgaaacctttaagacaagggaggccatccagcatgagagtgggattttgggacctcttctttacggcgaagttggtgataccctcctcatcatcttcaagaatcaagcttctcgcccctataacatttacccacacgggatcactgacgttaggcctttgtatagcagaagacttcccaaaggcgtgaagcatctcaaagacttccccattttgccaggcgagatctttaagtacaaatggaccgtcacagtggaagatggaccgactaaatcagaccctcgatgccttacgcggtactattcctccttcgtgaatatggagagagatttggcaagcggactcataggaccactcctcatctgttacaaggaatctgtagaccagaggggtaaccagattatgagtgataaacgcaatgtgatcctttttagcgtcttcgacgagaaccggtcctggtacttgaccgagaatatacaaaggttccttcccaaccccgcaggcgttcagttggaagaccctgagtttcaggccagcaatattatgcactcaatcaacggctatgtgtttgatagtctccagctttctgtttgcctccatgaagtagcctattggtacatcttgtcaattggtgctcaaacagacttcctctccgtcttcttctccggctacacctttaagcacaagatggtgtatgaggacactctcacactctttccattttctggagaaaccgtgttcatgagcatggagaatccaggcctttggatcttgggttgccacaacagtgattttcgcaatcggggaatgactgctctcctcaaagtcagcagctgtgataagaacacaggcgactattacgaagattcttacgaggacataagtgcctacttgttgtccaagaataacgccattgagcccagatcattctcccagaatcctcccgtgcttaaaaggcatcagcgcgaaatcaccagaactactcttcagtctgatcaagaggagattgactatgacgacaccataagcgtggaaatgaagaaggaggatttcgatatctatgacgaagatgcgaaccagtctccgcggagctttcagaagaagacgcgacactacttcattgcagcagtcgaaaggctttgggactacggtatgtcatcatcccctcatgtgttgcgcaatagagctcagagtggaagtgttccacagttcaagaaagtcgtctttcaagagtttacagatggcagcttcacacagcctctctatcggggcgagcttaacgaacatttgggactccttggtccctatatccgagccgaagtggaggacaacattatggttacctttaggaatcaagcctctcgcccctacagcttctactcctccctcatcagttatgaggaggatcagagacaaggcgctgaaccacggaagaactttgtgaaaccgaatgagacgaagacctacttctggaaagtacagcaccacatggcccccacaaaagacgaattcgattgcaaagcatgggcgtatttttcagacgttgacttggagaaagatgtacattcaggacttattggtcctttgttggtgtgtcacactaacactctcaatccagcccatggcaggcaggtgacagtccaggaattcgctcttttctttaccatctttgatgagaccaagtcctggtacttcacggaaaacatggagcgcaattgcagagccccctgtaacatacagatggaggaccctacctttaaggaaaattatcggttccacgcaatcaacggatacattatggatacactccctggccttgtgatggctcaggaccaacgaatcaggtggtacctcctcagcatgggttctaatgagaacatacactccattcacttttcaggacatgtgttcactgtccggaagaaagaagagtataagatggccctctacaatttgtatccaggcgtgtttgagaccgttgaaatgcttccctctaaagctggcatctggagagtagagtgcttgatcggagaacatcttcacgcaggtatgagcaccttgttcctcgtgtacagcaacaaatgtcagaccccacttggcatggccagtggacacattcgcgactttcagatcacagcatctggccagtatggacaatgggccccaaagttggctcgcctccattactccggtagcataaatgcgtggtccactaaagaacctttcagctggattaaggtcgatcttcttgcccccatgatcatccacggcattaagacacagggagcgaggcagaaattctcctccctctacatctcacagttcattattatgtatagtttggacggcaagaagtggcaaacttatagaggtaacagtactggaacactcatggtgttcttcggcaacgttgatagctctggcatcaaacacaacatctttaatcctcccataatagctcggtacatcagattgcatccgacccactacagcattaggagtacactccgaatggagcttatgggttgcgacttgaattcctgttcaatgccactcggaatggagtctaaagccatctctgatgcacagataaccgccagtagctactttacgaacatgtttgctacgtggtcaccctctaaggcaaggcttcatttgcaaggccggtctaatgcctggagacctcaggtgaacaacccgaaagaatggctccaggtggactttcagaagaccatgaaagtaacaggtgtcactactcagggagttaagtccttgctcaccagcatgtatgtgaaggagttccttatttcctcatcacaagatggccaccagtggaccctcttctttcagaatggtaaggtcaaagtgtttcagggcaatcaagacagcttcacacccgtggtgaacagtcttgatcctccactcttgacacgataccttcgaatccatccacagtcttgggttcaccagattgcattgcgcatggaagtacttggatgcgaggctcaggacctctac

SEQ ID NO: 2512 - protein, 1457 aa, synthetic construct
  REGION 1..1457: note = Variant of human B-domain deleted Factor VIII
MQIELSTCFFLCLLRFCFSATRRYYLGAVELSWDYMQSDLGELPVDARFPPRVPKSFPFNTSVVYKKTLFVEFTDHLFNIAKPRPPWMGLLGPTIQAEVYDTVVITLKNMASHPVSLHAVGVSYWKASEGAEYDDQTSQREKEDDKVFPGGSHTYVWQVLKENGPMASDPLCLTYSYLSHVDLVKDLNSGLIGALLVCREGSLAKEKTQTLHKFILLFAVFDEGKSWHSETKNSLMQDRDAASARAWPKMHTVNGYVNRSLPGLIGCHRKSVYWHVIGMGTTPEVHSIFLEGHTFLVRNHRQASLEISPITFLTAQTLLMDLGQFLLFCHISSHQHDGMEAYVKVDSCPEEPQLRMKNNEEAEDYDDDLTDSEMDVVRFDDDNSPSFIQIRSVAKKHPKTWVHYIAAEEEDWDYAPLVLAPDDRSYKSQYLNNGPQRIGRKYKKVRFMAYTDETFKTREAIQHESGILGPLLYGEVGDTLLIIFKNQASRPYNIYPHGITDVRPLYSRRLPKGVKHLKDFPILPGEIFKYKWTVTVEDGPTKSDPRCLTRYYSSFVNMERDLASGLIGPLLICYKESVDQRGNQIMSDKRNVILFSVFDENRSWYLTENIQRFLPNPAGVQLEDPEFQASNIMHSINGYVFDSLQLSVCLHEVAYWYILSIGAQTDFLSVFFSGYTFKHKMVYEDTLTLFPFSGETVFMSMENPGLWILGCHNSDFRNRGMTALLKVSSCDKNTGDYYEDSYEDISAYLLSKNNAIEPRSFSQNPPVLKRHQREITRTTLQSDQEEIDYDDTISVEMKKEDFDIYDEDANQSPRSFQKKTRHYFIAAVERLWDYGMSSSPHVLRNRAQSGSVPQFKKVVFQEFTDGSFTQPLYRGELNEHLGLLGPYIRAEVEDNIMVTFRNQASRPYSFYSSLISYEEDQRQGAEPRKNFVKPNETKTYFWKVQHHMAPTKDEFDCKAWAYFSDVDLEKDVHSGLIGPLLVCHTNTLNPAHGRQVTVQEFALFFTIFDETKSWYFTENMERNCRAPCNIQMEDPTFKENYRFHAINGYIMDTLPGLVMAQDQRIRWYLLSMGSNENIHSIHFSGHVFTVRKKEEYKMALYNLYPGVFETVEMLPSKAGIWRVECLIGEHLHAGMSTLFLVYSNKCQTPLGMASGHIRDFQITASGQYGQWAPKLARLHYSGSINAWSTKEPFSWIKVDLLAPMIIHGIKTQGARQKFSSLYISQFIIMYSLDGKKWQTYRGNSTGTLMVFFGNVDSSGIKHNIFNPPIIARYIRLHPTHYSIRSTLRMELMGCDLNSCSMPLGMESKAISDAQITASSYFTNMFATWSPSKARLHLQGRSNAWRPQVNNPKEWLQVDFQKTMKVTGVTTQGVKSLLTSMYVKEFLISSSQDGHQWTLFFQNGKVKVFQGNQDSFTPVVNSLDPPLLTRYLRIHPQSWVHQIALRMEVLGCEAQDLY

SEQ ID NO: 2513 - DNA, 4371 bp, synthetic construct
  misc_feature 1..4371: note = Variant of human B-domain deleted Factor VIII
  source 1..4371: mol_type = other DNA
atgcagattgaactgtctacctgcttcttcctctgtttgcttaggttctgctttagcgccaccagacggtactaccttggcgctgtggagctgtcctgggactatatgcagagtgatttgggagagcttcccgtcgacgcacgatttcctcctcgcgttccaaagtcatttcccttcaacacaagcgtggtgtacaagaagacgctcttcgtcgaattcaccgatcacctgttcaatatcgccaaacccagaccaccatggatgggtcttttggggcctaccatacaagcggaggtgtatgacacagttgttatcactctcaagaacatggcttctcatccggtaagtcttcacgcagtgggcgtgtcctactggaaagcttcagaaggagccgagtatgatgatcagacatcccagagggagaaagaagacgacaaggtatttccaggtgggtctcatacctatgtgtggcaagtgctcaaagagaatggccctatggcaagcgatccgctctgtttgacttacagctacctttcacacgttgacctcgtcaaggacctcaactccgggttgattggagccttgttggtatgcagggaaggatctcttgccaaagagaagacacagaccctccacaagtttatccttctctttgctgtgttcgatgagggcaaaagttggcatagcgaaacgaagaattccctcatgcaggatcgcgacgcagccagcgccagagcttggcccaagatgcacactgtgaacggatatgtcaataggtcacttcctggcttgattgggtgtcatcggaaaagtgtctactggcacgtgatcggaatggggacaacaccagaggtccactccatatttctcgaaggccataccttccttgttcgaaaccacagacaggcatccttggagatctctcccattacctttctcactgcccaaacgctccttatggacttgggtcagttccttctcttctgccatatcagctcacaccagcatgatggtatggaagcttatgtgaaagtcgacagttgtcctgaggagccacagttgcgcatgaagaataatgaagaagccgaggattacgacgacgatctcaccgattctgagatggacgtggtgaggtttgatgacgacaactctccctccttcattcaaatccggagcgtggcgaagaaacaccccaagacttgggtccactatatagcggcggaagaggaggattgggattacgctcctcttgtattggcaccagatgaccgctcatacaaaagccagtacctcaacaacggaccgcagagaattggccggaagtataagaaagtgcgatttatggcctatacagacgaaacctttaagacaagggaggccatccagcatgagagtgggattttgggacctcttctttacggcgaagttggtgataccctcctcatcatcttcaagaatcaagcttctcgcccctataacatttacccacacgggatcactgacgttaggcctttgtatagcagaagacttcccaaaggcgtgaagcatctcaaagacttccccattttgccaggcgagatctttaagtacaaatggaccgtcacagtggaagatggaccgactaaatcagaccctcgatgccttacgcggtactattcctccttcgtgaatatggagagagatttggcaagcggactcataggaccactcctcatctgttacaaggaatctgtagaccagaggggtaaccagattatgagtgataaacgcaatgtgatcctttttagcgtcttcgacgagaaccggtcctggtacttgaccgagaatatacaaaggttccttcccaaccccgcaggcgttcagttggaagaccctgagtttcaggccagcaatattatgcactcaatcaacggctatgtgtttgatagtctccagctttctgtttgcctccatgaagtagcctattggtacatcttgtcaattggtgctcaaacagacttcctctccgtcttcttctccggctacacctttaagcacaagatggtgtatgaggacactctcacactctttccattttctggagaaaccgtgttcatgagcatggagaatccaggcctttggatcttgggttgccacaacagtgattttcgcaatcggggaatgactgctctcctcaaagtcagcagctgtgataagaacacaggcgactattacgaagattcttacgaggacataagtgcctacttgttgtccaagaataacgccattgagcccagatcattctcccagaatcctcccgtgcttaaaaggcatcagcgcgaaatcaccagaactactcttcagtctgatcaagaggagattgactatgacgacaccataagcgtggaaatgaagaaggaggatttcgatatcggtgacgaagatgagaaccagtctccgcggagctttcagaagaagacgcgacactacttcattgcagcagtcgaaaggctttgggactacggtatgtcatcatcccctcatgtgttgcgcaatagagctcagagtggaagtgttccacagttcaagaaagtcgtctttcaagagtttacagatggcagcttcacacagcctctctatcggggcgagcttaacgaacatttgggactccttggtccctatatccgagccgaagtggaggacaacattatggttacctttaggaatcaagcctctcgcccctacagcttctactcctccctcatcagttatgaggaggatcagagacaaggcgctgaaccacggaagaactttgtgaaaccgaatgagacgaagacctacttctggaaagtacagcaccacatggcccccacaaaagacgaattcgattgcaaagcatgggcatatttttcagacgttgacttggagaaagatgtacattcaggacttattggtcctttgttggtgtgtcacactaacactctcaatccagcccatggcaggcaggtgacagtccaggaattcgctcttttctttaccatctttgatgagaccaagtcctggtacttcacggaaaacatggagcgcaattgcagagccccctgtaacatacagatggaggaccctacctttaaggaaaattatcggttccacgcaatcaacggatacattatggatacactccctggccttgtgatggctcaggaccaacgaatcaggtggtacctcctcagcatgggttctaatgagaacatacactccattcacttttcaggacatgtgttcactgtccggaagaaagaagagtataagatggccctctacaatttgtatccaggcgtgtttgagaccgttgaaatgcttccctctaaagctggcatctggagagtagagtgcttgatcggagaacatcttcacgcaggtatgagcaccttgttcctcgtgtacagcaacaaatgtcagaccccacttggcatggccagtggacacattcgcgactttcagatcacagcatctggccagtatggacaatgggccccaaagttggctcgcctccattactccggtagcataaatgcgtggtccactaaagaacctttcagctggattaaggtcgatcttcttgcccccatgatcatccacggcattaagacacagggagcgaggcagaaattctcctccctctacatctcacagttcattattatgtatagtttggacggcaagaagtggcaaacttatagaggtaacagtactggaacactcatggtgttcttcggcaacgttgatagctctggcatcaaacacaacatctttaatcctcccataatagctcggtacatcagattgcatccgacccactacagcattaggagtacactccgaatggagcttatgggttgcgacttgaattcctgttcaatgccactcggaatggagtctaaagccatctctgatgcacagataaccgccagtagctactttacgaacatgtttgctacgtggtcaccctctaaggcaaggcttcatttgcaaggccggtctaatgcctggagacctcaggtgaacaacccgaaagaatggctccaggtggactttcagaagaccatgaaagtaacaggtgtcactactcagggagttaagtccttgctcaccagcatgtatgtgaaggagttccttatttcctcatcacaagatggccaccagtggaccctcttctttcagaatggtaaggtcaaagtgtttcagggcaatcaagacagcttcacacccgtggtgaacagtcttgatcctccactcttgacacgataccttcgaatccatccacagtcttgggttcaccagattgcattgcgcatggaagtacttggatgcgaggctcaggacctctac

SEQ ID NO: 2514 - protein, 1457 aa, synthetic construct
  REGION 1..1457: note = Variant of human B-domain deleted Factor VIII
MQIELSTCFFLCLLRFCFSATRRYYLGAVELSWDYMQSDLGELPVDARFPPRVPKSFPFNTSVVYKKTLFVEFTDHLFNIAKPRPPWMGLLGPTIQAEVYDTVVITLKNMASHPVSLHAVGVSYWKASEGAEYDDQTSQREKEDDKVFPGGSHTYVWQVLKENGPMASDPLCLTYSYLSHVDLVKDLNSGLIGALLVCREGSLAKEKTQTLHKFILLFAVFDEGKSWHSETKNSLMQDRDAASARAWPKMHTVNGYVNRSLPGLIGCHRKSVYWHVIGMGTTPEVHSIFLEGHTFLVRNHRQASLEISPITFLTAQTLLMDLGQFLLFCHISSHQHDGMEAYVKVDSCPEEPQLRMKNNEEAEDYDDDLTDSEMDVVRFDDDNSPSFIQIRSVAKKHPKTWVHYIAAEEEDWDYAPLVLAPDDRSYKSQYLNNGPQRIGRKYKKVRFMAYTDETFKTREAIQHESGILGPLLYGEVGDTLLIIFKNQASRPYNIYPHGITDVRPLYSRRLPKGVKHLKDFPILPGEIFKYKWTVTVEDGPTKSDPRCLTRYYSSFVNMERDLASGLIGPLLICYKESVDQRGNQIMSDKRNVILFSVFDENRSWYLTENIQRFLPNPAGVQLEDPEFQASNIMHSINGYVFDSLQLSVCLHEVAYWYILSIGAQTDFLSVFFSGYTFKHKMVYEDTLTLFPFSGETVFMSMENPGLWILGCHNSDFRNRGMTALLKVSSCDKNTGDYYEDSYEDISAYLLSKNNAIEPRSFSQNPPVLKRHQREITRTTLQSDQEEIDYDDTISVEMKKEDFDIGDEDENQSPRSFQKKTRHYFIAAVERLWDYGMSSSPHVLRNRAQSGSVPQFKKVVFQEFTDGSFTQPLYRGELNEHLGLLGPYIRAEVEDNIMVTFRNQASRPYSFYSSLISYEEDQRQGAEPRKNFVKPNETKTYFWKVQHHMAPTKDEFDCKAWAYFSDVDLEKDVHSGLIGPLLVCHTNTLNPAHGRQVTVQEFALFFTIFDETKSWYFTENMERNCRAPCNIQMEDPTFKENYRFHAINGYIMDTLPGLVMAQDQRIRWYLLSMGSNENIHSIHFSGHVFTVRKKEEYKMALYNLYPGVFETVEMLPSKAGIWRVECLIGEHLHAGMSTLFLVYSNKCQTPLGMASGHIRDFQITASGQYGQWAPKLARLHYSGSINAWSTKEPFSWIKVDLLAPMIIHGIKTQGARQKFSSLYISQFIIMYSLDGKKWQTYRGNSTGTLMVFFGNVDSSGIKHNIFNPPIIARYIRLHPTHYSIRSTLRMELMGCDLNSCSMPLGMESKAISDAQITASSYFTNMFATWSPSKARLHLQGRSNAWRPQVNNPKEWLQVDFQKTMKVTGVTTQGVKSLLTSMYVKEFLISSSQDGHQWTLFFQNGKVKVFQGNQDSFTPVVNSLDPPLLTRYLRIHPQSWVHQIALRMEVLGCEAQDLY

SEQ ID NO: 2515 - DNA, 4371 bp, synthetic construct
  misc_feature 1..4371: note = Variant of human B-domain deleted Factor VIII
  source 1..4371: mol_type = other DNA
atgcagattgaactgtctacctgcttcttcctctgtttgctgaggttctgctttagcgccactagacggtactaccttggcgctgtggagctgtcctgggactatatgcagagtgatttgggagagcttcccgtcgacgcacgatttcctcctcgcgttccaaagtcatttcccttcaacacaagcgtggtgtacaagaagacgctcttcgtcgaattcaccgatcacctgttcaatatcgccaaacccagaccaccatggatgggtcttttggggcctaccatacaagcggaggtgtatgacacagttgttatcactctcaagaacatggcttctcatccggtaagtcttcacgcagtgggcgtgtcctactggaaagcttcagaaggagccgagtatgatgatcagacatcccagagggagaaagaagacgacaaggtatttccaggtgggtctcatacctatgtgtggcaagtgctcaaagagaatggccctatggcaagcgatccgctctgtttgacttacagctacctttcacacgttgacctcgtcaaggacctcaactccgggttgattggagccttgttggtatgcagggaaggatctcttgccaaagagaagacacagaccctccacaagtttatccttctctttgctgtgttcgatgagggcaaaagttggcatagcgaaacgaagaattccctcatgcaggatcgcgacgcagccagcgccagagcttggcccaagatgcacactgtgaacggatatgtcaataggtcacttcctggcttgattgggtgtcatcggaaaagtgtctactggcacgtgatcggaatggggacaacaccagaggtccactccatatttctcgaaggccataccttccttgttcgaaaccacagacaggcatccttggagatctctcccattacctttctcactgcccaaacgctccttatggacttgggtcagttccttctcttctgccatatcagctcacaccagcatgatggtatggaagcttatgtgaaagtcgacagttgtcctgaggagccacagttgcgcatgaagaataatgaagaagccgaggattacgacgacgatctcaccgattctgagatggacgtggtgaggtttgatgacgacaactctccctccttcattcaaatccggagcgtggcgaagaaacaccccaagacttgggtccactatatagcggcggaagaggaggattgggattacgctcctcttgtattggcaccagatgaccgctcatacaaaagccagtacctcaacaacggaccgcagagaattggccggaagtataagaaagtgcgatttatggcctatacagacgaaacctttaagacaagggaggccatccagcatgagagtgggattttgggacctcttctttacggcgaagttggtgataccctcctcatcatcttcaagaatcaagcttctcgcccctataacatttacccacacgggatcactgacgttaggcctttgtatagcagaagacttcccaaaggcgtgaagcatctcaaagacttccccattttgccaggcgagatctttaagtacaaatggaccgtcacagtggaagatggaccgactaaatcagaccctcgatgccttacgcggtactattcctccttcgtgaatatggagagagatttggcaagcggactcataggaccactcctcatctgttacaaggaatctgtagaccagaggggtaaccagattatgagtgataaacgcaatgtgatcctttttagcgtcttcgacgagaaccggtcctggtacttgaccgagaatatacaaaggttccttcccaaccccgcaggcgttcagttggaagaccctgagtttcaggccagcaatattatgcactcaatcaacggctatgtgtttgatagtctccagctttctgtttgcctccatgaagtagcctattggtacatcttgtcaattggtgctcaaacagacttcctctccgtcttcttctccggctacacctttaagcacaagatggtgtatgaggacactctcacactctttccattttctggagaaaccgtgttcatgagcatggagaatccaggcctttggatcttgggttgccacaacagtgattttcgcaatcggggaatgactgctctcctcaaagtcagcagctgtgataagaacacaggcgactattacgaagattcttacgaggacataagtgcctacttgttgtccaggaataacgccattgagcccagatcattctcccagaatcctcccgtgcttaaaaggcatcagcgcgaaatcaccagaactactcttcagtctgatcaagaggagattgactatgacgacaccataagcgtggaaatgaagaaggaggatttcgatatctatgacgaagatgagaaccagtctccgcggagctttcagaagaagacgcgacactacttcattgcagcagtcgaaaggctttgggactacggtatgtcatcatcccctcatgtgttgcgcaatagagctcagagtggaagtgttccacagttcaagaaagtcgtctttcaagagtttacagatggcagcttcacacagcctctctatcggggcgagcttaacgaacatttgggactccttggtccctatatccgagccgaagtggaggacaacattatggttacctttaggaatcaagcctctcgcccctacagcttctactcctccctcatcagttatgaggaggatcagagacaaggcgctgaaccacggaagaactttgtgaaaccgaatgagacgaagacctacttctggaaagtacagcaccacatggcccccacaaaagacgaattcgattgcaaagcatgggcgtatttttcagacgttgacttggagaaagatgtacattcaggacttattggtcctttgttggtgtgtcacactaacactctcaatccagcccatggcaggcaggtgacagtccaggaattcgctcttttctttaccatctttgatgagaccaagtcctggtacttcacggaaaacatggagcgcaattgcagagccccctgtaacatacagatggaggaccctacctttaaggaaaattatcggttccacgcaatcaacggatacattatggatacactccctggccttgtgatggctcaggaccaacgaatcaggtggtacctcctcagcatgggttctaatgagaacatacactccattcacttttcaggacatgtgttcactgtccggaagaaagaagagtataagatggccctctacaatttgtatccaggcgtgtttgagaccgttgaaatgcttccctctaaagctggcatctggagagtagagtgcttgatcggagaacatcttcacgcaggtatgagcaccttgttcctcgtgtacagcaacaaatgtcagaccccacttggcatggccagtggacacattcgcgactttcagatcacagcatctggccagtatggacaatgggccccaaagttggctcgcctccattactccggtagcataaatgcgtggtccactaaagaacctttcagctggattaaggtcgatcttcttgcccccatgatcatccacggcattaagacacagggagcgaggcagaaattctcctccctctacatctcacagttcattattatgtatagtttggacggcaagaagtggcaaacttatagaggtaacagtactggaacactcatggtgttcttcggcaacgttgatagctctggcatcaaacacaacatctttaatcctcccataatagctcggtacatcagattgcatccgacccactacagcattaggagtacactccgaatggagcttatgggttgcgacttgaattcctgttcaatgccactcggaatggagtctaaagccatctctgatgcacagataaccgccagtagctactttacgaacatgtttgctacgtggtcaccctctaaggcaaggcttcatttgcaaggccggtctaatgcctggagacctcaggtgaacaacccgaaagaatggctccaggtggactttcagaagaccatgaaagtaacaggtgtcactactcagggagttaagtccttgctcaccagcatgtatgtgaaggagttccttatttcctcatcacaagatggccaccagtggaccctcttctttcagaatggtaaggtcaaagtgtttcagggcaatcaagacagcttcacacccgtggtgaacagtcttgatcctccactcttgacacgataccttcgaatccatccacagtcttgggttcaccagattgcattgcgcatggaagtacttggatgcgaggctcaggacctctac

SEQ ID NO: 2516 - protein, 1457 aa, synthetic construct
  REGION 1..1457: note = Variant of human B-domain deleted Factor VIII
MQIELSTCFFLCLLRFCFSATRRYYLGAVELSWDYMQSDLGELPVDARFPPRVPKSFPFNTSVVYKKTLFVEFTDHLFNIAKPRPPWMGLLGPTIQAEVYDTVVITLKNMASHPVSLHAVGVSYWKASEGAEYDDQTSQREKEDDKVFPGGSHTYVWQVLKENGPMASDPLCLTYSYLSHVDLVKDLNSGLIGALLVCREGSLAKEKTQTLHKFILLFAVFDEGKSWHSETKNSLMQDRDAASARAWPKMHTVNGYVNRSLPGLIGCHRKSVYWHVIGMGTTPEVHSIFLEGHTFLVRNHRQASLEISPITFLTAQTLLMDLGQFLLFCHISSHQHDGMEAYVKVDSCPEEPQLRMKNNEEAEDYDDDLTDSEMDVVRFDDDNSPSFIQIRSVAKKHPKTWVHYIAAEEEDWDYAPLVLAPDDRSYKSQYLNNGPQRIGRKYKKVRFMAYTDETFKTREAIQHESGILGPLLYGEVGDTLLIIFKNQASRPYNIYPHGITDVRPLYSRRLPKGVKHLKDFPILPGEIFKYKWTVTVEDGPTKSDPRCLTRYYSSFVNMERDLASGLIGPLLICYKESVDQRGNQIMSDKRNVILFSVFDENRSWYLTENIQRFLPNPAGVQLEDPEFQASNIMHSINGYVFDSLQLSVCLHEVAYWYILSIGAQTDFLSVFFSGYTFKHKMVYEDTLTLFPFSGETVFMSMENPGLWILGCHNSDFRNRGMTALLKVSSCDKNTGDYYEDSYEDISAYLLSRNNAIEPRSFSQNPPVLKRHQREITRTTLQSDQEEIDYDDTISVEMKKEDFDIYDEDENQSPRSFQKKTRHYFIAAVERLWDYGMSSSPHVLRNRAQSGSVPQFKKVVFQEFTDGSFTQPLYRGELNEHLGLLGPYIRAEVEDNIMVTFRNQASRPYSFYSSLISYEEDQRQGAEPRKNFVKPNETKTYFWKVQHHMAPTKDEFDCKAWAYFSDVDLEKDVHSGLIGPLLVCHTNTLNPAHGRQVTVQEFALFFTIFDETKSWYFTENMERNCRAPCNIQMEDPTFKENYRFHAINGYIMDTLPGLVMAQDQRIRWYLLSMGSNENIHSIHFSGHVFTVRKKEEYKMALYNLYPGVFETVEMLPSKAGIWRVECLIGEHLHAGMSTLFLVYSNKCQTPLGMASGHIRDFQITASGQYGQWAPKLARLHYSGSINAWSTKEPFSWIKVDLLAPMIIHGIKTQGARQKFSSLYISQFIIMYSLDGKKWQTYRGNSTGTLMVFFGNVDSSGIKHNIFNPPIIARYIRLHPTHYSIRSTLRMELMGCDLNSCSMPLGMESKAISDAQITASSYFTNMFATWSPSKARLHLQGRSNAWRPQVNNPKEWLQVDFQKTMKVTGVTTQGVKSLLTSMYVKEFLISSSQDGHQWTLFFQNGKVKVFQGNQDSFTPVVNSLDPPLLTRYLRIHPQSWVHQIALRMEVLGCEAQDLY

SEQ ID NO: 2517 - DNA, 4371 bp, synthetic construct
  misc_feature 1..4371: note = Variant of human B-domain deleted Factor VIII
  source 1..4371: mol_type = other DNA
atgcagattgaactgtctacctgcttcttcctctgtttgctgaggttctgctttagcgccactagacggtactaccttggcgctgtggagctgtcctgggactatatgcagagtgatttgggagagcttcccgtcgacgcacgatttcctcctcgcgttccaaagtcatttcccttcaacacaagcgtggtgtacaagaagacgctcttcgtcgaattcaccgatcacctgttcaatatcgccaaacccagaccaccatggatgggtcttttggggcctaccatacaagcggaggtgtatgacacagttgttatcactctcaagaacatggcttctcatccggtaagtcttcacgcagtgggcgtgtcctactggaaagcttcagaaggagccgagtatgatgatcagacatcccagagggagaaagaagacgacaaggtatttccaggtgggtctcatacctatgtgtggcaagtgctcaaagagaatggccctatggcaagcgatccgctctgtttgacttacagctacctttcacacgttgacctcgtcaaggacctcaactccgggttgattggagccttgttggtatgcagggaaggatctcttgccaaagagaagacacagaccctccacaagtttatccttctctttgctgtgttcgatgagggcaaaagttggcatagcgaaacgaagaattccctcatgcaggatcgcgacgcagccagcgccagagcttggcccaagatgcacactgtgaacggatatgtcaataggtcacttcctggcttgattgggtgtcatcggaaaagtgtctactggcacgtgatcggaatggggacaacaccagaggtccactccatatttctcgaaggccataccttccttgttcgaaaccacagacaggcatccttggagatctctcccattacctttctcactgcccaaacgctccttattgacttgggtcagttccttctcttctgccatatcagctcacaccagcatgatggtatggaagcttatgtgaaagtcgacagttgtcctgaggagccacagttgcgcatgaagaataatgaagaagccgaggattacgacgacgatctcaccgattctgagatggacgtggtgaggtttgatgacgacaactctccctccttcattcaaatccggagcgtggcgaagaaacaccccaagacttgggtccactatatagcggcggaagaggaggattgggattacgctcctcttgtattggcaccagatgaccgctcatacaaaagccagtacctcaacaacggaccgcagagaattggccggaagtataagaaagtgcgatttatggcctatacagacgaaacctttaagacaagggaggccatccagcatgagagtgggattttgggacctcttctttacggcgaagttggtgataccctcctcatcatcttcaagaatcaagcttctcgcccctataacatttacccacacgggatcactgacgttaggcctttgtatagcagaagacttcccaaaggcgtgaagcatctcaaagacttccccattttgccaggcgagatctttaagtacaaatggaccgtcacagtggaagatggaccgactaaatcagaccctcgatgccttacgcggtactattcctccttcgtgaatatggagagagatttggcaagcggactcataggaccactcctcatctgttacaaggaatctgtagaccagaggggtaaccagattatgagtgataaacgcaatgtgatcctttttagcgtcttcgacgagaaccggtcctggtacttgaccgagaatatacaaaggttccttcccaaccccgcaggcgttcagttggaagaccctgagtttcaggccagcaatattatgcactcaatcaacggctatgtgtttgatagtctccagctttctgtttgcctccatgaagtagcctattggtacatcttgtcaattggtgctcaaacagacttcctctccgtcttcttctccggctacacctttaagcacaagatggtgtatgaggacactctcacactctttccattttctggagaaaccgtgttcatgagcatggagaatccaggcctttggatcttgggttgccacaacagtgattttcgcaatcggggaatgactgctctcctcaaagtcagcagctgtgataagaacacaggcgactattacgaagattcttacgaggacataagtgcctacttgttgtccaagaataacgccattgagcccagatcattctcccagaatcctcccgtgcttaaaaggcatcagcgcgaaatcaccagaactactcttcagtctgatcaagaggagattgactatgacgacaccataagcgtggaaatgaagaaggaggatttcgatatctatgacgaagatgagaaccagtctccgcggagctttcagaagaagacgcgacactacttcattgcagcagtcgaaaggctttgggactacggtatgtcatcatcccctcatgtgttgcgcaatagagctcagagtggaagtgttccacagttcaagaaagtcgtctttcaagagtttacagatggcagcttcacacagcctctctatcggggcgagcttaacgaacatttgggactccttggtccctatatccgagccgaagtggaggacaacattatggttacctttaggaatcaagcctctcgcccctacagcttctactcctccctcatcagttatgaggaggatcagagacaaggcgctgaaccacggaagaactttgtgaaaccgaatgagacgaagacctacttctggaaagtacagcaccacatggcccccacaaaagacgaattcgattgcaaagcatgggcgtatttttcagacgttgacttggagaaagatgtacattcaggacttattggtcctttgttggtgtgtcacactaacactctcaatccagcccatggcaggcaggtgacagtccaggaattcgctcttttctttaccatctttgatgagaccaagtcctggtacttcacggaaaacatggagcgcaattgcagagccccctgtaacatacagatggaggaccctacctttaaggaaaattatcggttccacgcaatcaacggatacattatggatacactccctggccttgtgatggctcaggaccaacgaatcaggtggtacctcctcagcatgggttctaatgagaacatacactccattcacttttcaggacatgtgttcactgtccggaagaaagaagagtataagatggccctctacaatttgtatccaggcgtgtttgagaccgttgaaatgcttccctctaaagctggcatctggagagtagagtgcttgatcggagaacatcttcacgcaggtatgagcaccttgttcctcgtgtacagcaacaaatgtcagaccccacttggcatggccagtggacacattcgcgactttcagatcacagcatctggccagtatggacaatgggccccaaagttggctcgcctccattactccggtagcataaatgcgtggtccactaaagaacctttcagctggattaaggtcgatcttcttgcccccatgatcatccacggcattaagacacagggagcgaggcagaaattctcctccctctacatctcacagttcattattatgtatagtttggacggcaagaagtggcaaacttatagaggtaacagtactggaacactcatggtgttcttcggcaacgttgatagctctggcatcaaacacaacatctttaatcctcccataatagctcggtacatcagattgcatccgacccactacagcattaggagtacactccgaatggagcttatgggttgcgacttgaattcctgttcaatgccactcggaatggagtctaaagccatctctgatgcacagataaccgccagtagctactttacgaacatgtttgctacgtggtcaccctctaaggcaaggcttcatttgcaaggccggtctaatgcctggagacctcaggtgaacaacccgaaagaatggctccaggtggactttcagaagaccatgaaagtaacaggtgtcactactcagggagttaagtccttgctcaccagcatgtatgtgaaggagttccttatttcctcatcacaagatggccaccagtggaccctcttctttcagaatggtaaggtcaaagtgtttcagggcaatcaagacagcttcacacccgtggtgaacagtcttgatcctccactcttgacacgataccttcgaatccatccacagtcttgggttcaccagattgcattgcgcatggaagtacttggatgcgaggctcaggacctctac

SEQ ID NO: 2518 - protein, 1457 aa, synthetic construct
  REGION 1..1457: note = Variant of human B-domain deleted Factor VIII
MQIELSTCFFLCLLRFCFSATRRYYLGAVELSWDYMQSDLGELPVDARFPPRVPKSFPFNTSVVYKKTLFVEFTDHLFNIAKPRPPWMGLLGPTIQAEVYDTVVITLKNMASHPVSLHAVGVSYWKASEGAEYDDQTSQREKEDDKVFPGGSHTYVWQVLKENGPMASDPLCLTYSYLSHVDLVKDLNSGLIGALLVCREGSLAKEKTQTLHKFILLFAVFDEGKSWHSETKNSLMQDRDAASARAWPKMHTVNGYVNRSLPGLIGCHRKSVYWHVIGMGTTPEVHSIFLEGHTFLVRNHRQASLEISPITFLTAQTLLIDLGQFLLFCHISSHQHDGMEAYVKVDSCPEEPQLRMKNNEEAEDYDDDLTDSEMDVVRFDDDNSPSFIQIRSVAKKHPKTWVHYIAAEEEDWDYAPLVLAPDDRSYKSQYLNNGPQRIGRKYKKVRFMAYTDETFKTREAIQHESGILGPLLYGEVGDTLLIIFKNQASRPYNIYPHGITDVRPLYSRRLPKGVKHLKDFPILPGEIFKYKWTVTVEDGPTKSDPRCLTRYYSSFVNMERDLASGLIGPLLICYKESVDQRGNQIMSDKRNVILFSVFDENRSWYLTENIQRFLPNPAGVQLEDPEFQASNIMHSINGYVFDSLQLSVCLHEVAYWYILSIGAQTDFLSVFFSGYTFKHKMVYEDTLTLFPFSGETVFMSMENPGLWILGCHNSDFRNRGMTALLKVSSCDKNTGDYYEDSYEDISAYLLSKNNAIEPRSFSQNPPVLKRHQREITRTTLQSDQEEIDYDDTISVEMKKEDFDIYDEDENQSPRSFQKKTRHYFIAAVERLWDYGMSSSPHVLRNRAQSGSVPQFKKVVFQEFTDGSFTQPLYRGELNEHLGLLGPYIRAEVEDNIMVTFRNQASRPYSFYSSLISYEEDQRQGAEPRKNFVKPNETKTYFWKVQHHMAPTKDEFDCKAWAYFSDVDLEKDVHSGLIGPLLVCHTNTLNPAHGRQVTVQEFALFFTIFDETKSWYFTENMERNCRAPCNIQMEDPTFKENYRFHAINGYIMDTLPGLVMAQDQRIRWYLLSMGSNENIHSIHFSGHVFTVRKKEEYKMALYNLYPGVFETVEMLPSKAGIWRVECLIGEHLHAGMSTLFLVYSNKCQTPLGMASGHIRDFQITASGQYGQWAPKLARLHYSGSINAWSTKEPFSWIKVDLLAPMIIHGIKTQGARQKFSSLYISQFIIMYSLDGKKWQTYRGNSTGTLMVFFGNVDSSGIKHNIFNPPIIARYIRLHPTHYSIRSTLRMELMGCDLNSCSMPLGMESKAISDAQITASSYFTNMFATWSPSKARLHLQGRSNAWRPQVNNPKEWLQVDFQKTMKVTGVTTQGVKSLLTSMYVKEFLISSSQDGHQWTLFFQNGKVKVFQGNQDSFTPVVNSLDPPLLTRYLRIHPQSWVHQIALRMEVLGCEAQDLY

SEQ ID NO: 2519 - DNA, 4371 bp, synthetic construct
  misc_feature 1..4371: note = Variant of human B-domain deleted Factor VIII
  source 1..4371: mol_type = other DNA
atgcagattgaactgtctacctgcttcttcctctgtttgctgaggttctgctttagcgccactagacggtactaccttggcgctgtggagctgtcctgggactatatgcagagtgatttgggagagcttcccgtcgacgcacgatttcctcctcgcgttccaaagtcatttcccttcaacacaagcgaggtgtacaagaagacgctcttcgtcgaattcaccgatcacctgttcaatatcgccaaacccagaccaccatggatgggtcttttggggcctaccatacaagcggaggtgtatgacacagttgttatcactctcaagaacatggcttctcatccggtaagtcttcacgcagtgggcgtgtcctactggaaagcttcagaaggagccgagtatgatgatcagacatcccagagggagaaagaagacgacaaggtatttccaggtgggtctcatacctatgtgtggcaagtgctcaaagagaatggccctatggcaagcgatccgctctgtttgacttacagctacctttcacacgttgacctcgtcaaggacctcaactccgggttgattggagccttgttggtatgcagggaaggatctcttgccaaagagaagacacagaccctccacaagtttatccttctctttgctgtgttcgatgagggcaaaagttggcatagcgaaacgaagaattccctcatgcaggatcgcgacgcagccagcgccagagcttggcccaagatgcacactgtgaacggatatgtcaataggtcacttcctggcttgattgggtgtcatcggaaaagtgtctactggcacgtgatcggaatggggacaacaccagaggtccactccatatttctcgaaggccataccttccttgttcgaaaccacagacaggcatccttggagatctctcccattacctttctcactgcccaaacgctccttatggacttgggtcagttccttctcttctgccatatcagctcacaccagcatgatggtatggaagcttatgtgaaagtcgacagttgtcctgaggagccacagttgcgcatgaagaataatgaagaagccgaggattacgacgacgatctcaccgattctgagatggacgtggtgaggtttgatgacgacaactctccctccttcattcaaatccggagcgtggcgaagaaacaccccaagacttgggtccactatatagcggcggaagaggaggattgggattacgctcctcttgtattggcaccagatgaccgctcatacaaaagccagtacctcaacaacggaccgcagagaattggccggaagtataagaaagtgcgatttatggcctatacagacgaaacctttaagacaagggaggccatccagcatgagagtgggattttgggacctcttctttacggcgaagttggtgataccctcctcatcatcttcaagaatcaagcttctcgcccctataacatttacccacacgggatcactgacgttaggcctttgtatagcagaagacttcccaaaggcgtgaagcatctcaaagacttccccattttgccaggcgagatctttaagtacaaatggaccgtcacagtggaagatggaccgactaaatcagaccctcgatgccttacgcggtactattcctccttcgtgaatatggagagagatttggcaagcggactcataggaccactcctcatctgttacaaggaatctgtagaccagaggggtaaccagattatgagtgataaacgcaatgtgatcctttttagcgtcttcgacgagaaccggtcctggtacttgaccgagaatatacaaaggttccttcccaaccccgcaggcgttcagttggaagaccctgagtttcaggccagcaatattatgcactcaatcaacggctatgtgtttgatagtctccagctttctgtttgcctccatgaagtagcctattggtacatcttgtcaattggtgctcaaacagacttcctctccgtcttcttctccggctacacctttaagcacaagatggtgtatgaggacactctcacactctttccattttctggagaaaccgtgttcatgagcatggagaatccaggcctttggatcttgggttgccacaacagtgattttcgcaatcggggaatgactgctctcctcaaagtcagcagctgtgataagaacacaggcgactattacgaagattcttacgaggacataagtgcctacttgttgtccaagaataacgccattgagcccagatcattctcccagaatcctcccgtgcttaaaaggcatcagcgcgaaatcaccagaactactcttcagtctgatcaagaggagattgactatgacgacaccataagcgtggaaatgaagaaggaggatttcgatatctatgacgaagatgagaaccagtctccgcggagctttcagaagaagacgcgacactacttcattgcagcagtcgaaaggctttgggactacggtatgtcatcatcccctcatgtgttgcgcaatagagctcagagtggaagtgttccacagttcaagaaagtcgtctttcaagagtttacagatggcagcttcacacagcctctctatcggggcgagcttaacgaacatttgggactccttggtccctatatccgagccgaagtggaggacaacattatggttacctttaggaatcaagcctctcgcccctacagcttctactcctccctcatcagttatgaggaggatcagagacaaggcgctgaaccacggaagaactttgtgaaaccgaatgagacgaagacctacttctggaaagtacagcaccacatggcccccacaaaagacgaattcgattgcaaagcatgggcgtatttttcagacgttgacttggagaaagatgtacattcaggacttattggtcctttgttggtgtgtcacactaacactctcaatccagcccatggcaggcaggtgacagtccaggaattcgctcttttctttaccatctttgatgagaccaagtcctggtacttcacggaaaacatggagcgcaattgcagagccccctgtaacatacagatggaggaccctacctttaaggaaaattatcggttccacgcaatcaacggatacattatggatacactccctggccttgtgatggctcaggaccaacgaatcaggtggtacctcctcagcatgggttctaatgagaacatacactccattcacttttcaggacatgtgttcactgtccggaagaaagaagagtataagatggccctctacaatttgtatccaggcgtgtttgagaccgttgaaatgcttccctctaaagctggcatctggagagtagagtgcttgatcggagaacatcttcacgcaggtatgagcaccttgttcctcgtgtacagcaacaaatgtcagaccccacttggcatggccagtggacacattcgcgactttcagatcacagcatctggccagtatggacaatgggccccaaagttggctcgcctccattactccggtagcataaatgcgtggtccactaaagaacctttcagctggattaaggtcgatcttcttgcccccatgatcatccacggcattaagacacagggagcgaggcagaaattctcctccctctacatctcacagttcattattatgtatagtttggacggcaagaagtggcaaacttatagaggtaacagtactggaacactcatggtgttcttcggcaacgttgatagctctggcatcaaacacaacatctttaatcctcccataatagctcggtacatcagattgcatccgacccactacagcattaggagtacactccgaatggagcttatgggttgcgacttgaattcctgttcaatgccactcggaatggagtctaaagccatctctgatgcacagataaccgccagtagctactttacgaacatgtttgctacgtggtcaccctctaaggcaaggcttcatttgcaaggccggtctaatgcctggagacctcaggtgaacaacccgaaagaatggctccaggtggactttcagaagaccatgaaagtaacaggtgtcactactcagggagttaagtccttgctcaccagcatgtatgtgaaggagttccttatttcctcatcacaagatggccaccagtggaccctcttctttcagaatggtaaggtcaaagtgtttcagggcaatcaagacagcttcacacccgtggtgaacagtcttgatcctccactcttgacacgataccttcgaatccatccacagtcttgggttcaccagattgcattgcgcatggaagtacttggatgcgaggctcaggacctctac

SEQ ID NO: 2520 - protein, 1457 aa, synthetic construct
  REGION 1..1457: note = Variant of human B-domain deleted Factor VIII
MQIELSTCFFLCLLRFCFSATRRYYLGAVELSWDYMQSDLGELPVDARFPPRVPKSFPFNTSEVYKKTLFVEFTDHLFNIAKPRPPWMGLLGPTIQAEVYDTVVITLKNMASHPVSLHAVGVSYWKASEGAEYDDQTSQREKEDDKVFPGGSHTYVWQVLKENGPMASDPLCLTYSYLSHVDLVKDLNSGLIGALLVCREGSLAKEKTQTLHKFILLFAVFDEGKSWHSETKNSLMQDRDAASARAWPKMHTVNGYVNRSLPGLIGCHRKSVYWHVIGMGTTPEVHSIFLEGHTFLVRNHRQASLEISPITFLTAQTLLMDLGQFLLFCHISSHQHDGMEAYVKVDSCPEEPQLRMKNNEEAEDYDDDLTDSEMDVVRFDDDNSPSFIQIRSVAKKHPKTWVHYIAAEEEDWDYAPLVLAPDDRSYKSQYLNNGPQRIGRKYKKVRFMAYTDETFKTREAIQHESGILGPLLYGEVGDTLLIIFKNQASRPYNIYPHGITDVRPLYSRRLPKGVKHLKDFPILPGEIFKYKWTVTVEDGPTKSDPRCLTRYYSSFVNMERDLASGLIGPLLICYKESVDQRGNQIMSDKRNVILFSVFDENRSWYLTENIQRFLPNPAGVQLEDPEFQASNIMHSINGYVFDSLQLSVCLHEVAYWYILSIGAQTDFLSVFFSGYTFKHKMVYEDTLTLFPFSGETVFMSMENPGLWILGCHNSDFRNRGMTALLKVSSCDKNTGDYYEDSYEDISAYLLSKNNAIEPRSFSQNPPVLKRHQREITRTTLQSDQEEIDYDDTISVEMKKEDFDIYDEDENQSPRSFQKKTRHYFIAAVERLWDYGMSSSPHVLRNRAQSGSVPQFKKVVFQEFTDGSFTQPLYRGELNEHLGLLGPYIRAEVEDNIMVTFRNQASRPYSFYSSLISYEEDQRQGAEPRKNFVKPNETKTYFWKVQHHMAPTKDEFDCKAWAYFSDVDLEKDVHSGLIGPLLVCHTNTLNPAHGRQVTVQEFALFFTIFDETKSWYFTENMERNCRAPCNIQMEDPTFKENYRFHAINGYIMDTLPGLVMAQDQRIRWYLLSMGSNENIHSIHFSGHVFTVRKKEEYKMALYNLYPGVFETVEMLPSKAGIWRVECLIGEHLHAGMSTLFLVYSNKCQTPLGMASGHIRDFQITASGQYGQWAPKLARLHYSGSINAWSTKEPFSWIKVDLLAPMIIHGIKTQGARQKFSSLYISQFIIMYSLDGKKWQTYRGNSTGTLMVFFGNVDSSGIKHNIFNPPIIARYIRLHPTHYSIRSTLRMELMGCDLNSCSMPLGMESKAISDAQITASSYFTNMFATWSPSKARLHLQGRSNAWRPQVNNPKEWLQVDFQKTMKVTGVTTQGVKSLLTSMYVKEFLISSSQDGHQWTLFFQNGKVKVFQGNQDSFTPVVNSLDPPLLTRYLRIHPQSWVHQIALRMEVLGCEAQDLY

SEQ ID NO: 2521 - DNA, 4371 bp, synthetic construct
  misc_feature 1..4371: note = Variant of human B-domain deleted Factor VIII
  source 1..4371: mol_type = other DNA
atgcagattgaactgtctacctgcttcttcctctgtttgctgaggttctgctttagcgccactagacggtactaccttggcgctgtggagctgtcctgggactatatgcagagtgatttgggagagcttcccgtcgacgcacgatttcctcctcgcgttccaaagtcatttcccttcaacacaagcgtggtgtacaagaagacgctcttcgtcgaattcaccgatcacctgttcaatatcgccaaacccagaccaccatggatgggtcttttggggcctaccatacaagcggaggtgtatgacacagttgttatcactctcaagaacatggcttctcatccggtaagtcttcacgcagtgggcgtgtcctactggaaagcttcagaaggagccgagtatgatgatcagacatcccagagggagaaagaagacgacaaggtatttccaggtgggtctcatacctatgtgtggcaagtgctcaaagagaatggccctatggcaagcgatccgctctgtttgacttacagctacctttcacacgttgacctcgtcaaggacctcaactccgggttgattggagccttgttggtatgcagggaaggatctcttgccaaagagaagacacagaccctccacaagtttatccttctctttgctgtgttcgatgagggcaaaagttggcatagcgaaacgaagaattccctcatgcaggatcgcgacgcagccagcgccagagcttggcccaagatgcacactgtgaacggatatgtcaataggtcacttcctggcttgattgggtgtcatcggaaaagtgtctactggcacgtgatcggaatggggacaacaccagaggtccactccatatttctcgaaggccataccttccttgttcgaaaccacagacaggcatccttggagatctctcccattacctttctcactgcccaaacgctccttatggacttgggtcagttccttctcttctgccatatcagctcacaccagcatgatggtatggaagcttatgtgaaagtcgacagttgtcctgaggagccacagttgcgcatgaagaataatgaagaagccgaggattacgacgacgatctcaccgattctgagatggacgtggtgaggtttgatgacgacaactctccctccttcattcaaatccggagcgtggcgaagaaacaccccaagacttgggtccactatatagcggcggaagaggaggattgggattacgctcctcttgtattggcaccagatgaccgctcatacaaaagccagtacctcaacaacggaccgcagagaattggccggaagtataagaaagtgcgatttatggcctatacagacgaaacctttaagacaagggaggccatccagcatgagagtgggattttgggacctcttctttacggcgaagttggtgataccctcctcatcatcttcaagaatcaagcttctcgcccctataacatttacccacacgggatcactgacgttaggcctttgtatagcagaagacttcccaaaggcgtgaagcatctcaaagacttccccattttgccaggcgagatctttaagtacaaatggaccgtcacagtggaagatggaccgactaaatcagaccctcgatgccttacgcggtactattcctccttcgtgaatatggagagagatttggcaagcggactcataggaccactcctcatctgttacaaggaatctgtagaccagaggggtaaccagattatgagtgataaacgcaatgtgatcctttttagcgtcttcgacgagaaccggtcctggtacttgaccgagaatatacaaaggttccttcccaaccccgcaggcgttcagttggaagaccctgagtttcaggccagcaatattatgcactcaatcaacggctatgtgtttgatagtctccagctttctgtttgcctccatgaagtagcctattggtacatcttgtcaattggtgctcaaacagacttcctctccgtcttcttctccggctacacctttaagcacaagatggtgtatgaggacactctcacactctttccattttctggagaaaccgtgttcatgagcatggagaatccaggcctttggatcttgggttgccacaacagtgattttcgcaatcggggaatgactgctctcctcaaagtcagcagctgtgataagaacacaggcgactattacgaagattcttacgaggacataagtgcctacttgttgtccaagaataacgccattgagcccagatcattctcccagaatcctcccgtgcttaaaaggcatcagcgcgaaatcaccagaactactcttcagtctgatcaagaggagattgactatgacgacaccataagcgtggaaatgaagaaggaggatttcgatatccatgacgaagatgagaaccagtctccgcggagctttcagaagaagacgcgacactacttcattgcagcagtcgaaaggctttgggactacggtatgtcatcatcccctcatgtgttgcgcaatagagctcagagtggaagtgttccacagttcaagaaagtcgtctttcaagagtttacagatggcagcttcacacagcctctctatcggggcgagcttaacgaacatttgggactccttggtccctatatccgagccgaagtggaggacaacattatggttacctttaggaatcaagcctctcgcccctacagcttctactcctccctcatcagttatgaggaggatcagagacaaggcgctgaaccacggaagaactttgtgaaaccgaatgagacgaagacctacttctggaaagtacagcaccacatggcccccacaaaagacgaattcgattgcaaagcatgggcgtatttttcagacgttgacttggagaaagatgtacattcaggacttattggtcctttgttggtgtgtcacactaacactctcaatccagcccatggcaggcaggtgacagtccaggaattcgctcttttctttaccatctttgatgagaccaagtcctggtacttcacggaaaacatggagcgcaattgcagagccccctgtaacatacagatggaggaccctacctttaaggaaaattatcggttccacgcaatcaacggatacattatggatacactccctggccttgtgatggctcaggaccaacgaatcaggtggtacctcctcagcatgggttctaatgagaacatacactccattcacttttcaggacatgtgttcactgtccggaagaaagaagagtataagatggccctctacaatttgtatccaggcgtgtttgagaccgttgaaatgcttccctctaaagctggcatctggagagtagagtgcttgatcggagaacatcttcacgcaggtatgagcaccttgttcctcgtgtacagcaacaaatgtcagaccccacttggcatggccagtggacacattcgcgactttcagatcacagcatctggccagtatggacaatgggccccaaagttggctcgcctccattactccggtagcataaatgcgtggtccactaaagaacctttcagctggattaaggtcgatcttcttgcccccatgatcatccacggcattaagacacagggagcgaggcagaaattctcctccctctacatctcacagttcattattatgtatagtttggacggcaagaagtggcaaacttatagaggtaacagtactggaacactcatggtgttcttcggcaacgttgatagctctggcatcaaacacaacatctttaatcctcccataatagctcggtacatcagattgcatccgacccactacagcattaggagtacactccgaatggagcttatgggttgcgacttgaattcctgttcaatgccactcggaatggagtctaaagccatctctgatgcacagataaccgccagtagctactttacgaacatgtttgctacgtggtcaccctctaaggcaaggcttcatttgcaaggccggtctaatgcctggagacctcaggtgaacaacccgaaagaatggctccaggtggactttcagaagaccatgaaagtaacaggtgtcactactcagggagttaagtccttgctcaccagcatgtatgtgaaggagttccttatttcctcatcacaagatggccaccagtggaccctcttctttcagaatggtaaggtcaaagtgtttcagggcaatcaagacagcttcacacccgtggtgaacagtcttgatcctccactcttgacacgataccttcgaatccatccacagtcttgggttcaccagattgcattgcgcatggaagtacttggatgcgaggctcaggacctctac

SEQ ID NO: 2522 - protein, 1457 aa, synthetic construct
  REGION 1..1457: note = Variant of human B-domain deleted Factor VIII
MQIELSTCFFLCLLRFCFSATRRYYLGAVELSWDYMQSDLGELPVDARFPPRVPKSFPFNTSVVYKKTLFVEFTDHLFNIAKPRPPWMGLLGPTIQAEVYDTVVITLKNMASHPVSLHAVGVSYWKASEGAEYDDQTSQREKEDDKVFPGGSHTYVWQVLKENGPMASDPLCLTYSYLSHVDLVKDLNSGLIGALLVCREGSLAKEKTQTLHKFILLFAVFDEGKSWHSETKNSLMQDRDAASARAWPKMHTVNGYVNRSLPGLIGCHRKSVYWHVIGMGTTPEVHSIFLEGHTFLVRNHRQASLEISPITFLTAQTLLMDLGQFLLFCHISSHQHDGMEAYVKVDSCPEEPQLRMKNNEEAEDYDDDLTDSEMDVVRFDDDNSPSFIQIRSVAKKHPKTWVHYIAAEEEDWDYAPLVLAPDDRSYKSQYLNNGPQRIGRKYKKVRFMAYTDETFKTREAIQHESGILGPLLYGEVGDTLLIIFKNQASRPYNIYPHGITDVRPLYSRRLPKGVKHLKDFPILPGEIFKYKWTVTVEDGPTKSDPRCLTRYYSSFVNMERDLASGLIGPLLICYKESVDQRGNQIMSDKRNVILFSVFDENRSWYLTENIQRFLPNPAGVQLEDPEFQASNIMHSINGYVFDSLQLSVCLHEVAYWYILSIGAQTDFLSVFFSGYTFKHKMVYEDTLTLFPFSGETVFMSMENPGLWILGCHNSDFRNRGMTALLKVSSCDKNTGDYYEDSYEDISAYLLSKNNAIEPRSFSQNPPVLKRHQREITRTTLQSDQEEIDYDDTISVEMKKEDFDIHDEDENQSPRSFQKKTRHYFIAAVERLWDYGMSSSPHVLRNRAQSGSVPQFKKVVFQEFTDGSFTQPLYRGELNEHLGLLGPYIRAEVEDNIMVTFRNQASRPYSFYSSLISYEEDQRQGAEPRKNFVKPNETKTYFWKVQHHMAPTKDEFDCKAWAYFSDVDLEKDVHSGLIGPLLVCHTNTLNPAHGRQVTVQEFALFFTIFDETKSWYFTENMERNCRAPCNIQMEDPTFKENYRFHAINGYIMDTLPGLVMAQDQRIRWYLLSMGSNENIHSIHFSGHVFTVRKKEEYKMALYNLYPGVFETVEMLPSKAGIWRVECLIGEHLHAGMSTLFLVYSNKCQTPLGMASGHIRDFQITASGQYGQWAPKLARLHYSGSINAWSTKEPFSWIKVDLLAPMIIHGIKTQGARQKFSSLYISQFIIMYSLDGKKWQTYRGNSTGTLMVFFGNVDSSGIKHNIFNPPIIARYIRLHPTHYSIRSTLRMELMGCDLNSCSMPLGMESKAISDAQITASSYFTNMFATWSPSKARLHLQGRSNAWRPQVNNPKEWLQVDFQKTMKVTGVTTQGVKSLLTSMYVKEFLISSSQDGHQWTLFFQNGKVKVFQGNQDSFTPVVNSLDPPLLTRYLRIHPQSWVHQIALRMEVLGCEAQDLY

SEQ ID NO: 2523 - DNA, 4371 bp, synthetic construct
  misc_feature 1..4371: note = Variant of human B-domain deleted Factor VIII
  source 1..4371: mol_type = other DNA
atgcagattgaactgtctacctgcttcttcctctgtttgctgaggttctgctttagcgccactagacggtactaccttggcgctgtggagctgtcctgggactatatgcagagtgatttgggagagcttcccgtcgacgcacgatttcctcctcgcgttccaaagtcatttcccttcaacacaagcgtggtgtacaagaagacgctcttcgtcgaattcaccgatcacctgttcaatatcgccaaacccagaccaccatggatgggtcttttggggcctaccatacaagcggaggtgtatgacacagttgttatcactctcaagaacatggcttctcatccggtaagtcttcacgcagtgggcgtgtcctactggaaagcttcagaaggagccgagtatgatgatcagacatcccagagggagaaagaagacgacaaggtatttccaggtgggtctcatacctatgtgtggcaagtgctcaaagagaatggccctatggcaagcgatccgctctgtttgacttacagctacctttcacacgttgacctcgtcaaggacctcaactccgggttgattggagccttgttggtatgcagggaaggatctcttgccaaagagaagacacagaccctccacaagtttatccttctctttgctgtgttcgatgagggcaaaagttggcatagcgaaacgaagaattccctcatgcaggatcgcgacgcagccagcgccagagcttggcccaagatgcacactgtgaacggatatgtcaataggtcacttcctggcttgattgggtgtcatcggaaaagtgtctactggcacgtgatcggaatggggacaacaccagaggtccactccatatttctcgaaggccataccttccttgttcgaaaccacagacaggcatccttggagatctctcccattacctttctcactgcccaaacgctccttatggacttgggtcagttccttctcttctgccatatcagctcacaccagcatgatggtatggaagcttatgtgaaagtcgacagttgtcctgaggagccacagttgcgcatgaagaataatgaagaagccgaggattacgacgacgatctcaccgattctgagatggacgtggtgaggtttgatgacgacaactctccctccttcattcaaatccggagcgtggcgaagaaacaccccaagacttgggtccactatatagcggcggaagaggaggattgggattacgctcctcttgtattggcaccagatgaccgctcatacaaaagccagtacctcaacaacggaccgcagagaattggccggaagtataagaaagtgcgatttatggcctatacagacgaaacctttaagacaagggaggccatccagcatgagagtgggattttgggacctcttctttacggcgaagttggtgataccctcctcatcatcttcaagaatcaagcttctcgcccctataacatttacccacacgggatcactgacgttaggcctttgtatagcagaagacttcccaaaggcgtgaagcatctcaaagacttccccattttgccaggcgagatctttaagtacaaatggaccgtcacagtggaagatggaccgactaaatcagaccctcgatgccttacgcggtactattcctccttcgtgaatatggagagagatttggcaagcggactcataggaccactcctcatctgttacaaggaatctgtagaccagaggggtaaccagattatgagtgataaacgcaatgtgatcctttttagcgtcttcgacgagaaccggtcctggtacttgaccgagaatatacaaaggttccttcccaaccccgcaggcgttcagttggaagaccctgagtttcaggccagcaatattatgcactcaatcaacggctatgtgtttgatagtctccagctttctgtttgcctccatgaagtagcctattggtacatcttgtcaattggtgctcaaacagacttcctctccgtcttcttctccggctacacctttaagcacaagatggtgtatgaggacactctcacactctttccattttctggagaaaccgtgttcatgagcatggagaatccaggcctttggatcttgggttgccacaacagtgattttcgcaatcggggaatgactgctctcctcaaagtcagcagctgtgataagaacacaggcgactattacgaagattcttacgaggacataagtgcctactatttgtccaagaataacgccattgagcccagatcattctcccagaatcctcccgtgcttaaaaggcatcagcgcgaaatcaccagaactactcttcagtctgatcaagaggagattgactatgacgacaccataagcgtggaaatgaagaaggaggatttcgatatctatgacgaagatgagaaccagtctccgcggagctttcagaagaagacgcgacactacttcattgcagcagtcgaaaggctttgggactacggtatgtcatcatcccctcatgtgttgcgcaatagagctcagagtggaagtgttccacagttcaagaaagtcgtctttcaagagtttacagatggcagcttcacacagcctctctatcggggcgagcttaacgaacatttgggactccttggtccctatatccgagccgaagtggaggacaacattatggttacctttaggaatcaagcctctcgcccctacagcttctactcctccctcatcagttatgaggaggatcagagacaaggcgctgaaccacggaagaactttgtgaaaccgaatgagacgaagacctacttctggaaagtacagcaccacatggcccccacaaaagacgaattcgattgcaaagcatgggcgtatttttcagacgttgacttggagaaagatgtacattcaggacttattggtcctttgttggtgtgtcacactaacactctcaatccagcccatggcaggcaggtgacagtccaggaattcgctcttttctttaccatctttgatgagaccaagtcctggtacttcacggaaaacatggagcgcaattgcagagccccctgtaacatacagatggaggaccctacctttaaggaaaattatcggttccacgcaatcaacggatacattatggatacactccctggccttgtgatggctcaggaccaacgaatcaggtggtacctcctcagcatgggttctaatgagaacatacactccattcacttttcaggacatgtgttcactgtccggaagaaagaagagtataagatggccctctacaatttgtatccaggcgtgtttgagaccgttgaaatgcttccctctaaagctggcatctggagagtagagtgcttgatcggagaacatcttcacgcaggtatgagcaccttgttcctcgtgtacagcaacaaatgtcagaccccacttggcatggccagtggacacattcgcgactttcagatcacagcatctggccagtatggacaatgggccccaaagttggctcgcctccattactccggtagcataaatgcgtggtccactaaagaacctttcagctggattaaggtcgatcttcttgcccccatgatcatccacggcattaagacacagggagcgaggcagaaattctcctccctctacatctcacagttcattattatgtatagtttggacggcaagaagtggcaaacttatagaggtaacagtactggaacactcatggtgttcttcggcaacgttgatagctctggcatcaaacacaacatctttaatcctcccataatagctcggtacatcagattgcatccgacccactacagcattaggagtacactccgaatggagcttatgggttgcgacttgaattcctgttcaatgccactcggaatggagtctaaagccatctctgatgcacagataaccgccagtagctactttacgaacatgtttgctacgtggtcaccctctaaggcaaggcttcatttgcaaggccggtctaatgcctggagacctcaggtgaacaacccgaaagaatggctccaggtggactttcagaagaccatgaaagtaacaggtgtcactactcagggagttaagtccttgctcaccagcatgtatgtgaaggagttccttatttcctcatcacaagatggccaccagtggaccctcttctttcagaatggtaaggtcaaagtgtttcagggcaatcaagacagcttcacacccgtggtgaacagtcttgatcctccactcttgacacgataccttcgaatccatccacagtcttgggttcaccagattgcattgcgcatggaagtacttggatgcgaggctcaggacctctac

SEQ ID NO: 2524 - protein, 1457 aa, synthetic construct
  REGION 1..1457: note = Variant of human B-domain deleted Factor VIII
MQIELSTCFFLCLLRFCFSATRRYYLGAVELSWDYMQSDLGELPVDARFPPRVPKSFPFNTSVVYKKTLFVEFTDHLFNIAKPRPPWMGLLGPTIQAEVYDTVVITLKNMASHPVSLHAVGVSYWKASEGAEYDDQTSQREKEDDKVFPGGSHTYVWQVLKENGPMASDPLCLTYSYLSHVDLVKDLNSGLIGALLVCREGSLAKEKTQTLHKFILLFAVFDEGKSWHSETKNSLMQDRDAASARAWPKMHTVNGYVNRSLPGLIGCHRKSVYWHVIGMGTTPEVHSIFLEGHTFLVRNHRQASLEISPITFLTAQTLLMDLGQFLLFCHISSHQHDGMEAYVKVDSCPEEPQLRMKNNEEAEDYDDDLTDSEMDVVRFDDDNSPSFIQIRSVAKKHPKTWVHYIAAEEEDWDYAPLVLAPDDRSYKSQYLNNGPQRIGRKYKKVRFMAYTDETFKTREAIQHESGILGPLLYGEVGDTLLIIFKNQASRPYNIYPHGITDVRPLYSRRLPKGVKHLKDFPILPGEIFKYKWTVTVEDGPTKSDPRCLTRYYSSFVNMERDLASGLIGPLLICYKESVDQRGNQIMSDKRNVILFSVFDENRSWYLTENIQRFLPNPAGVQLEDPEFQASNIMHSINGYVFDSLQLSVCLHEVAYWYILSIGAQTDFLSVFFSGYTFKHKMVYEDTLTLFPFSGETVFMSMENPGLWILGCHNSDFRNRGMTALLKVSSCDKNTGDYYEDSYEDISAYYLSKNNAIEPRSFSQNPPVLKRHQREITRTTLQSDQEEIDYDDTISVEMKKEDFDIYDEDENQSPRSFQKKTRHYFIAAVERLWDYGMSSSPHVLRNRAQSGSVPQFKKVVFQEFTDGSFTQPLYRGELNEHLGLLGPYIRAEVEDNIMVTFRNQASRPYSFYSSLISYEEDQRQGAEPRKNFVKPNETKTYFWKVQHHMAPTKDEFDCKAWAYFSDVDLEKDVHSGLIGPLLVCHTNTLNPAHGRQVTVQEFALFFTIFDETKSWYFTENMERNCRAPCNIQMEDPTFKENYRFHAINGYIMDTLPGLVMAQDQRIRWYLLSMGSNENIHSIHFSGHVFTVRKKEEYKMALYNLYPGVFETVEMLPSKAGIWRVECLIGEHLHAGMSTLFLVYSNKCQTPLGMASGHIRDFQITASGQYGQWAPKLARLHYSGSINAWSTKEPFSWIKVDLLAPMIIHGIKTQGARQKFSSLYISQFIIMYSLDGKKWQTYRGNSTGTLMVFFGNVDSSGIKHNIFNPPIIARYIRLHPTHYSIRSTLRMELMGCDLNSCSMPLGMESKAISDAQITASSYFTNMFATWSPSKARLHLQGRSNAWRPQVNNPKEWLQVDFQKTMKVTGVTTQGVKSLLTSMYVKEFLISSSQDGHQWTLFFQNGKVKVFQGNQDSFTPVVNSLDPPLLTRYLRIHPQSWVHQIALRMEVLGCEAQDLY

SEQ ID NO: 2525 - DNA, 4371 bp, synthetic construct
  misc_feature 1..4371: note = Variant of human B-domain deleted Factor VIII
  source 1..4371: mol_type = other DNA
atgcagattgaactgtctacctgcttcttcctctgtttgctgaggttctgctttagcgccactagacggtactaccttggcgctgtggagctgtcctgggactatatgcagagtgatttgggagagcttcccgtcgacgcacgatttcctcctcgcgttccaaagtcatttcccttcaacacaagcgtggtgtacaagaagacgctcttcgtcgaattcaccgatcacctgttcaatatcgccaaacccagaccaccatggatgggtcttttggggcctaccatacaagcggaggtgtatgacacagttgttatcactctcaagaacatggcttctcatccggtaagtcttcacgcagtgggcgtgtcctactggaaagcttcagaaggagccgagtatgatgatcagacatcccagagggagaaagaagacgacaaggtatttccaggtgggtctcatacctatgtgtggcaagtgctcaaagagaatggccctatggcaagcgatccgctctgtttgacttacagctacctttcacacgttgacctcgtcaaggacctcaactccgggttgattggagccttgttggtatgcagggaaggatctcttgccaaagagaagacacagaccctccacaagtttatccttctctttgctgtgttcgatgagggcaaaagttggcatagcgaaacgaagaattccctcatgcaggatcgcgacgcagccagcgccagagcttggcccaagatgcacactgtgaacggatatgtcaataggtcacttcctggcttgattgggtgtcatcggaaaagtgtctactggcacgtgatcggaatggggacaacaccagaggtccactccatatttctcgaaggccataccttccttgttcgaaaccacagacaggcatccttggagatctctcccattacctttctcactgcccaaacgctccttatggacttgggtcagttccttctcttctgccatatcggttcacaccagcatgatggtatggaagcttatgtgaaagtcgacagttgtcctgaggagccacagttgcgcatgaagaataatgaagaagccgaggattacgacgacgatctcaccgattctgagatggacgtggtgaggtttgatgacgacaactctccctccttcattcaaatccggagcgtggcgaagaaacaccccaagacttgggtccactatatagcggcggaagaggaggattgggattacgctcctcttgtattggcaccagatgaccgctcatacaaaagccagtacctcaacaacggaccgcagagaattggccggaagtataagaaagtgcgatttatggcctatacagacgaaacctttaagacaagggaggccatccagcatgagagtgggattttgggacctcttctttacggcgaagttggtgataccctcctcatcatcttcaagaatcaagcttctcgcccctataacatttacccacacgggatcactgacgttaggcctttgtatagcagaagacttcccaaaggcgtgaagcatctcaaagacttccccattttgccaggcgagatctttaagtacaaatggaccgtcacagtggaagatggaccgactaaatcagaccctcgatgccttacgcggtactattcctccttcgtgaatatggagagagatttggcaagcggactcataggaccactcctcatctgttacaaggaatctgtagaccagaggggtaaccagattatgagtgataaacgcaatgtgatcctttttagcgtcttcgacgagaaccggtcctggtacttgaccgagaatatacaaaggttccttcccaaccccgcaggcgttcagttggaagaccctgagtttcaggccagcaatattatgcactcaatcaacggctatgtgtttgatagtctccagctttctgtttgcctccatgaagtagcctattggtacatcttgtcaattggtgctcaaacagacttcctctccgtcttcttctccggctacacctttaagcacaagatggtgtatgaggacactctcacactctttccattttctggagaaaccgtgttcatgagcatggagaatccaggcctttggatcttgggttgccacaacagtgattttcgcaatcggggaatgactgctctcctcaaagtcagcagctgtgataagaacacaggcgactattacgaagattcttacgaggacataagtgcctacttgttgtccaagaataacgccattgagcccagatcattctcccagaatcctcccgtgcttaaaaggcatcagcgcgaaatcaccagaactactcttcagtctgatcaagaggagattgactatgacgacaccataagcgtggaaatgaagaaggaggatttcgatatctatgacgaagatgagaaccagtctccgcggagctttcagaagaagacgcgacactacttcattgcagcagtcgaaaggctttgggactacggtatgtcatcatcccctcatgtgttgcgcaatagagctcagagtggaagtgttccacagttcaagaaagtcgtctttcaagagtttacagatggcagcttcacacagcctctctatcggggcgagcttaacgaacatttgggactccttggtccctatatccgagccgaagtggaggacaacattatggttacctttaggaatcaagcctctcgcccctacagcttctactcctccctcatcagttatgaggaggatcagagacaaggcgctgaaccacggaagaactttgtgaaaccgaatgagacgaagacctacttctggaaagtacagcaccacatggcccccacaaaagacgaattcgattgcaaagcatgggcgtatttttcagacgttgacttggagaaagatgtacattcaggacttattggtcctttgttggtgtgtcacactaacactctcaatccagcccatggcaggcaggtgacagtccaggaattcgctcttttctttaccatctttgatgagaccaagtcctggtacttcacggaaaacatggagcgcaattgcagagccccctgtaacatacagatggaggaccctacctttaaggaaaattatcggttccacgcaatcaacggatacattatggatacactccctggccttgtgatggctcaggaccaacgaatcaggtggtacctcctcagcatgggttctaatgagaacatacactccattcacttttcaggacatgtgttcactgtccggaagaaagaagagtataagatggccctctacaatttgtatccaggcgtgtttgagaccgttgaaatgcttccctctaaagctggcatctggagagtagagtgcttgatcggagaacatcttcacgcaggtatgagcaccttgttcctcgtgtacagcaacaaatgtcagaccccacttggcatggccagtggacacattcgcgactttcagatcacagcatctggccagtatggacaatgggccccaaagttggctcgcctccattactccggtagcataaatgcgtggtccactaaagaacctttcagctggattaaggtcgatcttcttgcccccatgatcatccacggcattaagacacagggagcgaggcagaaattctcctccctctacatctcacagttcattattatgtatagtttggacggcaagaagtggcaaacttatagaggtaacagtactggaacactcatggtgttcttcggcaacgttgatagctctggcatcaaacacaacatctttaatcctcccataatagctcggtacatcagattgcatccgacccactacagcattaggagtacactccgaatggagcttatgggttgcgacttgaattcctgttcaatgccactcggaatggagtctaaagccatctctgatgcacagataaccgccagtagctactttacgaacatgtttgctacgtggtcaccctctaaggcaaggcttcatttgcaaggccggtctaatgcctggagacctcaggtgaacaacccgaaagaatggctccaggtggactttcagaagaccatgaaagtaacaggtgtcactactcagggagttaagtccttgctcaccagcatgtatgtgaaggagttccttatttcctcatcacaagatggccaccagtggaccctcttctttcagaatggtaaggtcaaagtgtttcagggcaatcaagacagcttcacacccgtggtgaacagtcttgatcctccactcttgacacgataccttcgaatccatccacagtcttgggttcaccagattgcattgcgcatggaagtacttggatgcgaggctcaggacctctac

SEQ ID NO: 2526 - protein, 1457 aa, synthetic construct
  REGION 1..1457: note = Variant of human B-domain deleted Factor VIII
MQIELSTCFFLCLLRFCFSATRRYYLGAVELSWDYMQSDLGELPVDARFPPRVPKSFPFNTSVVYKKTLFVEFTDHLFNIAKPRPPWMGLLGPTIQAEVYDTVVITLKNMASHPVSLHAVGVSYWKASEGAEYDDQTSQREKEDDKVFPGGSHTYVWQVLKENGPMASDPLCLTYSYLSHVDLVKDLNSGLIGALLVCREGSLAKEKTQTLHKFILLFAVFDEGKSWHSETKNSLMQDRDAASARAWPKMHTVNGYVNRSLPGLIGCHRKSVYWHVIGMGTTPEVHSIFLEGHTFLVRNHRQASLEISPITFLTAQTLLMDLGQFLLFCHIGSHQHDGMEAYVKVDSCPEEPQLRMKNNEEAEDYDDDLTDSEMDVVRFDDDNSPSFIQIRSVAKKHPKTWVHYIAAEEEDWDYAPLVLAPDDRSYKSQYLNNGPQRIGRKYKKVRFMAYTDETFKTREAIQHESGILGPLLYGEVGDTLLIIFKNQASRPYNIYPHGITDVRPLYSRRLPKGVKHLKDFPILPGEIFKYKWTVTVEDGPTKSDPRCLTRYYSSFVNMERDLASGLIGPLLICYKESVDQRGNQIMSDKRNVILFSVFDENRSWYLTENIQRFLPNPAGVQLEDPEFQASNIMHSINGYVFDSLQLSVCLHEVAYWYILSIGAQTDFLSVFFSGYTFKHKMVYEDTLTLFPFSGETVFMSMENPGLWILGCHNSDFRNRGMTALLKVSSCDKNTGDYYEDSYEDISAYLLSKNNAIEPRSFSQNPPVLKRHQREITRTTLQSDQEEIDYDDTISVEMKKEDFDIYDEDENQSPRSFQKKTRHYFIAAVERLWDYGMSSSPHVLRNRAQSGSVPQFKKVVFQEFTDGSFTQPLYRGELNEHLGLLGPYIRAEVEDNIMVTFRNQASRPYSFYSSLISYEEDQRQGAEPRKNFVKPNETKTYFWKVQHHMAPTKDEFDCKAWAYFSDVDLEKDVHSGLIGPLLVCHTNTLNPAHGRQVTVQEFALFFTIFDETKSWYFTENMERNCRAPCNIQMEDPTFKENYRFHAINGYIMDTLPGLVMAQDQRIRWYLLSMGSNENIHSIHFSGHVFTVRKKEEYKMALYNLYPGVFETVEMLPSKAGIWRVECLIGEHLHAGMSTLFLVYSNKCQTPLGMASGHIRDFQITASGQYGQWAPKLARLHYSGSINAWSTKEPFSWIKVDLLAPMIIHGIKTQGARQKFSSLYISQFIIMYSLDGKKWQTYRGNSTGTLMVFFGNVDSSGIKHNIFNPPIIARYIRLHPTHYSIRSTLRMELMGCDLNSCSMPLGMESKAISDAQITASSYFTNMFATWSPSKARLHLQGRSNAWRPQVNNPKEWLQVDFQKTMKVTGVTTQGVKSLLTSMYVKEFLISSSQDGHQWTLFFQNGKVKVFQGNQDSFTPVVNSLDPPLLTRYLRIHPQSWVHQIALRMEVLGCEAQDLY

SEQ ID NO: 2527 - DNA, 4371 bp, synthetic construct
  misc_feature 1..4371: note = Variant of human B-domain deleted Factor VIII
  source 1..4371: mol_type = other DNA
atgcagattgaactgtctacctgcttcttcctctgtttgctgaggttctgctttagcgccactagacggtactaccttggcgctgtggagctgtcctgggactatatgcagagtgatttgggagagcttcccgtcgacgcacgatttcctcctcgcgttccaaagtcatttcccttcaacacaagcgtggtgtacaagaagacgctcttcgtcgaattcaccgatcacctgttcaatatcgccaaacccagaccaccatggatgggtcttttggggcctaccatacaagcggaggtgtatgacacagttgttatcactctcaagaacatggcttctcatccggtaagtcttcacgcagtgggcgtgtcctactggaaagcttcagaaggagccgagtatgatgatcagacatcccagagggagaaagaagacgacaaggtatttccaggtgggtctcatacctatgtgtggcaagtgctcaaagagaatggccctatggcaagcgatccgctctgtttgacttacagctacctttcacacgttgacctcgtcaaggacctcaactccgggttgattggagccttgttggtatgcagggaaggatctcttgccaaagagaagacacagaccctccacaagtttatccttctctttgctgtgttcgatgagggcaaaagttggcatagcgaaacgaagaattccctcatgcaggatcgcgacgcagccagcgccagagcttggcccaagatgcacactgtgaacggatatgtcaataggtcacttcctggcttgattgggtgtcatcggaaaagtgtctactggcacgtgatcggaatggggacaacaccagaggtccactccatatttctcgaaggccataccttccttgttcgaaaccacagacaggcatccttggagatctctcccattacctttctcactgcccaaacgctccttatggacttgggtcagttccttctcttctgccatatcagctcacaccagcatgatggtatggaagcttatgtgaaagtcgacagttgtcctgaggagccacagttgcgcatgaagaataatgaagaagccgaggattacgacgacgatctcaccgattctgagatggacgtggtgaggtttgatgacgacaactctccctccttcattcaaatccggagcgtggcgaagaaacaccccaagacttgggtccactatatagcggcggaagaggaggattgggattacgctcctcttgtattggcaccagatgaccgctcatacaaaagccagtacctcaacaacggaccgcagagaattggccggaagtataagaaagtgcgatttatggcctatacagacgaaacctttaagacaagggaggccatccagcatgagagtgggattttgggacctcttctttacggcgaagttggtgataccctcctcatcatcttcaagaatcaagcttctcgcccctataacatttacccacacgggatcactgacgttaggcctttgtatagcagaagacttcccaaaggcgtgaagcatctcaaagacttccccattttgccaggcgagatctttaagtacaaatggaccgtcacagtggaagatggaccgactaaatcagaccctcgatgccttacgcggtactattcctccttcgtgaatatggagagagatttggcaagcggactcataggaccactcctcatctgttacaaggaatctgtagaccagaggggtaaccagattatgagtgataaacgcaatgtgatcctttttagcgtcttcgacgagaaccggtcctggtacttgaccgagaatatacaaaggttccttcccaaccccgcaggcgttcagttggaagaccctgagtttcaggccagcaatattatgcactcaatcaacggctatgtgtttgatagtctccagctttctgtttgcctccatgaagtagcctattggtacatcttgtcaattggtgctcaaacagacttcctctccgtcttcttctccggctacacctttaagcacaagatggtgtatgaggacactctcacactctttccattttctggagaaaccgtgttcatgagcatggagaatccaggcctttggatcttgggttgccacaacagtgattttcgcaatcggggaatgactgctctcctcaaagtcagcagctgtgataagaacacaggcgactattacgaagattcttacgaggacataagtgcctacttgttgtccaagaataacgccattgagcccagatcattctcccagaatcctcccgtgcttaaaaggcatcagcgcgaaatcaccagaactactcttcagtctgatcaagaggagattgactatgacgacaccataagcgtggaaatgaagaaggaggatttcgatatcaaggacgaagatgagaaccagtctccgcggagctttcagaagaagacgcgacactacttcattgcagcagtcgaaaggctttgggactacggtatgtcatcatcccctcatgtgttgcgcaatagagctcagagtggaagtgttccacagttcaagaaagtcgtctttcaagagtttacagatggcagcttcacacagcctctctatcggggcgagcttaacgaacatttgggactccttggtccctatatccgagccgaagtggaggacaacattatggttacctttaggaatcaagcctctcgcccctacagcttctactcctccctcatcagttatgaggaggatcagagacaaggcgctgaaccacggaagaactttgtgaaaccgaatgagacgaagacctacttctggaaagtacagcaccacatggcccccacaaaagacgaattcgattgcaaagcatgggcgtatttttcagacgttgacttggagaaagatgtacattcaggacttattggtcctttgttggtgtgtcacactaacactctcaatccagcccatggcaggcaggtgacagtccaggaattcgctcttttctttaccatctttgatgagaccaagtcctggtacttcacggaaaacatggagcgcaattgcagagccccctgtaacatacagatggaggaccctacctttaaggaaaattatcggttccacgcaatcaacggatacattatggatacactccctggccttgtgatggctcaggaccaacgaatcaggtggtacctcctcagcatgggttctaatgagaacatacactccattcacttttcaggacatgtgttcactgtccggaagaaagaagagtataagatggccctctacaatttgtatccaggcgtgtttgagaccgttgaaatgcttccctctaaagctggcatctggagagtagagtgcttgatcggagaacatcttcacgcaggtatgagcaccttgttcctcgtgtacagcaacaaatgtcagaccccacttggcatggccagtggacacattcgcgactttcagatcacagcatctggccagtatggacaatgggccccaaagttggctcgcctccattactccggtagcataaatgcgtggtccactaaagaacctttcagctggattaaggtcgatcttcttgcccccatgatcatccacggcattaagacacagggagcgaggcagaaattctcctccctctacatctcacagttcattattatgtatagtttggacggcaagaagtggcaaacttatagaggtaacagtactggaacactcatggtgttcttcggcaacgttgatagctctggcatcaaacacaacatctttaatcctcccataatagctcggtacatcagattgcatccgacccactacagcattaggagtacactccgaatggagcttatgggttgcgacttgaattcctgttcaatgccactcggaatggagtctaaagccatctctgatgcacagataaccgccagtagctactttacgaacatgtttgctacgtggtcaccctctaaggcaaggcttcatttgcaaggccggtctaatgcctggagacctcaggtgaacaacccgaaagaatggctccaggtggactttcagaagaccatgaaagtaacaggtgtcactactcagggagttaagtccttgctcaccagcatgtatgtgaaggagttccttatttcctcatcacaagatggccaccagtggaccctcttctttcagaatggtaaggtcaaagtgtttcagggcaatcaagacagcttcacacccgtggtgaacagtcttgatcctccactcttgacacgataccttcgaatccatccacagtcttgggttcaccagattgcattgcgcatggaagtacttggatgcgaggctcaggacctctac

SEQ ID NO: 2528 - protein, 1457 aa, synthetic construct
  REGION 1..1457: note = Variant of human B-domain deleted Factor VIII
MQIELSTCFFLCLLRFCFSATRRYYLGAVELSWDYMQSDLGELPVDARFPPRVPKSFPFNTSVVYKKTLFVEFTDHLFNIAKPRPPWMGLLGPTIQAEVYDTVVITLKNMASHPVSLHAVGVSYWKASEGAEYDDQTSQREKEDDKVFPGGSHTYVWQVLKENGPMASDPLCLTYSYLSHVDLVKDLNSGLIGALLVCREGSLAKEKTQTLHKFILLFAVFDEGKSWHSETKNSLMQDRDAASARAWPKMHTVNGYVNRSLPGLIGCHRKSVYWHVIGMGTTPEVHSIFLEGHTFLVRNHRQASLEISPITFLTAQTLLMDLGQFLLFCHISSHQHDGMEAYVKVDSCPEEPQLRMKNNEEAEDYDDDLTDSEMDVVRFDDDNSPSFIQIRSVAKKHPKTWVHYIAAEEEDWDYAPLVLAPDDRSYKSQYLNNGPQRIGRKYKKVRFMAYTDETFKTREAIQHESGILGPLLYGEVGDTLLIIFKNQASRPYNIYPHGITDVRPLYSRRLPKGVKHLKDFPILPGEIFKYKWTVTVEDGPTKSDPRCLTRYYSSFVNMERDLASGLIGPLLICYKESVDQRGNQIMSDKRNVILFSVFDENRSWYLTENIQRFLPNPAGVQLEDPEFQASNIMHSINGYVFDSLQLSVCLHEVAYWYILSIGAQTDFLSVFFSGYTFKHKMVYEDTLTLFPFSGETVFMSMENPGLWILGCHNSDFRNRGMTALLKVSSCDKNTGDYYEDSYEDISAYLLSKNNAIEPRSFSQNPPVLKRHQREITRTTLQSDQEEIDYDDTISVEMKKEDFDIKDEDENQSPRSFQKKTRHYFIAAVERLWDYGMSSSPHVLRNRAQSGSVPQFKKVVFQEFTDGSFTQPLYRGELNEHLGLLGPYIRAEVEDNIMVTFRNQASRPYSFYSSLISYEEDQRQGAEPRKNFVKPNETKTYFWKVQHHMAPTKDEFDCKAWAYFSDVDLEKDVHSGLIGPLLVCHTNTLNPAHGRQVTVQEFALFFTIFDETKSWYFTENMERNCRAPCNIQMEDPTFKENYRFHAINGYIMDTLPGLVMAQDQRIRWYLLSMGSNENIHSIHFSGHVFTVRKKEEYKMALYNLYPGVFETVEMLPSKAGIWRVECLIGEHLHAGMSTLFLVYSNKCQTPLGMASGHIRDFQITASGQYGQWAPKLARLHYSGSINAWSTKEPFSWIKVDLLAPMIIHGIKTQGARQKFSSLYISQFIIMYSLDGKKWQTYRGNSTGTLMVFFGNVDSSGIKHNIFNPPIIARYIRLHPTHYSIRSTLRMELMGCDLNSCSMPLGMESKAISDAQITASSYFTNMFATWSPSKARLHLQGRSNAWRPQVNNPKEWLQVDFQKTMKVTGVTTQGVKSLLTSMYVKEFLISSSQDGHQWTLFFQNGKVKVFQGNQDSFTPVVNSLDPPLLTRYLRIHPQSWVHQIALRMEVLGCEAQDLY

SEQ ID NO: 2529 - DNA, 4371 bp, synthetic construct
  misc_feature 1..4371: note = Variant of human B-domain deleted Factor VIII
  source 1..4371: mol_type = other DNA
atgcagattgaactgtctacctgcttcttcctctgtttgctgaggttctgctttagcgccactagacggtactaccttggcgctgtggagctgtcctgggactatatgcagagtgatttgggagagcttcccgtcgacgcacgatttcctcctcgcgttccaaagtcatttcccttcaacacaagcgtggtgtacaagaagacgctcttcgtcgaattcaccgatcacctgttcaatatcgccaaacccagaccaccatggatgggtcttttggggcctaccatacaagcggaggtgtatgacacagttgttatcactctcaagaacatggcttctcatccggtaagtcttcacgcagtgggcgtgtcctactggaaagcttcagaaggagccgagtatgatgatcagacatcccagagggagaaagaagacgacaaggtatttccaggtgggtctcatacctatgtgtggcaagtgctcaaagagaatggccctatggcaagcgatccgctctgtttgacttacagctacctttcacacgttgacctcgtcaaggacctcaactccgggttgattggagccttgttggtatgcagggaaggatctcttgccaaagagaagacacagaccctccacaagtttatccttctctttgctgtgttcgatgagggcaaaagttggcatagcgaaacgaagaattccctcatgcaggatcgcgacgcagccagcgccagagcttggcccaagatgcacactgtgaacggatatgtcaataggtcacttcctggcttgattgggtgtcatcggaaaagtgtctactggcacgtgatcggaatggggacaacaccagaggtccactccatatttctcgaaggccataccttccttgttcgaaaccacagacaggcatccttggagatctctcccattacctttctcactgcccaaacgctccttatggacttgggtcagttccttctcttctgccatatcagctcacaccagcatgatggtatggaagcttatgtgaaagtcgacagttgtcctgaggagccacagttgcgcatgaagaataatgaagaagccgaggattacgacgacgatctcaccgattctgagatggacgtggtgaggtttgatgacgacaactctccctccttcattcaaatccggagcgtggcgaagaaacaccccaagacttgggtccactatatagcggcagaagaggaggattgggattacgctcctcttgtattggcaccagatgaccgctcatacaaaagccagtacctcaacaacggaccgcagagaattggccggaagtataagaaagtgcgatttatggcctatacagacgaaacctttaagacaagggaggccatccagcatgagagtgggattttgggacctcttctttacggcgaagttggtgataccctcctcatcatcttcaagaatcaagcttctcgcccctataacatttacccacacgggatcactgacgttaggcctttgtatagcagaagacttcccaaaggcgtgaagcatctcaaagacttccccattttgccaggcgagatctttaagtacaaatggaccgtcacagtggaagatggaccgactaaatcagaccctcgatgccttacgcggtactattcctccttcgtgaatagtgagagagatttggcaagcggactcataggaccactcctcatctgttacaaggaatctgtagaccagaggggtaaccagattatgagtgataaacgcaatgtgatcctttttagcgtcttcgacgagaaccggtcctggtacttgaccgagaatatacaaaggttccttcccaaccccgcaggcgttcagttggaagaccctgagtttcaggccagcaatattatgcactcaatcaacggctatgtgtttgatagtctccagctttctgtttgcctccatgaagtagcctattggtacatcttgtcaattggtgctcaaacagacttcctctccgtcttcttctccggctacacctttaagcacaagatggtgtatgaggacactctcacactctttccattttctggagaaaccgtgttcatgagcatggagaatccaggcctttggatcttgggttgccacaacagtgattttcgcaatcggggaatgactgctctcctcaaagtcagcagctgtgataagaacacaggcgactattacgaagattcttacgaggacataagtgcctacttgttgtccaagaataacgccattgagcccagatcattctcccagaatcctcccgtgcttaaaaggcatcagcgcgaaatcaccagaactactcttcagtctgatcaagaggagattgactatgacgacaccataagcgtggaaatgaagaaggaggatttcgatatctatgacgaagatgagaaccagtctccgcggagctttcagaagaagacgcgacactacttcattgcagcagtcgaaaggctttgggactacggtatgtcatcatcccctcatgtgttgcgcaatagagctcagagtggaagtgttccacagttcaagaaagtcgtctttcaagagtttacagatggcagcttcacacagcctctctatcggggcgagcttaacgaacatttgggactccttggtccctatatccgagccgaagtggaggacaacattatggttacctttaggaatcaagcctctcgcccctacagcttctactcctccctcatcagttatgaggaggatcagagacaaggcgctgaaccacggaagaactttgtgaaaccgaatgagacgaagacctacttctggaaagtacagcaccacatggcccccacaaaagacgaattcgattgcaaagcatgggcgtatttttcagacgttgacttggagaaagatgtacattcaggacttattggtcctttgttggtgtgtcacactaacactctcaatccagcccatggcaggcaggtgacagtccaggaattcgctcttttctttaccatctttgatgagaccaagtcctggtacttcacggaaaacatggagcgcaattgcagagccccctgtaacatacagatggaggaccctacctttaaggaaaattatcggttccacgcaatcaacggatacattatggatacactccctggccttgtgatggctcaggaccaacgaatcaggtggtacctcctcagcatgggttctaatgagaacatacactccattcacttttcaggacatgtgttcactgtccggaagaaagaagagtataagatggccctctacaatttgtatccaggcgtgtttgagaccgttgaaatgcttccctctaaagctggcatctggagagtagagtgcttgatcggagaacatcttcacgcaggtatgagcaccttgttcctcgtgtacagcaacaaatgtcagaccccacttggcatggccagtggacacattcgcgactttcagatcacagcatctggccagtatggacaatgggccccaaagttggctcgcctccattactccggtagcataaatgcgtggtccactaaagaacctttcagctggattaaggtcgatcttcttgcccccatgatcatccacggcattaagacacagggagcgaggcagaaattctcctccctctacatctcacagttcattattatgtatagtttggacggcaagaagtggcaaacttatagaggtaacagtactggaacactcatggtgttcttcggcaacgttgatagctctggcatcaaacacaacatctttaatcctcccataatagctcggtacatcagattgcatccgacccactacagcattaggagtacactccgaatggagcttatgggttgcgacttgaattcctgttcaatgccactcggaatggagtctaaagccatctctgatgcacagataaccgccagtagctactttacgaacatgtttgctacgtggtcaccctctaaggcaaggcttcatttgcaaggccggtctaatgcctggagacctcaggtgaacaacccgaaagaatggctccaggtggactttcagaagaccatgaaagtaacaggtgtcactactcagggagttaagtccttgctcaccagcatgtatgtgaaggagttccttatttcctcatcacaagatggccaccagtggaccctcttctttcagaatggtaaggtcaaagtgtttcagggcaatcaagacagcttcacacccgtggtgaacagtcttgatcctccactcttgacacgataccttcgaatccatccacagtcttgggttcaccagattgcattgcgcatggaagtacttggatgcgaggctcaggacctctac

SEQ ID NO: 2530 - protein, 1457 aa, synthetic construct
  REGION 1..1457: note = Variant of human B-domain deleted Factor VIII
MQIELSTCFFLCLLRFCFSATRRYYLGAVELSWDYMQSDLGELPVDARFPPRVPKSFPFNTSVVYKKTLFVEFTDHLFNIAKPRPPWMGLLGPTIQAEVYDTVVITLKNMASHPVSLHAVGVSYWKASEGAEYDDQTSQREKEDDKVFPGGSHTYVWQVLKENGPMASDPLCLTYSYLSHVDLVKDLNSGLIGALLVCREGSLAKEKTQTLHKFILLFAVFDEGKSWHSETKNSLMQDRDAASARAWPKMHTVNGYVNRSLPGLIGCHRKSVYWHVIGMGTTPEVHSIFLEGHTFLVRNHRQASLEISPITFLTAQTLLMDLGQFLLFCHISSHQHDGMEAYVKVDSCPEEPQLRMKNNEEAEDYDDDLTDSEMDVVRFDDDNSPSFIQIRSVAKKHPKTWVHYIAAEEEDWDYAPLVLAPDDRSYKSQYLNNGPQRIGRKYKKVRFMAYTDETFKTREAIQHESGILGPLLYGEVGDTLLIIFKNQASRPYNIYPHGITDVRPLYSRRLPKGVKHLKDFPILPGEIFKYKWTVTVEDGPTKSDPRCLTRYYSSFVNSERDLASGLIGPLLICYKESVDQRGNQIMSDKRNVILFSVFDENRSWYLTENIQRFLPNPAGVQLEDPEFQASNIMHSINGYVFDSLQLSVCLHEVAYWYILSIGAQTDFLSVFFSGYTFKHKMVYEDTLTLFPFSGETVFMSMENPGLWILGCHNSDFRNRGMTALLKVSSCDKNTGDYYEDSYEDISAYLLSKNNAIEPRSFSQNPPVLKRHQREITRTTLQSDQEEIDYDDTISVEMKKEDFDIYDEDENQSPRSFQKKTRHYFIAAVERLWDYGMSSSPHVLRNRAQSGSVPQFKKVVFQEFTDGSFTQPLYRGELNEHLGLLGPYIRAEVEDNIMVTFRNQASRPYSFYSSLISYEEDQRQGAEPRKNFVKPNETKTYFWKVQHHMAPTKDEFDCKAWAYFSDVDLEKDVHSGLIGPLLVCHTNTLNPAHGRQVTVQEFALFFTIFDETKSWYFTENMERNCRAPCNIQMEDPTFKENYRFHAINGYIMDTLPGLVMAQDQRIRWYLLSMGSNENIHSIHFSGHVFTVRKKEEYKMALYNLYPGVFETVEMLPSKAGIWRVECLIGEHLHAGMSTLFLVYSNKCQTPLGMASGHIRDFQITASGQYGQWAPKLARLHYSGSINAWSTKEPFSWIKVDLLAPMIIHGIKTQGARQKFSSLYISQFIIMYSLDGKKWQTYRGNSTGTLMVFFGNVDSSGIKHNIFNPPIIARYIRLHPTHYSIRSTLRMELMGCDLNSCSMPLGMESKAISDAQITASSYFTNMFATWSPSKARLHLQGRSNAWRPQVNNPKEWLQVDFQKTMKVTGVTTQGVKSLLTSMYVKEFLISSSQDGHQWTLFFQNGKVKVFQGNQDSFTPVVNSLDPPLLTRYLRIHPQSWVHQIALRMEVLGCEAQDLY
